(19) United States
(12) Patent Application Publication
(10) Pub. No.: US 2013/0280170 A1
(43) Pub. Date: Oct. 24, 2013

(54) Imaging methods for oncolytic virus therapy

(71) Applicant: Aladar A. Szalay, Highland, CA (US)

(72) Inventor: Aladar A. Szalay, Highland, CA (US)

(21) Appl. No.: 13/815,728

(22) Filed: Mar. 13, 2013

Related U.S. Application Data
(60) Provisional application No. 61/687,347, filed on Apr. 20, 2012.

(51) Int. Cl. A61K 49/10; C12Q 1/70

(52) U.S. Cl. CPC A61K 49/10; C12Q 1/70
USPC 424/9.2; 435/5; 424/9.37

(57) ABSTRACT

Diagnostic methods for in vivo and ex vivo detection of oncolytic virus infection of tumors in a subject are provided. The diagnostic methods employ imaging agents that detect macrophage or inflammatory cells, such perfluorocarbon (PFC) imaging agents, to detection of inflammation associated with oncolytic virus administration, and, thereby detect tumors and cancers. Combinations and kits for use in the practicing the methods also are provided.

### PRIORITY CLAIM AND RELATED APPLICATIONS

[0001] Benefit of priority is claimed to U.S. Provisional Application Ser. No. 61/687,347, filed Apr. 20, 2012, to Aladar A. Szalay, entitled “IMAGING METHODS FOR ONCOLYTIC VIRUS THERAPY.”

[0002] This application is related to International PCT application No. Serial No. (Attorney Dkt. No. 33316-4839PC), filed Mar. 13, 2013, entitled “IMAGING METHODS FOR ONCOLYTIC VIRUS THERAPY,” which also claims priority to U.S. Provisional Application Ser. No. 61/687,347. The subject matter of each of the above-noted applications is incorporated by reference in its entirety.

### INCORPORATION BY REFERENCE OF SEQUENCE LISTING PROVIDED ON COMPACT DISCS

[0003] An electronic version on compact disc (CD-R) of the Sequence Listing is filed herewith in duplicate (labeled Copy #1 and Copy #2), the contents of which are incorporated by reference in their entirety. The computer-readable file on each of the aforementioned compact discs, created on Mar. 11, 2013, is identical, 3.87 megabytes in size, and titled 4839seq.001.txt.

### FIELD OF INVENTION

[0004] Methods for detecting tumor colonization by an oncolytic virus and detecting and/or imaging tumors infected with an oncolytic virus are provided. Methods for determining the efficacy of an oncolytic virus therapy also are provided.

### BACKGROUND

[0005] Oncolytic viruses, such as vaccinia virus, have been shown to be effective for the diagnosis and therapy of tumors in preclinical models of a wide variety of cancers. Recent clinical studies have shown that these viruses also exhibit anti-tumor effects in humans. The effectiveness of oncolytic virus therapies depends on the localization and preferential accumulation of the viruses in the tumor following administration. Existing methods for detecting the presence of virus in a tumor depend on expression of a detectable protein encoded by the virus or the analysis of extracted tumor tissue. Detection of expressed proteins, such as fluorescent proteins or proteins that bind to contrast agents, can often be difficult to image in vivo and detection may depend on high levels of gene expression which may be toxic to the subject or difficult to attain. In addition, tumor biopsies for ex vivo detection are invasive procedures that can be painful, risky, and costly to the patient. Accordingly, there exists a need for non-invasive methods of detecting and assessing the level of tumor colonization by an oncolytic virus.

### SUMMARY

[0006] Provided are methods and combinations for detecting the accumulation of oncolytic virus in a subject to whom the virus is administered. The methods herein can be adapted for use with any method in which an oncolytic virus is administered. The methods detect accumulation of macrophage and/or other inflammatory cells that occur concomitant with oncolytic virus accumulation. The macrophage and/or other inflammatory cells are detected using reagents specific therefor. Detection of the macrophage and other inflammatory cells provides for detection of that viruses as they accumulate in the same loci that these cells occur. As a result, viral infection/accumulation can be monitored indirectly, and it is not necessary for the viruses encode or contain reporters or other detectable moieties, thus, permitting use of therapeutic oncolytic viruses that do not encode such extraneous products. Hence, for example, clonal strains and strains modified to encode therapeutic products only can be employed. The methods provided herein include any methods in which detection of viruses is required or is an element. Such methods include, but are not limited to, detection, diagnosis and monitoring of immunoprivileged cells, such as tumors, monitoring treatment thereof, including assessing efficacy of treatment by detecting, first infection of tumor cells and, then, their decrease. Efficacy assessment depends upon the stage of treatment. Initially virus accumulation is assessed, which is indicative that virus is colonizing a site and replicating, which is necessary for oncolysis. After such time, decreases in virus accumulation are indicative that treatment is effective. Thus, also provided are uses of agents for detection of macrophage and/or other inflammatory cells for detecting oncolytic viruses.

[0007] Any agent for detecting macrophage and/or other inflammatory cells can be employed in the methods provided herein. The macrophage and/or other inflammatory cells can be detected by imaging or by sampling body fluids or biopsies or other such methods. Exemplary of agents for detection of macrophage and/or other inflammatory cells are perfluorocarbons and perfluorocarbon-containing compounds. The agents typically are imaging agents for detection by imaging, such as MRI and PET method methods. The agents accumulate in the macrophages or cells by phagocytosis.

[0008] Thus, provided are methods for detecting and/or imaging cells and tissues infected with an oncolytic virus or detecting and/or imaging sites in which virus accumulates by administering an oncolytic virus to a subject; administering an agent for detection of macrophage or inflammatory cells in a subject; detecting or imaging the accumulation of macrophage or inflammatory cells in a subject. Oncolytic viruses accumulate in immunoprivileged tissues, such as tumors and wounds or other inflamed tissues. The methods provided herein, thus, can detect or image tumors cells in a subject by detecting or imaging the accumulation of macrophage or other inflammatory cells that are recruited when cells are infected by oncolytic viruses. Detection or imaging changes in such accumulation can detect or diagnose tumors, and/or monitor oncolytic virus therapy. The method of claim 1, wherein Oncolytic therapy can be monitored, for example, by imaging the macrophage to detect or image any changes in the profile of accumulated macrophage.

[0009] Since macrophage and/or inflammatory cells are distinct from the virus, the agents that detect them are administered separately from the virus. As a result, it is not necessary for the virus to encode any heterologous or otherwise detectable protein or protein that induces or produces a detectable signal. The viruses, however, can contain such protein as a separate or complementary way of detecting the virus. Thus, the oncolytic viruses can be wild type viruses or viruses that do not encode any heterologous gene products. The viruses, however, can encode heterologous gene products or heterologous nucleic acids, such as therapeutic proteins, including anti-tumor proteins. Thus, the virus can include heterologous nucleic acid that encodes a therapeutic or diagnostic reagent, such as, for example, an anticancer agent, an anti-metastatic agent, an antiangiogenic agent, an immunomodulatory molecule, an antigen, a cell matrix degradative gene, genes for tissue regeneration and reprogramming human somatic cells to pluripotency, enzymes that modify a substrate to produce a detectable product or signal or are detectable by antibodies, proteins that can bind to a contrasting agent, genes for optical imaging or detection, genes for PET imaging and genes for MRI imaging. Monitoring accumulation of viruses can be used to assess whether the therapy is effective.

[0010] Thus, among the methods provided herein are methods for assessing oncolytic virus infection of a tumor, by administering an oncolytic virus to a subject having a tumor; administering an agent for imaging macrophage or inflammatory cells to the subject; and detecting or imaging the accumulation of the agent in the tumor, wherein accumulation of the agent in the tumor is indicative that oncolytic virus has infected the tumor

[0011] Also provided are methods for r assessing the responsiveness of a tumor to oncolytic therapy by administering an oncolytic virus to a subject having a tumor; administering an agent for imaging macrophage or inflammatory cells to the subject; and detecting or imaging the accumulation of the agent, such as perfluorocarbon in the tumor. Accumulation of the agent in the tumor is indicative that the tumor is responsive to treatment with an oncolytic virus, thus, indicating that treatment is efficacious or that a particular virus is a candidate for therapy. Also detection of the accumulation of the macrophage or inflammatory cells can be used to detect or image or diagnose tumors. The agent can be detected or imaged in vivo in the subject or ex vivo in body fluid or tissue samples, such as biopsies. The agent can be detected or imaged by any suitable method, such as magnetic resonance imaging (MRI) or magnetic resonance spectroscopy (MRS).

[0012] The agent can be administered with the virus, sequentially, intermittently, in any order, in the same or a separate composition. For example, the imaging agent can be administered at a predetermined time prior to or after the administration of the oncolytic virus, such as at least 15 minutes, 30 minutes, 1 hour, 2 hours, 3 hours, 4 hours, 6 hours, 12 hours, 18 hours, 24 hours, or 48 hours or more prior to the administration of the oncolytic virus. The particular time can be empirically determined. The agent can be administered at a predetermined time following the administration of the oncolytic virus, such as, but not limited to, at least 1 hour, 2 hours, 3 hours, 4 hours, 6 hours, 12 hours, 18 hours, 24 hours, 2 days, 3 days, 4 days, 5 days, 6 days, 7 days, 8 days, 9 days, 10 days, 11 days, 12 days, 13 days, 14 days, 3 weeks 4 weeks, 1 month following the administration of the oncolytic virus. The agent can be detected or imaged, for example, at least 1 hour, 2 hours, 4 hours, 6 hours, 12 hours, 18 hours, 24 hours, 30 hours, 36 hours, 42 hours, or 48 hours following the administration of the perfluorocarbon imaging agent. The agent can be detected or imaged a plurality of times at successive time points following administration of the oncolytic virus or intermittently with administration of the virus or sequentially. The oncolytic virus can be administered in an amount sufficient to induce accumulation of the agent but that is lower than a treatment dosage of the virus, particularly for methods of diagnosis or detection of tumors, or for selecting or identify viruses that are candidates for treatment or for assessing efficacy before initiating treatment. Dosages of oncolytic virus administered can be empirically determined if needed, and include, but are not limited to, for example, 1×10² pfu to 1×10⁸ pfu, such as at least or at least about or is or is about 1×10² pfu, 1×10³ pfu, 1×10⁴ pfu, 1×10⁵ pfu, 1×10⁶ pfu, 1×10⁷ pfu or 1×10⁸ pfu. The viruses can be administered in therapeutic dosages, such as, but not limited to 1×10⁶ pfu to 1×10¹⁴ pfu, or an amount that is at least or at least about or is or is about 1×10⁶ pfu, 1×10⁷ pfu or 1×10⁸ pfu, 1×10⁹ pfu, 1×10¹⁰ pfu, 1×10¹¹ pfu, 1×10¹² pfu, 1×10¹³ pfu, or 1×10¹⁴ pfu. If a virus is tested for efficacy and is determined to accumulate in targeted tissues, treatment can continued, typically at a therapeutic dosage. For example, the virus can be administered in an amount that is at least 1×10⁹ pfu at least one time over at least one cycle of administration. It can be administered a plurality of times. The agent can be detected or imaged at a predetermined time(s) after each successive administration of the virus in a cycle of administration. The virus can be administered a single time or for a plurality of cycles. A cycle of administration can be, for example, at least or is two days, three days, four days, five days, six days, seven days, 14 days, 21 days or 28 days. The virus can be administered once or more, such as, two times, three times, four times, five times, six times or seven times over a cycle of administration. Exemplary of such protocols is administering the virus on the first day of a cycle, the first and second day of the cycle, each of the first three consecutive days of the cycle, each of the first four consecutive days of the cycle, each of the first five consecutive days of the cycle, each of the first six consecutive days of the cycle, or each of the first seven consecutive days of the cycle.

[0013] The virus can be administered systemically or locally. It can be administered, for example, by intravenous, intraarterial, intratumoral, endoscopic, intralesional, intramuscular, intradermal, intraperitoneal, intravesicular, intraarticular, intrapleural, percutaneous, subcutaneous, oral, parenteral, intranasal, intratracheal, inhalation, intracranial, intraprostatic, intravitreal, topical, ocular, vaginal, rectal, transdermal and other such routes of administration.

[0014] The agents for detection or imaging include perfluorocarbon imaging agents. These include, for example, linear, branched and cyclic perfluorocarbons. Exemplary of perfluorocarbon imaging agents are those that contain a perfluorocarbon include perfluoroalkyl ethers, such as a perfluoropolyether, perfluoro crown ether, such as perfluoro-15-crown-5-ether, perfluoroalkane, perfluoropentane, perfluorohexane, perfluorononane, perfluorohexyl bromide, perfluorooctyl bromide, perfluorooctane, perfluorodecalin, perfluorocycloalkane, perfluoro amine, and mixtures thereof. The imaging agent can include a mixture of two or more perfluorocarbons.

[0015] The agents include perfluorocarbon imaging agents that contain a poly(ethylene oxide) block copolymer, such as for example, a poly(ethylene oxide)-polyester block copolymer, such as, but not limited to, poly(ethylene oxide)-block-poly(ε-caprolactone) copolymer, poly(ethylene oxide)-block-(L) polylactide copolymer, poly(ethylene oxide)-block-(D) polylactide copolymer, poly(ethylene oxide)-block-(D,L) polylactide copolymer, and combinations thereof. Exemplary of such is a poly(ethylene oxide) block copolymer is a poly(ethylene oxide)-polyether block copolymer, such as a polyethylene-polyether tri-block copolymer, including, for example, poly(ethylene oxide)-poly(propylene oxide)-poly(ethylene oxide) (PEO-PPO-PEO) tri-block copolymer.

[0016] The agents, particularly non-polar agents, can be formulated as an emulsion. For example, the agent can be a perfluorocarbon imaging agent, and can be present in the emulsion in an amount of, for example, from about 5% v/v to about 60% v/v, inclusive, of the emulsion, such as from about 10% v/v to about 40% v/v of the emulsion. The emulsions also can include other components, such as emulsification agents and an emulsion stabilizing agents.

[0017] The emulsions can contain nanoparticles with an average size of is less than or about 800 nm, such as, for example, less than or about 750 nm, less than or about 700 nm, less than or about 650 nm, less than or about 600 nm, less than or about 550 nm, less than or about 500 nm, less than or about 450 nm, than or about 400 nm, than or about 350 nm, than or about 300 nm, than or about 250 nm, than or about 200 nm, than or about 150 nm, than or about 100 nm, than or about 50 nm, or than or about 25 nm. The emulsion can have a polydispersity index ranging from about 0.1 to about 0.2.

[0018] The agent can contains a targeting moiety or a detectable moiety, such as a dye, a fluorescent molecule or a radio-label, such as an ¹⁸F isotope, for imaging, such as by positron emission tomography (PET) imaging

[0019] The methods can be practiced on mammalian subjects, including human and a non-human animal. Non-human animals include, but are not limited to, domesticated animals, zoo animals and farm animals, such as, for example an ape, monkey, gorilla, mouse, rat, rabbit, ferret, chicken, goat, cow, deer, sheep, horse, pig, dog or cat.

[0020] Oncolytic therapy can be combined with other therapies, including surgery, immunotherapy, radiation and/or chemotherapy. The agents can be used to monitor the effectiveness or assess the combination therapies. The tumors that can be detected and/or that are treated with the oncolytic virus include, but are not limited to, a tumor of the lung, breast, colon, brain, prostate, liver, pancreas, esophagus, kidney, stomach, thyroid, bladder, uterus, cervix or ovary. Tumors that can be detected include, but are not limited to, solid tumors, circulating tumors or cells, blood tumors and lymphatic tumors, metastatic tumors.

[0021] Many oncolytic therapeutic viruses are known. These include oncolytic herpes viruses, vesicular stomatitis viruses, reoviruses and vaccinia viruses, including NYAC, Lister strains, such as LIVP, Wyeth, WR and other strains. Exemplary of the viruses are LIVP strains, which include any known to those of skill in the art or developed or derived therefrom. Included for example, is an LIVP virus or modified form thereof designated GLV-1h68 (GLV-ONC1), viruses whose genome contains a sequence of nucleotides set forth in SEQ ID NO:2, or a sequence of nucleotides that has at least 90% or 95% sequence identity to SEQ ID NO:2 or a virus or modified form thereof that includes a genome that contains sequence of nucleotides set forth in SEQ ID NOS: 20-26, a sequence of nucleotides that has at least 97% sequence identity to a sequence of nucleotides set forth in SEQ ID NO: 20-26 or oncolytic virus that includes a sequence of nucleotides selected from a virus whose genome comprises SEQ ID NO:1, or a sequence of nucleotides that exhibits at least 99% sequence identity to any of SEQ ID NOS: 1.

[0022] Also included are clonal strains of viruses, such as clonal strains of LIVP and a modified form thereof. Included are LIVP that contain a sequence of nucleotides selected from: a) nucleotides 2,256-181,114 or 10,073-180,095 of SEQ ID NO:20, nucleotides 11,243-182,721 of SEQ ID NO:21, nucleotides 6,264-181,390 of SEQ ID NO:22, nucleotides 7,044-181,820 of SEQ ID NO:23, nucleotides 6,674-181,409 of SEQ ID NO:24, nucleotides 6,716-181,367 of SEQ ID NO:25 or nucleotides 6,899-181,870 of SEQ ID NO:26; and b) a sequence of nucleotides that has at least 97% sequence identity to a sequence of nucleotides 2,256-181,114 or 10,073-180,095 of SEQ ID NO:20, nucleotides 11,243-182,721 of SEQ ID NO:21, nucleotides 6,264-181,390 of SEQ ID NO:22, nucleotides 7,044-181,820 of SEQ ID NO:23, nucleotides 6,674-181,409 of SEQ ID NO:24, nucleotides 6,716-181,367 of SEQ ID NO:25 or nucleotides 6,899-181,870 of SEQ ID. The viruses can encode a heterologous gene product, such as a heterologous gene product is inserted into or in place of a non-essential gene or region in the genome of the virus. Exemplary are vaccinia viruses, such as LIVP viruses in which the heterologous gene product is inserted at the hemagglutinin (HA), thymidine kinase (TK), F14.5L, vaccinia growth factor (VGF), A35R, N1L, E2L/E3L, K1L/K2L, superoxide dismutase locus, 7.5K, C7-K1L, B13R+B14R, A26L or 14L gene loci in the genome of the virus. The nucleic acid encoding the heterologous gene product can be operatively linked to a promoter. The promoter can be a constitutive or inducible promoter. The heterologous nucleic acid can encode, for example, a therapeutic product and/or a reporter gene product, such as a fluorescent protein, a bioluminescent protein, a receptor or an enzyme. Exemplary fluorescent proteins include a green fluorescent protein, an enhanced green fluorescent protein, a blue fluorescent protein, a cyan fluorescent protein, a yellow fluorescent protein, a red fluorescent protein, or a far-red fluorescent protein, such as the Katushka (TurboFP635; available from Evrogen; see, also, Shcerobo et al. (2007) Nat. Methods 4:741-746), which is well-known far-red mutant of the red fluorescent protein from sea anemone Entacmaea quadricolor. Other reporter gene product include, but are not limited to, enzymes, such as a luciferase, β-glucuronidase, β-galactosidase, chloramphenicol acetyl tranferase (CAT), alkaline phosphatase and horseradish peroxidase. Enzymes can be detected by reaction of the enzyme with a substrate. The reporter gene product, for example, can be a receptor that binds to a detectable moiety or a ligand attached to a detectable moiety, such as, for example, a radiolabel, a chromogen or a fluorescent moiety.

[0023] The viruses also additionally can be detected by a different method, including, detection in vivo in the subject or ex vivo in a tumor biopsy sample from the subject. Expression of a reporter gene product in a virus can be detected by a method selected from among flow cytometry, fluorescence microscopy, fluorescence spectroscopy, magnetic resonance spectroscopy, positron emission tomography and luminescence spectroscopy.

[0024] Also provided are combinations that contain an oncolytic virus; and an agent for imaging microphage. The virus and agent are any described above and below herein, including the perfluorocarbon imaging agent and the vaccinia viruses. The combinations can be packaged as a kit, optionally including instructions for use and/or other reagents and devices or materials for implementation of the methods.

### DETAILED DESCRIPTION

### Outline

[0025] A. DEFINITIONS
[0026] B. OVERVIEW
[0027] C. METHODS FOR IMAGING TUMOR INFLAMMATION INDUCED BY ONCOLYTIC VIRUSES
   [0028] 1. Exemplary Methods for Imaging Tumor Inflammation
      [0029] a. Exemplary Subjects
   [0030] 2. Perfluorocarbon Imaging Agents for Use in the Methods
      [0031] a. Perfluorocarbon Emulsions
         [0032] i. Exemplary Perfluorocarbons (PFCs)
         (1) Modified perfluorocarbons
         [0033] ii. Selection of Perfluorocarbons
      [0034] b. Emulsification and Emulsion Stabilization Agents
         [0035] i. Block copolymers
      [0036] c. Characteristics of Perfluorocarbon Imaging Agent Emulsions
      [0037] d. Addition of Therapeutic and Diagnostic Agents
      [0038] e. Preparation of Perfluorocarbon Imaging Agent Emulsions
   [0039] 3. Detection and Imaging Methods
      [0040] a. In vivo Detection and Imaging
      [0041] b. Ex vivo Detection and Imaging
[0042] D. VIRUSES FOR USE IN THE METHODS
   [0043] 1. Exemplary Oncolytic Viruses
      [0044] a. Poxviruses
         [0045] i. Vaccinia Viruses
         (1) Modified Vaccinia Viruses
         (2) Exemplary Modified Vaccinia Viruses
      [0046] b. Other Oncolytic Viruses
      [0047] c. Production and Preparation of Virus
         [0048] i. Methods for Generating Recombinant Virus
   [0049] 2. Expression of Therapeutic and Reporter Gene Products
      [0050] a. Exemplary Reporter Gene Products
      [0051] b. Exemplary Therapeutic Gene Products
      [0052] c. Operable linkage to promoter
   [0053] 3. Further Modifications of Oncolytic Viruses
[0054] E. APPLICATIONS OF THE METHOD
   [0055] 1. Assessment and Modification of Treatment and Selection of Viruses and Subjects for Therapy
   [0056] 2. Application of the methods to tumor therapies with other microorganisms
   [0057] 3. Methods of tracking inflammation using cells labeled with PFC imaging agents
   [0058] 4. Therapy of Tumors Using Ultrasonic Release of Therapeutic Agents
[0059] F. COMBINATIONS, KITS, AND ARTICLES OF MANUFACTURE
[0060] G. EXAMPLES

### A. DEFINITIONS

[0061] Unless defined otherwise, all technical and scientific terms used herein have the same meaning as is commonly understood by one of skill in the art to which the invention(s) belong. All patents, patent applications, published applications and publications, GENBANK sequences, websites and other published materials referred to throughout the entire disclosure herein, unless noted otherwise, are incorporated by reference in their entirety. In the event that there is a plurality of definitions for terms herein, those in this section prevail. Where reference is made to a URL or other such identifier or address, it is understood that such identifiers can change and particular information on the internet can come and go, but equivalent information is known and can be readily accessed, such as by searching the internet and/or appropriate databases. Reference thereto evidences the availability and public dissemination of such information.

[0062] As used herein, the term “perfluorocarbon,” or PFC, is used interchangeably herein with the term “fluorocarbon” and refers to a compound which includes a carbon backbone which is substituted with one or more fluorine atoms. In some examples, the perfluorocarbon does not include any covalent bonds between carbon and hydrogen. Exemplary perfluorocarbons include perfluorinated monovalent aliphatic groups (including perfluoroalkyls, alkenyls, and alkynyls) and perfluorinated aryl groups (such as phenyl, pyridinyl, and the like), as well as divalent groups such as perfluoroalkylene, perfluoroalkenylene, perfluoroalkynylene, and perfluoroarylene (e.g., 1,4-phenylene). A perfluorocarbon compound such as a perfluoroalkyl can be prepared from a corresponding non-fluorinated moiety, e.g., a hydrocarbyl moiety, by perfluorination, e.g., according to known methods for perfluorination. Perfluorocarbons can be straight or branched-chain, or cyclic. As used herein, the term “perfluorocarbon” encompasses perfluorocarbon derivatives that contain atoms other that carbon and fluorine. Perfluorocarbons include modified perfluorocarbons that contain additional moieties, such as for example, detectable moieties, such as a fluorescent dye or quantum nanodot particle, or targeting moieties.

[0063] As used herein, a perfluorocarbon imaging agent or PFC imaging agent, is a composition containing a perfluorocarbon (PFC) that can be detected by a magnetic resonance technique, such as, for example, magnetic resonance imaging (MRI) or magnetic resonance spectroscopy (MRS). Typically, the perfluorocarbon imaging agent is in the form of an emulsion that is used to contact cells in vitro or in vivo. The PFC emulsion typically contains PFCs, an emulsification agent and optionally other additives or surfactants.

[0064] As used herein, an emulsion is a composition containing a mixture of non-miscible components homogenously blended together. In particular examples, the non-miscible components include a lipophilic component and an aqueous component. An emulsion is a preparation of one liquid (e.g., the discrete or discontinuous phase) distributed in small nanoparticles throughout the body of a second liquid (e.g., the continuous phase). When oil is the dispersed liquid and an aqueous solution is the continuous phase, it is known as an oil-in-water emulsion. When water or an aqueous solution is the dispersed phase and oil or oleaginous substance is the continuous phase, it is known as a water-in-oil emulsion.

[0065] As used herein, a “nanoparticle” or “nano-sized” particle refers to a particle that is less than or equal to 500 nm in diameter.

[0066] As used herein, emulsifying/emulsification agent and emulsifier, are used interchangeably. The emulsifying agent are surface active substances which lower the interfacial tension of the liquids so that the non-oleaginous liquid may form a stable dispersion of fine droplets in the oleaginous liquid (i.e. an emulsion). Common emulsifiers include, but are not limited to metallic soaps, certain animal and vegetable oils, and various polar compounds. Suitable emulsifiers include acacia, anionic emulsifying wax, calcium stearate, carbomers, cetostearyl alcohol, cetyl alcohol, cholesterol, diethanolamine, ethylene glycol palmitostearate, glycerin monostearate, glyceryl monooleate, hydroxypropyl cellulose, hypromellose, lanolin, hydrous, lanolin alcohols, lecithin, medium-chain triglycerides, methylcellulose, mineral oil and lanolin alcohols, monobasic sodium phosphate, monoethanolamine, nonionic emulsifying wax, oleic acid, poloxamer, polyoxyethylene alkyl ethers, polyoxyethylene castor oil derivatives, polyoxyethylene sorbitan fatty acid esters, polyoxyethylene stearates, propylene glycol alginate, self-emulsifying glyceryl monostearate, sodium citrate dehydrate, sodium lauryl sulfate, sorbitan esters, stearic acid, sunflower oil, tragacanth, triethanolamine, xanthan gum and combinations thereof. In a particular example embodiment, the emulsifier is a poloxamer.

[0067] As used herein, an emulsion stabilization agent refers to an agent that acts to increase the stability of the emulsion and maintain the suspension of perfluorocarbon nanoparticles in the emulsion over time. Typically, emulsifying/emulsification agents and emulsifiers can also act as emulsion stabilization agents.

[0068] As used herein, a surfactant is a surface-active agent with a hydrophilic region and a hydrophobic region that lowers surface tension and thereby increases the emulsifying, foaming, dispersing, spreading and/or wetting properties of a substance. Surfactants include emulsifying/emulsification agents and emulsion stabilization agents and include non-ionic, cationic, anionic and zwitterionic agents.

[0069] As used herein, “virus” refers to any of a large group of infectious entities that cannot grow or replicate without a host cell. Viruses typically contain a protein coat surrounding an RNA or DNA core of genetic material, but no semipermeable membrane, and are capable of growth and multiplication only in living cells. Viruses include, but are not limited to, poxviruses, herpesviruses, adenoviruses, adeno-associated viruses, lentiviruses, retroviruses, rhabdoviruses, papillomaviruses, vesicular stomatitis virus, measles virus, Newcastle disease virus, picornavirus, Sindbis virus, papillomavirus, parvovirus, reovirus, coxsackievirus, influenza virus, mumps virus, poliovirus, and semliki forest virus.

[0070] As used herein, oncolytic viruses refer to viruses that replicate selectively in tumor cells in tumorous subjects. Some oncolytic viruses can kill a tumor cell following infection of the tumor cell. For example, an oncolytic virus can cause death of the tumor cell by lysing the tumor cell or inducing cell death of the tumor cell.

[0071] As used herein the term “vaccinia virus” or “VACV” denotes a large, complex, enveloped virus belonging to the poxvirus family. It has a linear, double-stranded DNA genome approximately 190 kbp in length, and which encodes approximately 200 proteins. Vaccinia virus strains include, but are not limited to, strains of, derived from, or modified forms of Western Reserve (WR), Copenhagen, Tashkent, Tian Tan, Lister, Wyeth, IHD-J, and IHD-W, Brighton, Ankara, MVA, Dairen I, LIPV, LC16M8, LC 16MO, LIVP, WR 65-16, Connaught, New York City Board of Health vaccinia virus strains.

[0072] As used herein, Lister Strain of the Institute of Viral Preparations (LIVP) or LIVP virus strain refers to a virus strain that is the attenuated Lister strain (ATCC Catalog No. VR-1549) that was produced by adaption to calf skin at the Institute of Viral Preparations, Moscow, Russia (Al'tshtein et al. (1985) Dokl. Akad. Nauk USSR 285:696-699). The LIVP strain can be obtained, for example, from the Institute of Viral Preparations, Moscow, Russia (see. e.g., Kutinova et al. (1995) Vaccine 13:487-493); the Microorganism Collection of FSRI SRC VB Vector (Kozlova et al. (2010) Environ. Sci. Technol. 44:5121-5126); or can be obtained from the Moscow Ivanovsky Institute of Virology (C0355 K0602; Agranovski et al. (2006) Atmospheric Environment 40:3924-3929). It also is well known to those of skill in the art; it was the vaccine strain used for vaccination in the USSR and throughout Asia and India. The strain is used by researchers and is well known (see e.g., Altshteyn et al. (1985) Dokl. Akad. Nauk USSR 285:696-699; Kutinova et al. (1994) Arch. Virol. 134:1-9; Kutinova et al. (1995) Vaccine 13:487-493; Shchelkunov et al. (1993) Virus Research 28:273-283; Sroller et al. (1998) Archives Virology 143:1311-1320; Zinoviev et al. (1994) Gene 147:209-214; and Chkheidze et al. (1993) FEBS 336:340-342). Among the LIVP strains is one that contains a genome having a sequence of nucleotides set forth in SEQ ID NO: 2, or a sequence that is at least or at least about 99% identical to the sequence of nucleotides set forth in SEQ ID NO: 2.

[0073] As used herein, an LIVP clonal strain or LIVP clonal isolate refers to a virus that is derived from the LIVP virus strain by plaque isolation, or other method in which a single clone is propagated, and that has a genome that is homogenous in sequence. Hence, an LIVP clonal strain includes a virus whose genome is present in a virus preparation propagated from LIVP. An LIVP clonal strain does not include a recombinant LIVP virus that is genetically engineered by recombinant means using recombinant DNA methods to introduce heterologous nucleic acid. In particular, an LIVP clonal strain has a genome that does not contain heterologous nucleic acid that contains an open reading frame encoding a heterologous protein. For example, an LIVP clonal strain has a genome that does not contain non-viral heterologous nucleic acid that contains an open reading frame encoding a non-viral heterologous protein. As described herein, however, it is understood that any of the LIVP clonal strains provided herein can be modified in its genome by recombinant means to generate a recombinant virus. For example, an LIVP clonal strain can be modified to generate a recombinant LIVP virus that contains insertion of nucleotides that contain an open reading frame encoding a heterologous protein.

[0074] As used herein, the term “modified virus” refers to a virus that is altered compared to a parental strain of the virus. Typically modified viruses have one or more truncations, mutations, insertions or deletions in the genome of virus. A modified virus can have one or more endogenous viral genes modified and/or one or more intergenic regions modified. Exemplary modified viruses can have one or more heterologous nucleic acid sequences inserted into the genome of the virus. Modified viruses can contain one or more heterologous nucleic acid sequences in the form of a gene expression cassette for the expression of a heterologous gene.

[0075] As used herein, a modified LIVP virus strain refers to an LIVP virus that has a genome that is not contained in LIVP, but is a virus that is produced by modification of a genome of a strain derived from LIVP. Typically, the genome of the virus is modified by substitution (replacement), insertion (addition) or deletion (truncation) of nucleotides. Modifications can be made using any method known to one of skill in the art such as genetic engineering and recombinant DNA methods. Hence, a modified virus is a virus that is altered in its genome compared to the genome of a parental virus. Exemplary modified viruses have one or more heterologous nucleic acid sequences inserted into the genome of the virus. Typically, the heterologous nucleic acid contains an open reading frame encoding a heterologous protein. For example, modified viruses herein can contain one or more heterologous nucleic acid sequences in the form of a gene expression cassette for the expression of a heterologous gene.

[0076] As used herein, a subject includes any organism, including an animal, for whom diagnosis, screening, monitoring or treatment is contemplated. Animals include mammals, such as, for example, primates, domesticated animals and livestock. An exemplary primate is a human.

[0077] A patient refers to a subject, such as a mammal, primate, human, domesticated animal or livestock, or other animal subject afflicted with a disease condition or for which a disease condition is to be determined or risk of a disease condition is to be determined. Typically, a patient refers to a human subject exhibiting symptoms of a disease or disorder.

[0078] As used herein, animals include any animal, such as, but are not limited to, primates, including humans, apes and monkeys; rodents, such as mice, rats, rabbits, and ferrets; fowl, such as chickens; ruminants, such as goats, cows, deer, and sheep; horses, pigs, dogs, cats, fish, and other animals. Non-human animals exclude humans as the contemplated animal.

[0079] As used herein, the term “subject diagnosed with a cancer” refers to a subject who has been tested and found to have cancerous cells. The cancer can be diagnosed using any suitable method, including but not limited to, biopsy, x-ray, MRI, PET, blood test, and the diagnostic methods provided herein.

[0080] As used herein, a “tumor cell” is any cell that is part of a tumor or that is shed from a tumor (e.g. a circulating tumor cell). Tumor cells typically are cells undergoing early, intermediate, or advanced stages of neoplastic progression, including a pre-neoplastic cells (i.e. hyperplastic cells and dysplastic cells) and neoplastic cells.

[0081] As used herein, “tumorigenic cell,” is a cell that, when introduced into a suitable site in a subject, can form a tumor. The cell can be non-metastatic or metastatic.

[0082] As used herein, a “metastatic cell” is a cell that has the potential for metastasis. Metastatic cells have the ability to metastasize from a first tumor in a subject and can colonize tissue at a different site in the subject to form a second tumor at the site.

[0083] As used herein, a “metastasis” refers to the spread of cancer from one part of the body to another. For example, in the metastatic process, malignant cells can spread from the site of the primary tumor in which the malignant cells arose and move into lymphatic and blood vessels, which transport the cells to normal tissues elsewhere in an organism where the cells continue to proliferate. A tumor formed by cells that have spread by metastasis is called a “metastatic tumor,” a “secondary tumor” or a “metastasis.”

[0084] As used herein, a “normal cell” or “non-tumor cell” are used interchangeably and refer to a cell that is not derived from a tumor.

[0085] As used herein, the term “cell” refers to the basic unit of structure and function of a living organism as is commonly understood in the biological sciences. A cell can be a unicellular organism that is self-sufficient and that can exist as a functional whole independently of other cells. A cell also can be one that, when not isolated from the environment in which it occurs in nature, is part of a multicellular organism made up of more than one type of cell. Such a cell, which can be thought of as a “non-organism” or “non-organismal” cell, generally is specialized in that it performs only a subset of the functions performed by the multicellular organism as whole. Thus, this type of cell is not a unicellular organism. Such a cell can be a prokaryotic or eukaryotic cell, including animal cells, such as mammalian cells, human cells and non-human animal cells or non-human mammalian cells. Animal cells include any cell of animal origin that can be found in an animal. Thus, animal cells include, for example, cells that make up the various organs, tissues and systems of an animal.

[0086] As used herein an “isolated cell” is a cell that exists in vitro and is separate from the organism from which it was originally derived.

[0087] As used herein, a “cell line” is a population of cells derived from a primary cell that is capable of stable growth in vitro for many generations. Cell lines are commonly referred to as “immortalized” cell lines to describe their ability to continuously propagate in vitro.

[0088] As used herein a “tumor cell line” is a population of cells that is initially derived from a tumor. Such cells typically have undergone some change in vivo such that they theoretically have indefinite growth in culture; unlike primary cells, which can be cultured only for a finite period of time. Such cells can form tumors after they are injected into susceptible animals.

[0089] As used herein, a “primary cell” is a cell that has been isolated from a subject.

[0090] As used herein, a “host cell” or “target cell” are used interchangeably to mean a cell that can be infected by a virus.

[0091] As used herein, the term “tissue” refers to a group, collection or aggregate of similar cells generally acting to perform a specific function within an organism.

[0092] As used herein a “gene expression cassette” or “expression cassette” is a nucleic acid construct, containing nucleic acid elements that are capable of effecting expression of a gene in hosts that are compatible with such sequences. Expression cassettes include at least promoters and optionally, transcription termination signals. Typically, the expression cassette includes a nucleic acid to be transcribed operably linked to a promoter. Expression cassettes can contain genes that encode, for example, a therapeutic gene product, or a detectable protein or a selectable marker gene.

[0093] As used herein, a heterologous nucleic acid (also referred to as exogenous nucleic acid or foreign nucleic acid) refers to a nucleic acid that is not normally produced in vivo by an organism or virus from which it is expressed or that is produced by an organism or a virus but is at a different locus, or that mediates or encodes mediators that alter expression of endogenous nucleic acid, such as DNA, by affecting transcription, translation, or other regulatable biochemical processes. Hence, heterologous nucleic acid is often not normally endogenous to a virus into which it is introduced. Heterologous nucleic acid can refer to a nucleic acid molecule from another virus in the same organism or another organism, including the same species or another species. Heterologous nucleic acid, however, can be endogenous, but is nucleic acid that is expressed from a different locus or altered in its expression or sequence (e.g., a plasmid). Thus, heterologous nucleic acid includes a nucleic acid molecule not present in the exact orientation or position as the counterpart nucleic acid molecule, such as DNA, is found in a genome. Generally, although not necessarily, such nucleic acid encodes RNA and proteins that are not normally produced by the virus or in the same way in the virus in which it is expressed. Any nucleic acid, such as DNA, that one of skill in the art recognizes or considers as heterologous, exogenous or foreign to the virus in which the nucleic acid is expressed is herein encompassed by heterologous nucleic acid. Examples of heterologous nucleic acid include, but are not limited to, nucleic acid that encodes exogenous peptides/proteins, including diagnostic and/or therapeutic agents. Proteins that are encoded by heterologous nucleic acid can be expressed within the virus, secreted, or expressed on the surface of the virus in which the heterologous nucleic acid has been introduced.

[0094] As used herein, a heterologous protein or heterologous polypeptide (also referred to as exogenous protein, exogenous polypeptide, foreign protein or foreign polypeptide) refers to a protein that is not normally produced by a virus.

[0095] As used herein, operative linkage of heterologous nucleic acids to regulatory and effector sequences of nucleotides, such as promoters, enhancers, transcriptional and translational stop sites, and other signal sequences refers to the relationship between such nucleic acid, such as DNA, and such sequences of nucleotides. For example, operative linkage of heterologous DNA to a promoter refers to the physical relationship between the DNA and the promoter such that the transcription of such DNA is initiated from the promoter by an RNA polymerase that specifically recognizes, binds to and transcribes the DNA. Thus, operatively linked or operationally associated refers to the functional relationship of a nucleic acid, such as DNA, with regulatory and effector sequences of nucleotides, such as promoters, enhancers, transcriptional and translational stop sites, and other signal sequences. For example, operative linkage of DNA to a promoter refers to the physical and functional relationship between the DNA and the promoter such that the transcription of such DNA is initiated from the promoter by an RNA polymerase that specifically recognizes, binds to and transcribes the DNA. In order to optimize expression and/or transcription, it can be necessary to remove, add or alter 5′ untranslated portions of the clones to eliminate extra, potentially inappropriate, alternative translation initiation (i.e., start) codons or other sequences that can interfere with or reduce expression, either at the level of transcription or translation. In addition, consensus ribosome binding sites can be inserted immediately 5′ of the start codon and can enhance expression (see, e.g., Kozak J. Biol. Chem. 266: 19867-19870 (1991) and Shine and Delgarno, Nature 254(5495):34-38 (1975)). The desirability of (or need for) such modification can be empirically determined.

[0096] As used herein, a heterologous promoter refers to a promoter that is not normally found in the wild-type organism or virus or that is at a different locus as compared to a wild-type organism or virus. A heterologous promoter is often not endogenous to a virus into which it is introduced, but has been obtained from another virus or prepared synthetically. A heterologous promoter can refer to a promoter from another virus in the same organism or another organism, including the same species or another species. A heterologous promoter, however, can be endogenous, but is a promoter that is altered in its sequence or occurs at a different locus (e.g., at a different location in the genome or on a plasmid). Thus, a heterologous promoter includes a promoter not present in the exact orientation or position as the counterpart promoter is found in a genome.

[0097] A synthetic promoter is a heterologous promoter that has a nucleotide sequence that is not found in nature. A synthetic promoter can be a nucleic acid molecule that has a synthetic sequence or a sequence derived from a native promoter or portion thereof. A synthetic promoter also can be a hybrid promoter composed of different elements derived from different native promoters.

[0098] As used herein, a “reporter gene” is a gene that encodes a reporter molecule that can be detected when expressed by a virus provided herein or encodes a molecule that modulates expression of a detectable molecule, such as nucleic acid molecule or a protein, or modulates an activity or event that is detectable. Hence reporter molecules include, nucleic acid molecules, such as expressed RNA molecules, and proteins.

[0099] As used herein, a “heterologous reporter gene” is a reporter gene that is not natively present in a virus or is a gene that is present at a different locus than in its native locus in a virus. Heterologous reporter genes can contain nucleic acid that is not endogenous to the virus into which it is introduced, but has been obtained from another virus or cell or prepared synthetically. Heterologous reporter genes, however, can be endogenous, but contain nucleic acid that is expressed from a different locus or altered in its expression or sequence. Generally, such reporter genes encode RNA and proteins that are not normally produced by the virus or that are not produced under the same regulatory schema, such as the promoter.

[0100] As used herein, a “reporter protein” or “reporter gene product” refers to any detectable protein or product expressed by a reporter gene. Reporter proteins can be expressed from endogenous or heterologous genes. Exemplary reporter proteins are provided herein and include, for example, receptors or other proteins that can specifically bind to a detectable compound, proteins that can emit a detectable signal such as a fluorescence signal, and enzymes that can catalyze a detectable reaction or catalyze formation of a detectable product. Reporter gene products also can include detectable nucleic acids.

[0101] As used herein, a reporter virus is a virus that expresses or encodes a reporter gene or a reporter protein or a detectable protein or moiety. It is a virus that is detectable in a cell. As used herein, an oncolytic reporter virus is an oncolytic virus that expresses or encodes a reporter gene or a reporter protein or a detectable protein or moiety.

[0102] As used herein, detecting an oncolytic reporter virus means detecting tumor cells infected by the virus by one or more methods that detect a reporter gene product encoded by the virus that is expressed during infection of the tumor cell. Such methods include, but are not limited to detection of proteins such fluorescent proteins, luminescent proteins or proteins that bind to detectable ligands or antibodies.

[0103] As used herein, a fluorescent protein (FP) refers to a protein that possesses the ability to fluoresce (i.e., to absorb energy at one wavelength and emit it at another wavelength). For example, a green fluorescent protein (GFP) refers to a polypeptide that has a peak excitation spectrum at 490 nm or about 490 nm and peak emission spectrum at 510 nm or about 510 nm (expressed herein as excitation/emission 490 nm/510 nm). A variety of FPs that emit at various wavelengths are known in the art. Exemplary FPs include, but are not limited to, a violet fluorescent protein (VFP; peak excitation/emission at or about 355 nm/424 nm), a blue fluorescent protein (BFP; peak excitation/emission at or about 380-400 nm/450 nm), cyan fluorescent protein (CFP; peak excitation/emission at or about 430-460 nm/480-490 nm), green fluorescent protein (GFP; peak excitation/emission at or about 490 nm/510 nm), yellow fluorescent protein (YFP; peak excitation/emission at or about 515 nm/530 nm), orange fluorescent protein (OFP; peak excitation/emission at or about 550 nm/560 nm), red fluorescent protein (RFP; peak excitation/emission at or about 560-590 nm/580-610 nm), far-red fluorescent protein (peak excitation/emission at or about 590 nm/630-650 nm), or near-infrared fluorescent protein (peak excitation/emission at or about 690 nm/713 nm). Extending the spectrum of available colors of fluorescent proteins to blue, cyan, orange, yellow and red variants provides a method for multicolor tracking of proteins.

[0104] Examples of fluorescent proteins and their variants include, but are not limited to, GFPs, such as Emerald (EmGFP; Invitrogen, Carlsbad, Calif.), EGFP (Clontech, Palo Alto, Calif.), Azami-Green (MBL International, Woburn, Mass.), Kaede (MBL International, Woburn, Mass.), ZsGreen1 (Clontech, Palo Alto, Calif.) and CopGFP (Evrogen/Axxora, LLC, San Diego, Calif.); CFPs, such as Cerulean (Rizzo, Nat Biotechnol. 22(4):445-9 (2004)), mCFP (Wang et al. (2004) Proc. Natl. Acad. Sci. USA 101(48):16745-9), AmCyan1 (Clontech, Palo Alto, Calif.), MiCy (MBL International, Woburn, Mass.), and CyPet (Nguyen and Daugherty, Nat Biotechnol. 23(3):355-60 (2005)); BFPs, such as EBFP (Clontech, Palo Alto, Calif.); YFPs, such as EYFP (Clontech, Palo Alto, Calif.), YPet (Nguyen and Daugherty, Nat Biotechnol. 23(3):355-60 (2005)), Venus (Nagai et al. Nat. Biotechnol. 20(1):87-90 (2002)), ZsYellow (Clontech, Palo Alto, Calif.), and mCitrine (Wang et al., Proc. Natl. Acad. Sci. USA 101(48):16745-9 (2004)); OFPs, such as cOFP (Strategene, La Jolla, Calif.), mKO (MBL International, Woburn, Mass.), and mOrange; RFPs, such as Discosoma RFP (DsRed) isolated from the corallimorph Discosoma (Matz et al. (1999) Nature Biotechnology 17: 969-973) and Discosoma variants, such as monomeric red fluorescent protein 1 (mRFP1), mCherry, tdTomato, mStrawberry, mTangerine (Wang et al. (2004) Proc. Natl. Acad. Sci. USA 101(48):16745-9), DsRed2 (Clontech, Palo Alto, Calif.), and DsRed-T1 (Bevis and Glick, Nat. Biotechnol., 20: 83-87 (2002)), Anthomedusa J-Red (Evrogen) and Anemonia AsRed2 (Clontech, Palo Alto, Calif.); far-red FPs, such as Actinia AQ143 (Shkrob et al. (2005) Biochem J. 392(Pt 3):649-54), Entacmaea eqFP611 (Wiedenmann et al. (2002) Proc. Natl. Acad. Sci. USA. 99(18):11646-51), Discosoma variants, such as mPlum and mRasberry (Wang et al. (2004) Proc. Natl. Acad. Sci. USA 101(48):16745-9), Heteractis HcRed1 and t-HcRed (Clontech, Palo Alto, Calif.), TurboFP635 (Katushka), mKate, and mNeptune; near-infrared FPs, such as and IFP1.4 (Scherbo et al. (2007) Nat Methods 4:741-746), eqFP650 and eqFP670; and others (see, e.g., Shaner N C, Steinbach P A, and Tsien R Y. (2005) Nat Methods. 2(12):905-9 and Chudakov et al. (2010) Physil Rev 90:1103-1163 for description of additional exemplary FPs of various excitation/emission spectra)

[0105] As used herein, Aequorea GFP refers to GFPs from the genus Aequorea and to mutants or variants thereof. Such variants and GFPs from other species, such as Anthozoa reef coral, Anemonia sea anemone, Renilla sea pansy, Galaxea coral, Acropora brown coral, Trachyphyllia and Pectimidae stony coral and other species are well known and are available and known to those of skill in the art.

[0106] As used herein, luminescence refers to the detectable electromagnetic (EM) radiation, generally, ultraviolet (UV), infrared (IR) or visible EM radiation that is produced when the excited product of an exergonic chemical process reverts to its ground state with the emission of light. Chemiluminescence is luminescence that results from a chemical reaction. Bioluminescence is chemiluminescence that results from a chemical reaction using biological molecules (or synthetic versions or analogs thereof) as substrates and/or enzymes. Fluorescence is luminescence in which light of a visible color is emitted from a substance under stimulation or excitation by light or other forms radiation such as ultraviolet (UV), infrared (IR) or visible EM radiation.

[0107] As used herein, chemiluminescence refers to a chemical reaction in which energy is specifically channeled to a molecule causing it to become electronically excited and subsequently to release a photon, thereby emitting visible light. Temperature does not contribute to this channeled energy. Thus, chemiluminescence involves the direct conversion of chemical energy to light energy.

[0108] As used herein, bioluminescence, which is a type of chemiluminescence, refers to the emission of light by biological molecules, particularly proteins. The essential condition for bioluminescence is molecular oxygen, either bound or free in the presence of an oxygenase, a luciferase, which acts on a substrate, a luciferin. Bioluminescence is generated by an enzyme or other protein (luciferase) that is an oxygenase that acts on a substrate luciferin (a bioluminescence substrate) in the presence of molecular oxygen and transforms the substrate to an excited state, which, upon return to a lower energy level releases the energy in the form of light.

[0109] As used herein, the substrates and enzymes for producing bioluminescence are generically referred to as luciferin and luciferase, respectively. When reference is made to a particular species thereof, for clarity, each generic term is used with the name of the organism from which it derives such as, for example, click beetle luciferase or firefly luciferase.

[0110] As used herein, luciferase refers to oxygenases that catalyze a light emitting reaction. For instance, bacterial luciferases catalyze the oxidation of flavin mononucleotide (FMN) and aliphatic aldehydes, which reaction produces light. Another class of luciferases, found among marine arthropods, catalyzes the oxidation of Cypridina (Vargula) luciferin and another class of luciferases catalyzes the oxidation of Coleoptera luciferin. Thus, luciferase refers to an enzyme or photoprotein that catalyzes a bioluminescent reaction (a reaction that produces bioluminescence). The luciferases, such as firefly and Gaussia and Renilla luciferases, are enzymes which act catalytically and are unchanged during the bioluminescence generating reaction. The luciferase photoproteins, such as the aequorin photoprotein to which luciferin is non-covalently bound, are changed, such as by release of the luciferin, during bioluminescence generating reaction. The luciferase is a protein, or a mixture of proteins (e.g., bacterial luciferase), that occurs naturally in an organism or a variant or mutant thereof, such as a variant produced by mutagenesis that has one or more properties, such as thermal stability, that differ from the naturally-occurring protein. Luciferases and modified mutant or variant forms thereof are well known. For purposes herein, reference to luciferase refers to either the photoproteins or luciferases.

[0111] Reference, for example, to Renilla luciferase refers to an enzyme isolated from member of the genus Renilla or an equivalent molecule obtained from any other source, such as from another related copepod, or that has been prepared synthetically. It is intended to encompass Renilla luciferases with conservative amino acid substitutions that do not substantially alter activity. Conservative substitutions of amino acids are known to those of skill in this art and can be made generally without altering the biological activity of the resulting molecule. Those of skill in this art recognize that, in general, single amino acid substitutions in non-essential regions of a polypeptide do not substantially alter biological activity (see, e.g., Watson et al. Molecular Biology of the Gene, 4th Edition, 1987, The Benjamin/Cummings Pub. co., p. 224).

[0112] As used herein, bioluminescence substrate refers to the compound that is oxidized in the presence of a luciferase and any necessary activators and generates light. These substrates are referred to as luciferins herein, are substrates that undergo oxidation in a bioluminescence reaction. These bioluminescence substrates include any luciferin or analog thereof or any synthetic compound with which a luciferase interacts to generate light. Typical substrates include those that are oxidized in the presence of a luciferase or protein in a light-generating reaction. Bioluminescence substrates, thus, include those compounds that those of skill in the art recognize as luciferins. Luciferins, for example, include firefly luciferin, Cypridina (also known as Vargula) luciferin (coelenterazine), bacterial luciferin, as well as synthetic analogs of these substrates or other compounds that are oxidized in the presence of a luciferase in a reaction the produces bioluminescence.

[0113] As used herein, capable of conversion into a bioluminescence substrate refers to being susceptible to chemical reaction, such as oxidation or reduction, which yields a bioluminescence substrate. For example, the luminescence producing reaction of bioluminescent bacteria involves the reduction of a flavin mononucleotide group (FMN) to reduced flavin mononucleotide (FMNH₂) by a flavin reductase enzyme. The reduced flavin mononucleotide (substrate) then reacts with oxygen (an activator) and bacterial luciferase to form an intermediate peroxy flavin that undergoes further reaction, in the presence of a long-chain aldehyde, to generate light. With respect to this reaction, the reduced flavin and the long chain aldehyde are bioluminescence substrates.

[0114] As used herein, a bioluminescence generating system refers to the set of reagents required to conduct a bioluminescent reaction. Thus, the specific luciferase, luciferin and other substrates, solvents and other reagents that can be required to complete a bioluminescent reaction form a bioluminescence system. Thus a bioluminescence generating system refers to any set of reagents that, under appropriate reaction conditions, yield bioluminescence. Appropriate reaction conditions refer to the conditions necessary for a bioluminescence reaction to occur, such as pH, salt concentrations and temperature. In general, bioluminescence systems include a bioluminescence substrate, luciferin, a luciferase, which includes enzymes luciferases and photoproteins and one or more activators. A specific bioluminescence system can be identified by reference to the specific organism from which the luciferase derives; for example, the Renilla bioluminescence system includes a Renilla luciferase, such as a luciferase isolated from Renilla or produced using recombinant methods or modifications of these luciferases. This system also includes the particular activators necessary to complete the bioluminescence reaction, such as oxygen and a substrate with which the luciferase reacts in the presence of the oxygen to produce light.

[0115] As used herein, the term “modified” with reference to a gene refers to a gene encoding a gene product, having one or more truncations, mutations, insertions or deletions; to a deleted gene; or to a gene encoding a gene product that is inserted (e.g., into the chromosome or on a plasmid, phagemid, cosmid, and phage), typically accompanied by at least a change in function of the modified gene product or virus.

[0116] As used herein, a “non-essential gene or region” of a virus genome is a location or region that can be modified by insertion, deletion, or mutation without inhibiting the infection life cycle of the virus. Modification of a “non-essential gene or region” is intended to encompass modifications that have no effect on the virus life cycle and modifications that attenuate or reduce the toxicity of the virus, but do not completely inhibit infection, replication and production of new virus.

[0117] As used herein, an “attenuated virus” refers to a virus that has been modified to alter one or more properties of the virus that affect, for example, virulence, toxicity, or pathogenicity of the virus compared to a virus without such modification. Typically, the viruses for use in the methods provided herein are attenuated viruses with respect to the wild-type form of the virus.

[0118] As used herein, an “attenuated LIVP virus” with reference to LIVP refers to a virus that exhibits reduced or less virulence, toxicity or pathogenicity compared to LIVP.

[0119] As used herein, “toxicity” (also referred to as virulence or pathogenicity herein) with reference to a virus refers to the deleterious or toxic effects to a host upon administration of the virus. For an oncolytic virus, such as LIVP, the toxicity of a virus is associated with its accumulation in non-tumorous organs or tissues, which can impact the survival of the host or result in deleterious or toxic effects. Toxicity can be measured by assessing one or more parameters indicative of toxicity. These include accumulation in non-tumorous tissues and effects on viability or health of the subject to whom it has been administered, such as effects on weight.

[0120] As used herein, “reduced toxicity” means that the toxic or deleterious effects upon administration of the virus to a host are attenuated or lessened compared to a host that is administered with another reference or control virus. For purposes herein, exemplary of a reference or control virus with respect to toxicity is the LIVP virus designated GLV-1h68 (described, for example, in U.S. Pat. No. 7,588,767) or a virus that is the same as the virus administered except not including a particular modification that reduces toxicity. Whether toxicity is reduced or lessened can be determined by assessing the effect of a virus and, if necessary, a control or reference virus, on a parameter indicative of toxicity. It is understood that when comparing the activity of two or more different viruses, the amount of virus (e.g. pfu) used in an in vitro assay or administered in vivo is the same or similar and the conditions (e.g. in vivo dosage regime) of the in vitro assay or in vivo assessment are the same or similar. For example, when comparing effects upon in vivo administration of a virus and a control or reference virus the subjects are the same species, size, gender and the virus is administered in the same or similar amount under the same or similar dosage regime. In particular, a virus with reduced toxicity can mean that upon administration of the virus to a host, such as for the treatment of a disease, the virus does not accumulate in non-tumorous organs and tissues in the host to an extent that results in damage or harm to the host, or that impacts survival of the host to a greater extent than the disease being treated does or to a greater extent than a control or reference virus does. For example, a virus with reduced toxicity includes a virus that does not result in death of the subject over the course of treatment.

[0121] As used herein, accumulation of a virus in a particular tissue refers to the distribution of the virus in particular tissues of a host organism after a time period following administration of the virus to the host, long enough for the virus to infect the host's organs or tissues. As one skilled in the art will recognize, the time period for infection of a virus will vary depending on the virus, the organ(s) or tissue(s), the immunocompetence of the host and dosage of the virus. Generally, accumulation can be determined at time points from about less than 1 day, about 1 day to about 2, 3, 4, 5, 6 or 7 days, about 1 week to about 2, 3 or 4 weeks, about 1 month to about 2, 3, 4, 5, 6 months or longer after infection with the virus. For purposes herein, the viruses preferentially accumulate in immunoprivileged tissue, such as inflamed tissue or tumor tissue, but are cleared from other tissues and organs, such as non-tumor tissues, in the host to the extent that toxicity of the virus is mild or tolerable and at most, not fatal.

[0122] As used herein, “preferential accumulation” refers to accumulation of a virus at a first location at a higher level than accumulation at a second location (i.e., the concentration of viral particles, or titer, at the first location is higher than the concentration of viral particles at the second location). Thus, a virus that preferentially accumulates in immunoprivileged tissue (tissue that is sheltered from the immune system), such as inflamed tissue, and tumor tissue, relative to normal tissues or organs, refers to a virus that accumulates in immunoprivileged tissue, such as tumor, at a higher level (i.e., concentration or viral titer) than the virus accumulates in normal tissues or organs.

[0123] As used herein, the terms immunoprivileged cells and immunoprivileged tissues refer to cells and tissues, such as solid tumors, which are sequestered from the immune system. Generally, administration of a virus to a subject elicits an immune response that clears the virus from the subject. Immunoprivileged sites, however, are shielded or sequestered from the immune response, permitting the virus to survive and generally to replicate. Immunoprivileged tissues include proliferating tissues, such as tumor tissues.

[0124] As used herein, “anti-tumor activity” or “anti-tumorigenic” refers to virus strains that prevent or inhibit the formation or growth of tumors in vitro or in vivo in a subject. Anti-tumor activity can be determined by assessing a parameter or parameters indicative of anti-tumor activity.

[0125] As used herein, “greater” or “improved” activity with reference to anti-tumor activity or anti-tumorigenicity means that a virus strain is capable of preventing or inhibiting the formation or growth of tumors in vitro or in vivo in a subject to a greater extent than a reference or control virus or to a greater extent than absence of treatment with the virus. Whether anti-tumor activity is “greater” or “improved” can be determined by assessing the effect of a virus and, if necessary, a control or reference virus, on a parameter indicative of anti-tumor activity. It is understood that when comparing the activity of two or more different viruses, the amount of virus (e.g. pfu) used in an in vitro assay or administered in vivo is the same or similar, and the conditions (e.g. in vivo dosage regime) of the in vitro assay or in vivo assessment are the same or similar.

[0126] As used herein, “genetic therapy” or “gene therapy” involves the transfer of heterologous nucleic acid, such as DNA, into certain cells, target cells, of a mammal, particularly a human, with a disorder or conditions for which such therapy is sought. The nucleic acid, such as DNA, is introduced into the selected target cells, such as directly or in a vector or other delivery vehicle, in a manner such that the heterologous nucleic acid, such as DNA, is expressed and a therapeutic product encoded thereby is produced. Alternatively, the heterologous nucleic acid, such as DNA, can in some manner mediate expression of DNA that encodes the therapeutic product, or it can encode a product, such as a peptide or RNA that in some manner mediates, directly or indirectly, expression of a therapeutic product. Genetic therapy also can be used to deliver nucleic acid encoding a gene product that replaces a defective gene or supplements a gene product produced by the mammalian or the cell in which it is introduced. The introduced nucleic acid can encode a therapeutic compound, such as a growth factor inhibitor thereof, or a tumor necrosis factor or inhibitor thereof, such as a receptor therefor, that is not normally produced in the mammalian host or that is not produced in therapeutically effective amounts or at a therapeutically useful time. The heterologous nucleic acid, such as DNA, encoding the therapeutic product can be modified prior to introduction into the cells of the afflicted host in order to enhance or otherwise alter the product or expression thereof. Genetic therapy also can involve delivery of an inhibitor or repressor or other modulator of gene expression.

[0127] As used herein, the terms overproduce or overexpress when used in reference to a substance, molecule, compound or composition made in a cell refers to production or expression at a level that is greater than a baseline, normal or usual level of production or expression of the substance, molecule, compound or composition by the cell. A baseline, normal or usual level of production or expression includes no production/expression or limited, restricted or regulated production/expression. Such overproduction or overexpression is typically achieved by modification of cell.

[0128] As used herein, a tumor, also known as a neoplasm, is an abnormal mass of tissue that results when cells proliferate at an abnormally high rate. Tumors can show partial or total lack of structural organization and functional coordination with normal tissue. Tumors can be benign (not cancerous), or malignant (cancerous). As used herein, a tumor is intended to encompass hematopoietic tumors as well as solid tumors.

[0129] Malignant tumors can be broadly classified into three major types. Carcinomas are malignant tumors arising from epithelial structures (e.g. breast, prostate, lung, colon, pancreas). Sarcomas are malignant tumors that originate from connective tissues, or mesenchymal cells, such as muscle, cartilage, fat or bone. Leukemias and lymphomas are malignant tumors affecting hematopoietic structures (structures pertaining to the formation of blood cells) including components of the immune system. Other malignant tumors include, but are not limited to, tumors of the nervous system (e.g. neurofibromatomas), germ cell tumors, and blastic tumors.

[0130] As used herein, a disease or disorder refers to a pathological condition in an organism resulting from, for example, infection or genetic defect, and characterized by identifiable symptoms. An exemplary disease as described herein is a neoplastic disease, such as cancer.

[0131] As used herein, proliferative disorders include any disorders involving abnormal proliferation of cells (i.e. cells proliferate more rapidly compared to normal tissue growth), such as, but not limited to, neoplastic diseases.

[0132] As used herein, neoplastic disease refers to any disorder involving cancer, including tumor development, growth, metastasis and progression.

[0133] As used herein, cancer is a term for diseases caused by or characterized by any type of malignant tumor, including metastatic cancers, lymphatic tumors, and blood cancers. Exemplary cancers include, but are not limited to, acute lymphoblastic leukemia, acute lymphoblastic leukemia, acute myeloid leukemia, acute promyelocytic leukemia, adenocarcinoma, adenoma, adrenal cancer, adrenocortical carcinoma, AIDS-related cancer, AIDS-related lymphoma, anal cancer, appendix cancer, astrocytoma, basal cell carcinoma, bile duct cancer, bladder cancer, bone cancer, osteosarcoma/malignant fibrous histiocytoma, brainstem glioma, brain cancer, carcinoma, cerebellar astrocytoma, cerebral astrocytoma/malignant glioma, ependymoma, medulloblastoma, supratentorial primitive neuroectodermal tumor, visual pathway or hypothalamic glioma, breast cancer, bronchial adenoma/carcinoid, Burkitt lymphoma, carcinoid tumor, carcinoma, central nervous system lymphoma, cervical cancer, chronic lymphocytic leukemia, chronic myelogenous leukemia, chronic myeloproliferative disorder, colon cancer, cutaneous T-cell lymphoma, desmoplastic small round cell tumor, endometrial cancer, ependymoma. epidermoid carcinoma, esophageal cancer, Ewing's sarcoma, extracranial germ cell tumor, extragonadal germ cell tumor, extrahepatic bile duct cancer, eye cancer/intraocular melanoma, eye cancer/retinoblastoma, gallbladder cancer, gallstone tumor, gastric/stomach cancer, gastrointestinal carcinoid tumor, gastrointestinal stromal tumor, giant cell tumor, glioblastoma multiforme, glioma, hairy-cell tumor, head and neck cancer, heart cancer, hepatocellular/liver cancer, Hodgkin lymphoma, hyperplasia, hyperplastic corneal nerve tumor, in situ carcinoma, hypopharyngeal cancer, intestinal ganglioneuroma, islet cell tumor, Kaposi's sarcoma, kidney/renal cell cancer, laryngeal cancer, leiomyoma tumor, lip and oral cavity cancer, liposarcoma, liver cancer, non-small cell lung cancer, small cell lung cancer, lymphomas, macroglobulinemia, malignant carcinoid, malignant fibrous histiocytoma of bone, malignant hypercalcemia, malignant melanomas, marfanoid habitus tumor, medullary carcinoma, melanoma, merkel cell carcinoma, mesothelioma, metastatic skin carcinoma, metastatic squamous neck cancer, mouth cancer, mucosal neuromas, multiple myeloma, mycosis fungoides, myelodysplastic syndrome, myeloma, myeloproliferative disorder, nasal cavity and paranasal sinus cancer, nasopharyngeal carcinoma, neck cancer, neural tissue cancer, neuroblastoma, oral cancer, oropharyngeal cancer, osteosarcoma, ovarian cancer, ovarian epithelial tumor, ovarian germ cell tumor, pancreatic cancer, parathyroid cancer, penile cancer, pharyngeal cancer, pheochromocytoma, pineal astrocytoma, pineal germinoma, pineoblastoma, pituitary adenoma, pleuropulmonary blastoma, polycythemia vera, primary brain tumor, prostate cancer, rectal cancer, renal cell tumor, reticulum cell sarcoma, retinoblastoma, rhabdomyosarcoma, salivary gland cancer, seminoma, Sezary syndrome, skin cancer, small intestine cancer, soft tissue sarcoma, squamous cell carcinoma, squamous neck carcinoma, stomach cancer, supratentorial primitive neuroectodermal tumor, testicular cancer, throat cancer, thymoma, thyroid cancer, topical skin lesion, trophoblastic tumor, urethral cancer, uterine/endometrial cancer, uterine sarcoma, vaginal cancer, vulvar cancer, Waldenstrom's macroglobulinemia or Wilm's tumor. Exemplary cancers commonly diagnosed in humans include, but are not limited to, cancers of the bladder, brain, breast, bone marrow, cervix, colon/rectum, kidney, liver, lung/bronchus, ovary, pancreas, prostate, skin, stomach, thyroid, or uterus. Exemplary cancers commonly diagnosed in dogs, cats, and other pets include, but are not limited to, lymphosarcoma, osteosarcoma, mammary tumors, mastocytoma, brain tumor, melanoma, adenosquamous carcinoma, carcinoid lung tumor, bronchial gland tumor, bronchiolar adenocarcinoma, fibroma, myxochondroma, pulmonary sarcoma, neurosarcoma, osteoma, papilloma, retinoblastoma, Ewing's sarcoma, Wilm's tumor, Burkitt's lymphoma, microglioma, neuroblastoma, osteoclastoma, oral neoplasia, fibrosarcoma, osteosarcoma and rhabdomyosarcoma, genital squamous cell carcinoma, transmissible venereal tumor, testicular tumor, seminoma, Sertoli cell tumor, hemangiopericytoma, histiocytoma, chloroma (e.g., granulocytic sarcoma), corneal papilloma, corneal squamous cell carcinoma, hemangiosarcoma, pleural mesothelioma, basal cell tumor, thymoma, stomach tumor, adrenal gland carcinoma, oral papillomatosis, hemangioendothelioma and cystadenoma, follicular lymphoma, intestinal lymphosarcoma, fibrosarcoma and pulmonary squamous cell carcinoma. Exemplary cancers diagnosed in rodents, such as a ferret, include, but are not limited to, insulinoma, lymphoma, sarcoma, neuroma, pancreatic islet cell tumor, gastric MALT lymphoma and gastric adenocarcinoma. Exemplary neoplasias affecting agricultural livestock include, but are not limited to, leukemia, hemangiopericytoma and bovine ocular neoplasia (in cattle); preputial fibrosarcoma, ulcerative squamous cell carcinoma, preputial carcinoma, connective tissue neoplasia and mastocytoma (in horses); hepatocellular carcinoma (in swine); lymphoma and pulmonary adenomatosis (in sheep); pulmonary sarcoma, lymphoma, Rous sarcoma, reticulo-endotheliosis, fibrosarcoma, nephroblastoma, B-cell lymphoma and lymphoid leukosis (in avian species); retinoblastoma, hepatic neoplasia, lymphosarcoma (lymphoblastic lymphoma), plasmacytoid leukemia and swimbladder sarcoma (in fish), caseous lymphadenitis (CLA): chronic, infectious, contagious disease of sheep and goats caused by the bacterium Corynebacterium pseudotuberculosis, and contagious lung tumor of sheep caused by jaagsiekte.

[0134] As used herein, an aggressive cancer refers to a cancer characterized by a rapidly growing tumor or tumors. Typically the tumor(s) is actively metastasizing or is at risk of metastasizing. Aggressive cancer typically refer to metastatic cancers that spread to multiple locations in the body.

[0135] As used herein, an in vivo method refers to any method that is performed within the living body of a subject. As used herein, an in vitro method refers to any method that is performed outside the living body of a subject.

[0136] As used herein, an ex vivo method refers to a method performed on a sample obtained from a subject.

[0137] As used herein, the term “therapeutic virus” refers to a virus that is administered for the treatment of a disease or disorder, such as a neoplastic disease, such as cancer, a tumor and/or a metastasis or inflammation or wound or diagnosis thereof and or both. Generally, a therapeutic virus herein is one that exhibits anti-tumor activity and minimal toxicity.

[0138] As used herein, a disease or disorder refers to a pathological condition in an organism resulting from, for example, infection or genetic defect, and characterized by identifiable symptoms.

[0139] As used herein, treatment of a subject that has a neoplastic disease, including a tumor or metastasis, means any manner of treatment in which the symptoms of having the neoplastic disease are ameliorated or otherwise beneficially altered. Typically, treatment of a tumor or metastasis in a subject encompasses any manner of treatment that results in slowing of tumor growth, lysis of tumor cells, reduction in the size of the tumor, prevention of new tumor growth, or prevention of metastasis of a primary tumor, including inhibition vascularization of the tumor, tumor cell division, tumor cell migration or degradation of the basement membrane or extracellular matrix.

[0140] As used herein, therapeutic effect means an effect resulting from treatment of a subject that alters, typically improves or ameliorates the symptoms of a disease or condition or that cures a disease or condition. A therapeutically effective amount refers to the amount of a composition, molecule or compound which results in a therapeutic effect following administration to a subject.

[0141] As used herein, amelioration or alleviation of the symptoms of a particular disorder, such as by administration of a particular pharmaceutical composition, refers to any lessening, whether permanent or temporary, lasting or transient that can be attributed to or associated with administration of the composition.

[0142] As used herein, efficacy means that upon systemic administration of an oncolytic virus, the virus will colonize tumor cells and replicate. In particular, it will replicate sufficiently so that tumor cells released into circulation will contain virus. Colonization and replication in tumor cells is indicative that the treatment is or will be an effective treatment.

[0143] As used herein, effective treatment with a virus is one that can increase survival compared to the absence of treatment therewith. For example, a virus is an effective treatment if it stabilizes disease, causes tumor regression, decreases severity of disease or slows down or reduces metastasizing of the tumor.

[0144] As used herein, therapeutic agents are agents that ameliorate the symptoms of a disease or disorder or ameliorate the disease or disorder. Therapeutic agents can be any molecule, such as a small molecule, a peptide, a polypeptide, a protein, an antibody, an antibody fragment, a DNA, or a RNA. Therapeutic agent, therapeutic compound, or therapeutic regimens include conventional drugs and drug therapies, including vaccines for treatment or prevention (i.e., reducing the risk of getting a particular disease or disorder), which are known to those skilled in the art and described elsewhere herein. Therapeutic agents for the treatment of neoplastic disease include, but are not limited to, moieties that inhibit cell growth or promote cell death, that can be activated to inhibit cell growth or promote cell death, or that activate another agent to inhibit cell growth or promote cell death. Therapeutic agents for use in the methods provided herein can be, for example, an anticancer agent. Exemplary therapeutic agents include, for example, therapeutic microorganisms, such as therapeutic viruses and bacteria, chemotherapeutic compounds, cytokines, growth factors, hormones, photosensitizing agents, radionuclides, toxins, antimetabolites, signaling modulators, anticancer antibiotics, anticancer antibodies, anti-cancer oligopeptides, anti-cancer oligonucleotide (e.g., antisense RNA and siRNA), angiogenesis inhibitors, radiation therapy, or a combination thereof.

[0145] As used herein, an anti-cancer agent or compound (used interchangeably with “anti-tumor or anti-neoplastic agent”) refers to any agents, or compounds, used in anti-cancer treatment. These include any agents, when used alone or in combination with other compounds or treatments, that can alleviate, reduce, ameliorate, prevent, or place or maintain in a state of remission of clinical symptoms or diagnostic markers associated with neoplastic disease, tumors and cancer, and can be used in methods, combinations and compositions provided herein.

[0146] As used herein, a “chemotherapeutic agent” is any drug or compound that is used in anti-cancer treatment. Exemplary of such agents are alkylating agents, nitrosoureas, antitumor antibiotics, antimetabolites, antimitotics, topoisomerase inhibitors, monoclonal antibodies, and signaling inhibitors. Exemplary chemotherapeutic agent include, but are not limited to, chemotherapeutic agents, such as Ara-C, cisplatin, carboplatin, paclitaxel, doxorubicin, gemcitabine, camptothecin, irinotecan, cyclophosphamide, 6-mercaptopurine, vincristine, 5-fluorouracil, and methotrexate. The term “chemotherapeutic agent” can be used interchangeably with the term “anti-cancer agent” when referring to drugs or compounds for the treatment of cancer. As used herein, reference to a chemotherapeutic agent includes combinations or a plurality of chemotherapeutic agents unless otherwise indicated.

[0147] As used herein, an anti-metastatic agent is an agent that ameliorates the symptoms of metastasis or ameliorates metastasis. Generally, anti-metastatic agents directly or indirectly inhibit one or more steps of metastasis, including but not limited to, degradation of the basement membrane and proximal extracellular matrix, which leads to tumor cell detachment from the primary tumor, tumor cell migration, tumor cell invasion of local tissue, tumor cell division and colonization at the secondary site, organization of endothelial cells into new functioning capillaries in a tumor, and the persistence of such functioning capillaries in a tumor. Anti-metastatic agents include agents that inhibit the metastasis of a cell from a primary tumor, including release of the cell from the primary tumor and establishment of a secondary tumor, or that inhibits further metastasis of a cell from a site of metastasis. Treatment of a tumor bearing subject with anti-metastatic agents can result in, for example, the delayed appearance of secondary (i.e. metastatic) tumors, slowed development of primary or secondary tumors, decreased occurrence of secondary tumors, slowed or decreased severity of secondary effects of neoplastic disease, arrested tumor growth and regression.

[0148] As used herein, an effective amount of a virus or compound for treating a particular disease is an amount that is sufficient to ameliorate, or in some manner reduce the symptoms associated with the disease. Such an amount can be administered as a single dosage or can be administered in multiple dosages according to a regimen, whereby it is effective. The amount can cure the disease but, typically, is administered in order to ameliorate the symptoms of the disease. Repeated administration can be required to achieve the desired amelioration of symptoms.

[0149] As used herein, a compound produced in a tumor refers to any compound that is produced in the tumor or tumor environment by virtue of the presence of an introduced virus, generally a recombinant virus, expressing one or more gene products. For example, a compound produced in a tumor can be, for example, an encoded polypeptide or RNA, a metabolite, or compound that is generated by a recombinant polypeptide and the cellular machinery of the tumor.

[0150] As used herein, the term “ELISA” refers to enzyme-linked immunosorbent assay. Numerous methods and applications for carrying out an ELISA are well known in the art, and provided in many sources (See, e.g., Crowther, “Enzyme-Linked Immunosorbent Assay (ELISA),” in Molecular Biomethods Handbook, Rapley et al. [eds.], pp. 595-617, Humana Press, Inc., Totowa, N.J. [1998]; Harlow and Lane (eds.), Antibodies: A Laboratory Manual, Cold Spring Harbor Laboratory Press [1988]; and Ausubel et al. (eds.), Current Protocols in Molecular Biology, Ch. 11, John Wiley & Sons, Inc., New York [1994]; and Newton, et al. (2006) Neoplasia. 8:772-780). A “direct ELISA” protocol involves a target-binding molecule, such as a cell, cell lysate, or isolated protein, first bound and immobilized to a microtiter plate well. A “sandwich ELISA” involves a target-binding molecule attached to the substrate by capturing it with an antibody that has been previously bound to the microtiter plate well. The ELISA method detects an immobilized ligand-receptor complex (binding) by use of fluorescent detection of fluorescently labeled ligands or an antibody-enzyme conjugate, where the antibody is specific for the antigen of interest, such as a phage virion, while the enzyme portion allows visualization and quantitation by the generation of a colored or fluorescent reaction product. The conjugated enzymes commonly used in the ELISA include horseradish peroxidase, urease, alkaline phosphatase, glucoamylase or O-galactosidase. The intensity of color development is proportional to the amount of antigen present in the reaction well.

[0151] As used herein, a delivery vehicle for administration refers to a lipid-based or other polymer-based composition, such as liposome, micelle or reverse micelle, that associates with an agent, such as a virus provided herein, for delivery into a host subject.

[0152] As used herein, a “diagnostic agent” refer to any agent that can be applied in the diagnosis or monitoring of a disease or health-related condition. The diagnostic agent can be any molecule, such as a small molecule, a peptide, a polypeptide, a protein, an antibody, an antibody fragment, a DNA, or a RNA.

[0153] As used herein, a detectable label or detectable moiety or diagnostic moiety (also imaging label, imaging agent, or imaging moiety) refers to an atom, molecule or composition, wherein the presence of the atom, molecule or composition can be directly or indirectly measured. Detectable labels can be used to image one or more of any of the viruses provided herein. Detectable labels can be used in any of the methods provided herein. Detectable labels include, for example, chemiluminescent moieties, bioluminescent moieties, fluorescent moieties, radionuclides, and metals. Methods for detecting labels are well known in the art. Such a label can be detected, for example, by visual inspection, by fluorescence spectroscopy, by reflectance measurement, by flow cytometry, by X-rays, by a variety of magnetic resonance methods such as magnetic resonance imaging (MRI) and magnetic resonance spectroscopy (MRS). Methods of detection also include any of a variety of tomographic methods including computed tomography (CT), computed axial tomography (CAT), electron beam computed tomography (EBCT), high resolution computed tomography (HRCT), hypocycloidal tomography, positron emission tomography (PET), single-photon emission computed tomography (SPECT), spiral computed tomography, and ultrasonic tomography. Direct detection of a detectable label refers to, for example, measurement of a physical phenomenon of the detectable label itself, such as energy or particle emission or absorption of the label itself, such as by X-ray or MRI. Indirect detection refers to measurement of a physical phenomenon of an atom, molecule or composition that binds directly or indirectly to the detectable label, such as energy or particle emission or absorption, of an atom, molecule or composition that binds directly or indirectly to the detectable label. In a non-limiting example of indirect detection, a detectable label can be biotin, which can be detected by binding to avidin. Non-labeled avidin can be administered systemically to block non-specific binding, followed by systemic administration of labeled avidin. Thus, included within the scope of a detectable label or detectable moiety is a bindable label or bindable moiety, which refers to an atom, molecule or composition, wherein the presence of the atom, molecule or composition can be detected as a result of the label or moiety binding to another atom, molecule or composition. Exemplary detectable labels include, for example, metals such as colloidal gold, iron, gadolinium, and gallium-67, fluorescent moieties, and radionuclides. Exemplary fluorescent moieties and radionuclides are provided elsewhere herein.

[0154] As used herein, a radionuclide, a radioisotope or radioactive isotope is used interchangeably to refer to an atom with an unstable nucleus. The nucleus is characterized by excess energy which is available to be imparted either to a newly-created radiation particle within the nucleus, or else to an atomic electron. The radionuclide, in this process, undergoes radioactive decay, and emits a gamma ray and/or subatomic particles. Such emissions can be detected in vivo by method such as, but not limited to, positron emission tomography (PET), single-photon emission computed tomography (SPECT) or planar gamma imaging. Radioisotopes can occur naturally, but also can be artificially produced. Exemplary radionuclides for use in in vivo imaging include, but are not limited to, ¹¹C, ¹¹F, ¹³C, ¹³N, ¹⁵N, ¹⁵0, ¹⁸F, ¹⁹F, ³²P, ⁵³Fe, ⁵¹Cr, ⁵⁵Co, ⁵⁵Fe, ⁵⁷Co, ⁵⁸Co, ⁵⁷Ni, ⁵⁹Fe ⁶⁰Co, ⁶⁴Cu, ⁶⁷Ga, ⁶⁸Ga, ⁶⁰Cu(II), ⁶⁷Cu(II), ⁹⁹Tc, ⁹⁰Y, ⁹⁹Tc, ¹⁰³Pd, ¹⁰⁶Ru, ¹¹¹In, ¹¹⁷Lu, ¹²³I, ¹²⁵I, ¹²⁴I, ¹³¹I, ¹³⁷Cs, ¹⁵³Gd, ¹⁵³Sm, ¹⁸⁶Re, ¹⁸⁸Re, ¹⁹²Ir, ¹⁹⁸Au, ²¹¹At, ²¹²Bi, ²¹³Bi and ²⁴¹Am. Radioisotopes can be incorporated into or attached to a compound, such as a metabolic compound. Exemplary radionuclides that can be incorporated or linked to a metabolic compound, such as nucleoside analog, include, but are not limited to, ¹²³I, ¹²⁴I, ¹²⁵I, ¹³¹I, ¹⁸F, ¹⁹F, ¹¹C, ¹³C, ¹⁴C, ⁷⁵Br, and ³H.

[0155] As used herein, magnetic resonance imaging (MRI) refers to the use of a nuclear magnetic resonance spectrometer to produce electronic images of specific atoms and molecular structures in solids, especially human cells, tissues, and organs. MRI is non-invasive diagnostic technique that uses nuclear magnetic resonance to produce cross-sectional images of organs and other internal body structures. The subject lies inside a large, hollow cylinder containing a strong electromagnet, which causes the nuclei of certain atoms in the body (such as, for example, ¹H, ¹³C and ¹⁹F) to align magnetically. The subject is then subjected to radio waves, which cause the aligned nuclei to flip; when the radio waves are withdrawn the nuclei return to their original positions, emitting radio waves that are then detected by a receiver and translated into a two-dimensional picture by computer. For some MRI procedures, contrast agents such as gadolinium are used to increase the accuracy of the images.

[0156] As used herein, an X-ray refers to a relatively high-energy photon, or a stream of such photons, having a wavelength in the approximate range from 0.01 to 10 nanometers. X-rays also refer to photographs taken with x-rays.

[0157] As used herein, a compound conjugated to a moiety refers to a complex that includes a compound bound to a moiety, where the binding between the compound and the moiety can arise from one or more covalent bonds or non-covalent interactions such as hydrogen bonds, or electrostatic interactions. A conjugate also can include a linker that connects the compound to the moiety. Exemplary compounds include, but are not limited to, nanoparticles and siderophores. Exemplary moieties, include, but are not limited to, detectable moieties and therapeutic agents.

[0158] As used herein, “modulate” and “modulation” or “alter” refer to a change of an activity of a molecule, such as a protein. Exemplary activities include, but are not limited to, biological activities, such as signal transduction. Modulation can include an increase in the activity (i.e., up-regulation or agonist activity), a decrease in activity (i.e., down-regulation or inhibition) or any other alteration in an activity (such as a change in periodicity, frequency, duration, kinetics or other parameter). Modulation can be context dependent and typically modulation is compared to a designated state, for example, the wildtype protein, the protein in a constitutive state, or the protein as expressed in a designated cell type or condition.

[0159] As used herein, an agent or compound that modulates the activity of a protein or expression of a gene or nucleic acid either decreases or increases or otherwise alters the activity of the protein or, in some manner, up- or down-regulates or otherwise alters expression of the nucleic acid in a cell.

[0160] As used herein, “nucleic acids” include DNA, RNA and analogs thereof, including peptide nucleic acids (PNA) and mixtures thereof. Nucleic acids can be single or double-stranded. Nucleic acids can encode gene products, such as, for example, polypeptides, regulatory RNAs, microRNAs, siRNAs and functional RNAs.

[0161] As used herein, a sequence complementary to at least a portion of an RNA, with reference to antisense oligonucleotides, means a sequence of nucleotides having sufficient complementarity to be able to hybridize with the RNA, generally under moderate or high stringency conditions, forming a stable duplex; in the case of double-stranded antisense nucleic acids, a single strand of the duplex DNA (i.e., dsRNA) can thus be assayed, or triplex formation can be assayed. The ability to hybridize depends on the degree of complementarity and the length of the antisense nucleic acid. Generally, the longer the hybridizing nucleic acid, the more base mismatches with an encoding RNA it can contain and still form a stable duplex (or triplex, as the case can be). One skilled in the art can ascertain a tolerable degree of mismatch by use of standard procedures to determine the melting point of the hybridized complex.

[0162] As used herein, a peptide refers to a polypeptide that is greater than or equal to 2 amino acids in length, and less than or equal to 40 amino acids in length.

[0163] As used herein, the amino acids which occur in the various sequences of amino acids provided herein are identified according to their known, three-letter or one-letter abbreviations (Table 1). The nucleotides which occur in the various nucleic acid fragments are designated with the standard single-letter designations used routinely in the art.

[0164] As used herein, an “amino acid” is an organic compound containing an amino group and a carboxylic acid group. A polypeptide contains two or more amino acids. For purposes herein, amino acids include the twenty naturally-occurring amino acids, non-natural amino acids and amino acid analogs (i.e., amino acids wherein the α-carbon has a side chain).

[0165] As used herein, “amino acid residue” refers to an amino acid formed upon chemical digestion (hydrolysis) of a polypeptide at its peptide linkages. The amino acid residues described herein are presumed to be in the “L” isomeric form. Residues in the “D” isomeric form, which are so designated, can be substituted for any L-amino acid residue as long as the desired functional property is retained by the polypeptide. NH2 refers to the free amino group present at the amino terminus of a polypeptide. COOH refers to the free carboxy group present at the carboxyl terminus of a polypeptide. In keeping with standard polypeptide nomenclature described in J. Biol. Chem., 243: 3557-3559 (1968), and adopted 37 C.F.R. §§1.821-1.822, abbreviations for amino acid residues are shown in Table 1:

TABLE 1
Table of Amino Acid Correspondence

SYMBOL

| 1-Letter | 3-Letter | AMINO ACID |
|---|---|---|
| Y | Tyr | Tyrosine |
| G | Gly | Glycine |
| F | Phe | Phenylalanine |
| M | Met | Methionine |
| A | Ala | Alanine |
| S | Ser | Serine |
| I | Ile | Isoleucine |
| L | Leu | Leucine |
| T | Thr | Threonine |
| V | Val | Valine |
| P | Pro | Proline |
| K | Lys | Lysine |
| H | His | Histidine |
| Q | Gln | Glutamine |
| E | Glu | Glutamic acid |
| Z | Glx | Glu and/or Gln |
| W | Trp | Tryptophan |
| R | Arg | Arginine |
| D | Asp | Aspartic acid |
| N | Asn | Asparagine |
| B | Asx | Asn and/or Asp |
| C | Cys | Cysteine |
| X | Xaa | Unknown or other |

[0166] All amino acid residue sequences represented herein by formulae have a left to right orientation in the conventional direction of amino-terminus to carboxyl-terminus. In addition, the phrase “amino acid residue” is defined to include the amino acids listed in the Table of Correspondence (Table 1) and modified and unusual amino acids, such as those referred to in 37 C.F.R. §§1.821-1.822, and incorporated herein by reference. Furthermore, a dash at the beginning or end of an amino acid residue sequence indicates a peptide bond to a further sequence of one or more amino acid residues, to an amino-terminal group such as NH₂ or to a carboxyl-terminal group such as COOH.

[0167] As used herein, the “naturally occurring α-amino acids” are the residues of those 20 α-amino acids found in nature which are incorporated into protein by the specific recognition of the charged tRNA molecule with its cognate mRNA codon in humans. Non-naturally occurring amino acids thus include, for example, amino acids or analogs of amino acids other than the 20 naturally-occurring amino acids and include, but are not limited to, the D-isostereomers of amino acids. Exemplary non-natural amino acids are described herein and are known to those of skill in the art.

[0168] As used herein, the term polynucleotide means a single- or double-stranded polymer of deoxyribonucleotides or ribonucleotide bases read from the 5′ to the 3′ end. Polynucleotides include RNA and DNA, and can be isolated from natural sources, synthesized in vitro, or prepared from a combination of natural and synthetic molecules. The length of a polynucleotide molecule is given herein in terms of nucleotides (abbreviated “nt”) or base pairs (abbreviated “bp”). The term nucleotides is used for single- and double-stranded molecules where the context permits. When the term is applied to double-stranded molecules it is used to denote overall length and will be understood to be equivalent to the term base pairs. It will be recognized by those skilled in the art that the two strands of a double-stranded polynucleotide can differ slightly in length and that the ends thereof can be staggered; thus all nucleotides within a double-stranded polynucleotide molecule may not be paired. Such unpaired ends will, in general, not exceed 20 nucleotides in length.

[0169] As used herein, “similarity” between two proteins or nucleic acids refers to the relatedness between the sequence of amino acids of the proteins or the nucleotide sequences of the nucleic acids. Similarity can be based on the degree of identity and/or homology of sequences of residues and the residues contained therein. Methods for assessing the degree of similarity between proteins or nucleic acids are known to those of skill in the art. For example, in one method of assessing sequence similarity, two amino acid or nucleotide sequences are aligned in a manner that yields a maximal level of identity between the sequences. “Identity” refers to the extent to which the amino acid or nucleotide sequences are invariant. Alignment of amino acid sequences, and to some extent nucleotide sequences, also can take into account conservative differences and/or frequent substitutions in amino acids (or nucleotides). Conservative differences are those that preserve the physico-chemical properties of the residues involved. Alignments can be global (alignment of the compared sequences over the entire length of the sequences and including all residues) or local (the alignment of a portion of the sequences that includes only the most similar region or regions).

[0170] “Identity” per se has an art-recognized meaning and can be calculated using published techniques. (See, e.g. Computational Molecular Biology, Lesk, A. M., ed., Oxford University Press, New York, 1988; Biocomputing: Informatics and Genome Projects, Smith, D. W., ed., Academic Press, New York, 1993; Computer Analysis of Sequence Data, Part I, Griffin, A. M., and Griffin, H. G., eds., Humana Press, New Jersey, 1994; Sequence Analysis in Molecular Biology, von Heinje, G., Academic Press, 1987; and Sequence Analysis Primer, Gribskov, M. and Devereux, J., eds., M Stockton Press, New York, 1991). While there exists a number of methods to measure identity between two polynucleotide or polypeptides, the term “identity” is well known to skilled artisans (Carillo, H. & Lipton, D., SIAM J Applied Math 48:1073 (1988)).

[0171] As used herein, homologous (with respect to nucleic acid and/or amino acid sequences) means about greater than or equal to 25% sequence homology, typically greater than or equal to 25%, 40%, 50%, 60%, 70%, 80%, 85%, 90% or 95% sequence homology; the precise percentage can be specified if necessary. For purposes herein the terms “homology” and “identity” are often used interchangeably, unless otherwise indicated. In general, for determination of the percentage homology or identity, sequences are aligned so that the highest order match is obtained (see, e.g.: Computational Molecular Biology, Lesk, A. M., ed., Oxford University Press, New York, 1988; Biocomputing: Informatics and Genome Projects, Smith, D. W., ed., Academic Press, New York, 1993; Computer Analysis of Sequence Data, Part I, Griffin, A. M., and Griffin, H. G., eds., Humana Press, New Jersey, 1994; Sequence Analysis in Molecular Biology, von Heinje, G., Academic Press, 1987; and Sequence Analysis Primer, Gribskov, M. and Devereux, J., eds., M Stockton Press, New York, 1991; Carillo et al. (1988) SIAM J Applied Math 48:1073). By sequence homology, the number of conserved amino acids is determined by standard alignment algorithms programs, and can be used with default gap penalties established by each supplier. Substantially homologous nucleic acid molecules hybridize typically at moderate stringency or at high stringency all along the length of the nucleic acid of interest. Also contemplated are nucleic acid molecules that contain degenerate codons in place of codons in the hybridizing nucleic acid molecule.

[0172] Whether any two molecules have nucleotide sequences or amino acid sequences that are at least 60%, 70%, 80%, 85%, 90%, 95%, 96%, 97%, 98% or 99% “identical” or “homologous” can be determined using known computer algorithms such as the “FASTA” program, using for example, the default parameters as in Pearson et al. (1988) Proc. Natl. Acad. Sci. USA 85:2444 (other programs include the GCG program package (Devereux, J., et al. Nucleic Acids Research 12(I):387 (1984)), BLASTP, BLASTN, FASTA (Atschul, S. F., et al. J Mol Biol 215:403 (1990)); Guide to Huge Computers, Martin J. Bishop, ed., Academic Press, San Diego, 1994, and Carillo et al. (1988) SIAM J Applied Math 48:1073). For example, the BLAST function of the National Center for Biotechnology Information database can be used to determine identity. Other commercially or publicly available programs include, DNAStar “MegAlign” program (Madison, Wis.) and the University of Wisconsin Genetics Computer Group (UWG) “Gap” program (Madison Wis.). Percent homology or identity of proteins and/or nucleic acid molecules can be determined, for example, by comparing sequence information using a GAP computer program (e.g., Needleman et al. (1970) J. Mol. Biol. 48:443, as revised by Smith and Waterman ((1981) Adv. Appl. Math. 2:482). Briefly, the GAP program defines similarity as the number of aligned symbols (i.e., nucleotides or amino acids), which are similar, divided by the total number of symbols in the shorter of the two sequences. Default parameters for the GAP program can include: (1) a unary comparison matrix (containing a value of 1 for identities and 0 for non-identities) and the weighted comparison matrix of Gribskov et al. (1986) Nucl. Acids Res. 14:6745, as described by Schwartz and Dayhoff, eds., ATLAS OF PROTEIN SEQUENCE AND STRUCTURE, National Biomedical Research Foundation, pp. 353-358 (1979); (2) a penalty of 3.0 for each gap and an additional 0.10 penalty for each symbol in each gap; and (3) no penalty for end gaps.

[0173] Therefore, as used herein, the term “identity” or “homology” represents a comparison between a test and a reference polypeptide or polynucleotide. As used herein, the term at least “90% identical to” refers to percent identities from 90 to 99.99 relative to the reference nucleic acid or amino acid sequence of the polypeptide. Identity at a level of 90% or more is indicative of the fact that, assuming for exemplification purposes a test and reference polypeptide length of 100 amino acids are compared. No more than 10% (i.e., 10 out of 100) of the amino acids in the test polypeptide differs from that of the reference polypeptide. Similar comparisons can be made between test and reference polynucleotides. Such differences can be represented as point mutations randomly distributed over the entire length of a polypeptide or they can be clustered in one or more locations of varying length up to the maximum allowable, e.g. 10/100 amino acid difference (approximately 90% identity). Differences are defined as nucleic acid or amino acid substitutions, insertions or deletions. At the level of homologies or identities above about 85-90%, the result is independent of the program and gap parameters set; such high levels of identity can be assessed readily, often by manual alignment without relying on software.

[0174] As used herein, an aligned sequence refers to the use of homology (similarity and/or identity) to align corresponding positions in a sequence of nucleotides or amino acids. Typically, two or more sequences that are related by 50% or more identity are aligned. An aligned set of sequences refers to 2 or more sequences that are aligned at corresponding positions and can include aligning sequences derived from RNAs, such as ESTs and other cDNAs, aligned with genomic DNA sequence.

[0175] As used herein, “primer” refers to a nucleic acid molecule that can act as a point of initiation of template-directed DNA synthesis under appropriate conditions (e.g., in the presence of four different nucleoside triphosphates and a polymerization agent, such as DNA polymerase, RNA polymerase or reverse transcriptase) in an appropriate buffer and at a suitable temperature. It will be appreciated that certain nucleic acid molecules can serve as a “probe” and as a “primer.” A primer, however, has a 3′ hydroxyl group for extension. A primer can be used in a variety of methods, including, for example, polymerase chain reaction (PCR), reverse-transcriptase (RT)-PCR, RNA PCR, LCR, multiplex PCR, panhandle PCR, capture PCR, expression PCR, 3′ and 5′ RACE, in situ PCR, ligation-mediated PCR and other amplification protocols.

[0176] As used herein, “primer pair” refers to a set of primers that includes a 5′ (upstream) primer that hybridizes with the 5′ end of a sequence to be amplified (e.g. by PCR) and a 3′ (downstream) primer that hybridizes with the complement of the 3′ end of the sequence to be amplified.

[0177] As used herein, “specifically hybridizes” refers to annealing, by complementary base-pairing, of a nucleic acid molecule (e.g. an oligonucleotide) to a target nucleic acid molecule. Those of skill in the art are familiar with in vitro and in vivo parameters that affect specific hybridization, such as length and composition of the particular molecule. Parameters particularly relevant to in vitro hybridization further include annealing and washing temperature, buffer composition and salt concentration. Exemplary washing conditions for removing non-specifically bound nucleic acid molecules at high stringency are 0.1×SSPE, 0.1% SDS, 65° C., and at medium stringency are 0.2×SSPE, 0.1% SDS, 50° C. Equivalent stringency conditions are known in the art. The skilled person can readily adjust these parameters to achieve specific hybridization of a nucleic acid molecule to a target nucleic acid molecule appropriate for a particular application. Complementary, when referring to two nucleotide sequences, means that the two sequences of nucleotides are capable of hybridizing, typically with less than 25%, 15% or 5% mismatches between opposed nucleotides. If necessary, the percentage of complementarity will be specified. Typically the two molecules are selected such that they will hybridize under conditions of high stringency.

[0178] As used herein, substantially identical to a product means sufficiently similar so that the property of interest is sufficiently unchanged so that the substantially identical product can be used in place of the product.

[0179] As used herein, it also is understood that the terms “substantially identical” or “similar” varies with the context as understood by those skilled in the relevant art.

[0180] As used herein, an allelic variant or allelic variation references any of two or more alternative forms of a gene occupying the same chromosomal locus. Allelic variation arises naturally through mutation, and can result in phenotypic polymorphism within populations. Gene mutations can be silent (no change in the encoded polypeptide) or can encode polypeptides having altered amino acid sequence. The term “allelic variant” also is used herein to denote a protein encoded by an allelic variant of a gene. Typically the reference form of the gene encodes a wildtype form and/or predominant form of a polypeptide from a population or single reference member of a species. Typically, allelic variants, which include variants between and among species typically have at least 80%, 90% or greater amino acid identity with a wildtype and/or predominant form from the same species; the degree of identity depends upon the gene and whether comparison is interspecies or intraspecies. Generally, intraspecies allelic variants have at least about 80%, 85%, 90% or 95% identity or greater with a wildtype and/or predominant form, including 96%, 97%, 98%, 99% or greater identity with a wildtype and/or predominant form of a polypeptide. Reference to an allelic variant herein generally refers to variations n proteins among members of the same species.

[0181] As used herein, “allele,” which is used interchangeably herein with “allelic variant” refers to alternative forms of a gene or portions thereof. Alleles occupy the same locus or position on homologous chromosomes. When a subject has two identical alleles of a gene, the subject is said to be homozygous for that gene or allele. When a subject has two different alleles of a gene, the subject is said to be heterozygous for the gene. Alleles of a specific gene can differ from each other in a single nucleotide or several nucleotides, and can include modifications such as substitutions, deletions and insertions of nucleotides. An allele of a gene also can be a form of a gene containing a mutation.

[0182] As used herein, species variants refer to variants in polypeptides among different species, including different mammalian species, such as mouse and human. For example for β-glucuronidase, exemplary of species variants provided herein are mouse, rat, cat, dog, pig, green monkey and Sumatran orangutan. Generally, species variants have 70%, 75%, 80%, 85%, 90%, 91%, 92%, 93%, 94%, 95%, 96%, 97%, 98% or sequence identity. Corresponding residues between and among species variants can be determined by comparing and aligning sequences to maximize the number of matching nucleotides or residues, for example, such that identity between the sequences is equal to or greater than 95%, equal to or greater than 96%, equal to or greater than 97%, equal to or greater than 98% or equal to greater than 99%. The position of interest is then given the number assigned in the reference nucleic acid molecule. Alignment can be effected manually or by eye, particularly, where sequence identity is greater than 80%.

[0183] As used herein, a human protein is one encoded by a nucleic acid molecule, such as DNA, present in the genome of a human, including all allelic variants and conservative variations thereof. A variant or modification of a protein is a human protein if the modification is based on the wildtype or prominent sequence of a human protein.

[0184] As used herein, a splice variant refers to a variant produced by differential processing of a primary transcript of genomic DNA that results in more than one type of mRNA.

[0185] As used herein, modification is in reference to modification of a sequence of amino acids of a polypeptide or a sequence of nucleotides in a nucleic acid molecule and includes deletions, insertions, and replacements (e.g. substitutions) of amino acids and nucleotides, respectively. Exemplary of modifications are amino acid substitutions. An amino-acid substituted polypeptide can exhibit 65%, 70%, 80%, 85%, 90%, 91%, 92%, 93%, 94%, 95%, 96%, 97%, 98% or more sequence identity to a polypeptide not containing the amino acid substitutions. Amino acid substitutions can be conservative or non-conservative. Generally, any modification to a polypeptide retains an activity of the polypeptide. Methods of modifying a polypeptide are routine to those of skill in the art, such as by using recombinant DNA methodologies.

[0186] As used herein, suitable conservative substitutions of amino acids are known to those of skill in this art and can be made generally without altering the biological activity of the resulting molecule. Those of skill in this art recognize that, in general, single amino acid substitutions in non-essential regions of a polypeptide do not substantially alter biological activity (see, e.g., Watson et al. Molecular Biology of the Gene, 4th Edition, 1987, The Benjamin/Cummings Pub. co., p. 224). Such substitutions can be made in accordance with those set forth in Table 2 as follows:

TABLE 2
Table of Exemplary Conservative Amino Acid Substitutions

| Original residue | Exemplary Conservative Substitution |
|---|---|
| Ala (A) | Gly; Ser |
| Arg (R) | Lys |
| Asn (N) | Gln; His |
| Cys (C) | Ser |
| Gln (Q) | Asn |
| Glu (E) | Asp |
| Gly (G) | Ala; Pro |
| His (H) | Asn; Gln |
| Ile (I) | Leu; Val |
| Leu (L) | Ile; Val |
| Lys (K) | Arg; Gln; Glu |
| Met (M) | Leu; Tyr; Ile |
| Phe (F) | Met; Leu; Tyr |
| Ser (S) | Thr |
| Thr (T) | Ser |
| Trp (W) | Tyr |
| Tyr (Y) | Trp; Phe |
| Val (V) | Ile; Leu |

[0187] Other substitutions also are permissible and can be determined empirically or in accord with known conservative substitutions.

[0188] As used herein, the term promoter means a portion of a gene containing DNA sequences that provide for the binding of RNA polymerase and initiation of transcription. Promoter sequences are commonly, but not always, found in the 5′ non-coding region of genes.

[0189] As used herein, isolated or purified polypeptide or protein or biologically-active portion thereof is substantially free of cellular material or other contaminating proteins from the cell or tissue from which the protein is derived, or substantially free from chemical precursors or other chemicals when chemically synthesized. Preparations can be determined to be substantially free if they appear free of readily detectable impurities as determined by standard methods of analysis, such as thin layer chromatography (TLC), gel electrophoresis and high performance liquid chromatography (HPLC), used by those of skill in the art to assess such purity, or sufficiently pure such that further purification would not detectably alter the physical and chemical properties, such as enzymatic and biological activities, of the substance. Methods for purification of the compounds to produce substantially chemically pure compounds are known to those of skill in the art. A substantially chemically pure compound, however, can be a mixture of stereoisomers. In such instances, further purification might increase the specific activity of the compound.

[0190] Hence, reference to a substantially purified polypeptide, refers to preparations of proteins that are substantially free of cellular material includes preparations of proteins in which the protein is separated from cellular components of the cells from which it is isolated or recombinantly-produced. In one example, the term substantially free of cellular material includes preparations of enzyme proteins having less that about 30% (by dry weight) of non-enzyme proteins (also referred to herein as a contaminating protein), generally less than about 20% of non-enzyme proteins or 10% of non-enzyme proteins or less that about 5% of non-enzyme proteins. When the enzyme protein is recombinantly produced, it also is substantially free of culture medium, i.e., culture medium represents less than about or at 20%, 10% or 5% of the volume of the enzyme protein preparation.

[0191] As used herein, the term substantially free of chemical precursors or other chemicals includes preparations of enzyme proteins in which the protein is separated from chemical precursors or other chemicals that are involved in the synthesis of the protein. The term includes preparations of enzyme proteins having less than about 30% (by dry weight), 20%, 10%, 5% or less of chemical precursors or non-enzyme chemicals or components.

[0192] As used herein, synthetic, with reference to, for example, a synthetic nucleic acid molecule or a synthetic gene or a synthetic peptide refers to a nucleic acid molecule or polypeptide molecule that is produced by recombinant methods and/or by chemical synthesis methods.

[0193] As used herein, production by recombinant means or using recombinant DNA methods means the use of the well known methods of molecular biology for expressing proteins encoded by cloned DNA.

[0194] As used herein, a DNA construct is a single- or double-stranded, linear or circular DNA molecule that contains segments of DNA combined and juxtaposed in a manner not found in nature. DNA constructs exist as a result of human manipulation, and include clones and other copies of manipulated molecules.

[0195] As used herein, a DNA segment is a portion of a larger DNA molecule having specified attributes. For example, a DNA segment encoding a specified polypeptide is a portion of a longer DNA molecule, such as a plasmid or plasmid fragment, which, when read from the 5′ to 3′ direction, encodes the sequence of amino acids of the specified polypeptide.

[0196] As used herein, vector (or plasmid) refers to a nucleic acid construct that contains discrete elements that are used to introduce heterologous nucleic acid into cells for either expression of the nucleic acid or replication thereof. The vectors typically remain episomal, but can be designed to effect stable integration of a gene or portion thereof into a chromosome of the genome. Selection and use of such vectors are well known to those of skill in the art.

[0197] As used herein, an expression vector includes vectors capable of expressing DNA that is operatively linked with regulatory sequences, such as promoter regions, that are capable of effecting expression of such DNA fragments. Such additional segments can include promoter and terminator sequences, and optionally can include one or more origins of replication, one or more selectable markers, an enhancer, a polyadenylation signal. Expression vectors are generally derived from plasmid or viral DNA, or can contain elements of both. Thus, an expression vector refers to a recombinant DNA or RNA construct, such as a plasmid, a phage, recombinant virus or other vector that, upon introduction into an appropriate host cell, results in expression of the cloned DNA. Appropriate expression vectors are well known to those of skill in the art and include those that are replicable in eukaryotic cells and/or prokaryotic cells and those that remain episomal or those which integrate into the host cell genome.

[0198] As used herein, the term “viral vector” is used according to its art-recognized meaning. It refers to a nucleic acid vector that includes at least one element of viral origin and can be packaged into a viral vector particle. The viral vector particles can be used for the purpose of transferring DNA, RNA or other nucleic acids into cells either in vitro or in vivo. Viral vectors include, but are not limited to, poxvirus vectors (e.g., vaccinia vectors), retroviral vectors, lentivirus vectors, herpes virus vectors (e.g., HSV), baculovirus vectors, cytomegalovirus (CMV) vectors, papillomavirus vectors, simian virus (SV40) vectors, semliki forest virus vectors, phage vectors, adenoviral vectors and adeno-associated viral (AAV) vectors.

[0199] As used herein equivalent, when referring to two sequences of nucleic acids, means that the two sequences in question encode the same sequence of amino acids or equivalent proteins. When equivalent is used in referring to two proteins or peptides, it means that the two proteins or peptides have substantially the same amino acid sequence with only amino acid substitutions that do not substantially alter the activity or function of the protein or peptide. When equivalent refers to a property, the property does not need to be present to the same extent (e.g., two peptides can exhibit different rates of the same type of enzymatic activity), but the activities are usually substantially the same.

[0200] As used herein, a composition refers to any mixture. It can be a solution, suspension, liquid, powder, paste, aqueous, non-aqueous or any combination thereof.

[0201] As used herein, a combination refers to any association between or among two or more items. The combination can be two or more separate items, such as two compositions or two collections, can be a mixture thereof, such as a single mixture of the two or more items, or any variation thereof. The elements of a combination are generally functionally associated or related.

[0202] As used herein, a kit is a packaged combination, optionally, including instructions for use of the combination and/or other reactions and components for such use.

[0203] As used herein, the singular forms “a,” “an” and “the” include plural referents unless the context clearly dictates otherwise.

[0204] As used herein, ranges and amounts can be expressed as “about” or “approximately” a particular value or range. “About” or “approximately” also includes the exact amount. Hence, “about 5 milliliters” means “about 5 milliliters” and also “5 milliliters.” Generally “about” includes an amount that would be expected to be within experimental error.

[0205] As used herein, “about the same” means within an amount that one of skill in the art would consider to be the same or to be within an acceptable range of error. For example, typically, for pharmaceutical compositions, within at least 1%, 2%, 3%, 4%, 5% or 10% is considered about the same. Such amount can vary depending upon the tolerance for variation in the particular composition by subjects.

[0206] As used herein, “optional” or “optionally” means that the subsequently described event or circumstance does or does not occur, and that the description includes instances where said event or circumstance occurs and instances where it does not.

[0207] As used herein, the abbreviations for any protective groups, amino acids and other compounds, are, unless indicated otherwise, in accord with their common usage, recognized abbreviations, or the IUPAC-IUB Commission on Biochemical Nomenclature (see, (1972) Biochem. 11:1726).

### B. OVERVIEW

[0208] Oncolytic viruses effect treatment of tumors by infecting and accumulating in tumor cells. Studies have shown that administration of oncolytic viruses to tumor bearing subjects also induces the recruitment of inflammatory cells to the tumor, including macrophages, cytotoxic T cells and natural killer cells. For example, vaccinia virus infection of mouse xenograft models of breast cancer has been shown to result in massive recruitment of MHCII-positive leukocytes as determined by immunohistochemistry of excised tumors (Weibel et al. (2011) BMC Cancer 11:68). The influx of inflammatory cells was correlated with tumor cell infection by the virus and/or viral replication in the tumor as evidenced by tumor cell expression of green fluorescent protein (GFP) encoded by the virus. Similar recruitment of inflammatory cells to virus-infected tumors also has been shown for other oncolytic viruses, such as adenovirus, herpesviruses, and vesicular stomatitis virus (see, e.g. Martuza et al. (1991) Science 252(5007) 854-856, Fulci and Chiocca (2003) Frontiers in Bioscience 8:e346-e360, Markert et al. (2008) Molecular Therapy 17(1):199-207, Diaz et al. (2007) Cancer Research 67(6):2840-2848, Breitback et al. (2007) Molecular Therapy 15:9:1686-1693 and Woller et al. (2011) J Clin Invest. 121(7):2570-2582).

[0209] Perfluorocarbon (PFC) imaging agents, such as emulsions of perfluoropolyethers (PFPEs), have been used in a variety of different preclinical studies to detect inflammation in vivo and ex vivo in excised tissues (see, e.g. Flogel et al. (2008) Circulation 118(2):140-148, Weise et al. (2011) Experimental Neurology 229:494-501, Hitchens et al. (2011) Magnetic Resonance in Medicine 65:1145-1154, Ahrens et al. (2010) BioTechniques 50(4):229-234 and Hertlein et al. (2011) PLoS ONE 6(3):e18246). The PFC agents are taken by phagocytic cells such as macrophages and monocytes following administration and accumulate at active sites of inflammation (Ahrens et al. (2010) BioTechniques 50(4): 229-234). Detection of PFCs in vivo and/or ex vivo on excised samples can be performed using fluorine nuclear magnetic resonance techniques, such as ¹⁹F magnetic resonance imaging (MRI) and ¹⁹F magnetic resonance spectroscopy (MRS). Because the amount of fluorine in biological tissues is negligible, the background resonance signal is low, thus enabling highly specific detection of the accumulated PFC.

[0210] MRI is a useful modality for anatomical and functional imaging of tumors in vivo because it is not limited by field of view, tissue depth or orientation of the target organ, and provides excellent soft-tissue contrast. PFC imaging agents provide positive contrast for in vivo imaging of inflammation by MRI. One of the advantages of using perfluorocarbons as contrast agents for ¹⁹F MRI is that the fluorine atoms are detected directly. In contrast, MRI detection of other contrast agents such as superparamagnetic iron-oxide (SPIO) agents and other metal ion based contrast agents that incorporate ions, such as gadolinium and manganese, depend on the indirect effects of the isotope on surrounding water molecules, which can be affected by the large ¹H background signal. In addition, ¹⁹F MRI also is highly specific due to the naturally low amounts of fluorine in vivo. In contrast, imaging of SPIO agent is especially difficult in organs that contain high levels of iron.

[0211] Another advantage to using PFCs as imaging agents is that many PFC compounds are biologically inert. PFCs can be administered to subjects with minimal or no side effects. High doses of PFCs are generally safe in human body and pure fluorocarbon within certain molecular weight range (460-520 Da) is non-toxic, non-carcinogenic, non mutagenic and non-teratogenic and does not trigger immune responses. PFCs are widely applied in liquid ventilation, oxygen delivery and imaging due to their physiological inactivity and biocompatibility (see Marie Pierre Krafft, Advanced Drug Delivery Reviews, 47:209, 2001; Gregory et al. (2005) Current Topics in Developmental Biology 70:57). Phagocytosis of PFC compounds by inflammatory cells such as macrophages also does not negatively affect cell function. Thus, imaging by ¹⁹F MRI does not disrupt the inflammatory process, which can promote tumor therapy by the oncolytic virus.

[0212] Methods provided herein for using PFCs as MRI contrast agents involve labeling phagocytic monocyte and macrophages in vivo by active uptake of a systemically injected PFC emulsion. The methods allow tracking of the immune cell populations within the body. In the context of inflammatory processes, when large numbers of macrophages and neutrophils are recruited from the circulation and accumulate at sites of inflammation, local accumulations of the ¹⁹F signal can be observed in vivo. Such methods have been used to image, for example, in vivo inflammation after cardiac and cerebral ischemia, pulmonary inflammation in pneumonia, neuroinflammation following lysolecithin-induced nerve injury, Staphylococcus aureus infection, and inflammation following acute allograft rejection (see, e.g., Flogel et al. (2008) Circulation 118(2):140-8, Ebner et al. (2010) Circ. Cardiovasc. Imaging 3(2):202-10, Weise et al. (2011) Experimental Neurology 229:494-501, Hertlein et al. (2011) PLoS ONE 6(3):e18246, and Hitchens et al. (2011) Magnetic Resonance in Medicine 65:1145-1154). Several studies have shown that a linear relationship exists between the amount of PFCs that accumulate at the site of inflammation and the degree of inflammation in the tissue (see, e.g. Kadayakkara et al. (2012) Lab. Invest. 92(4):636-45).

[0213] Provided herein are methods of using PFC imaging agents in the context of oncolytic cancer therapy. Because the treatment of solid tumors with oncolytic viruses induces the massive recruitment of immune cells, including macrophages, to the tumor, perfluorocarbon imaging agents can be used to detect active infection of tumors by oncolytic viruses. Administration of perfluorocarbon imaging agents to tumor bearing subjects receiving oncolytic virus therapies can be used as an indirect way to detect virus delivery to a tumor and to assess the extent of viral tumor colonization. Because the effectiveness of oncolytic therapy depends on colonization of the tumor, the methods provided herein can be employed to assess the efficacy of an oncolytic virus treatment. The methods provided herein can be employed for the selection of a particular oncolytic virus for treatment. The methods provided herein also can be employed for the selection for selection of a candidate for treatment with an oncolytic virus.

[0214] As shown in the working Examples provided herein, intravenous administration of a perfluorocarbon emulsion following systemic administration of vaccinia virus resulted in the accumulation of a strong ¹⁹F signal in the tumor periphery as imaged by ¹⁹F MRI. In untreated control tumors, some accumulation of PFC also was detected, however, the spatial distribution of the PFC was diffuse throughout the tumor. ¹⁹F MRI of excised tumors confirmed the in vivo imaging results. Immunohistochemistry of the excised tumor tissue using macrophage and neutrophil-specific antibodies indicated that the ¹⁹F MRI signal pattern correlated with the histological staining pattern of the immune cells. These results demonstrated that the increase in tumor inflammation following oncolytic virus infection was detectable in vivo and ex vivo using ¹⁹F MRI of accumulated PFC.

[0215] PFC imaging agents effectively label most phagocytic immune cells including precursor cells in the bone marrow. These cells do not die due to phagocytosis of PFC and are still active. This allows for tracking of immune cell populations before and after virus administration. Accordingly, provided herein are methods for the monitoring of inflammation at the tumor prior to, during administration of, and following administration of an oncolytic virus therapy. The methods provided can be used to assess presence and extent of viral colonization as well as monitor the effects of viral colonization of the tumor over time.

[0216] Visualization of macrophage recruitment using PFC imaging agents can be employed prognostic factor for oncolytic therapy success. Immunological reaction of the host against the virus and the tumor microenvironment is an important component of the anti-tumor response in the patient. Local recruitment of macrophages is an early step of the host response to oncolytic virus therapy and can be an indicator of whether a particular tumor can be colonized by the virus. Thus, the methods provided herein can be used to determine whether the tumor will respond to an oncolytic viral therapy.

[0217] The methods provided herein include systemic (e.g. intravenous) administration of PFC imaging agents to a tumor-bearing subject and detection of the PFC. Detection can be performed in vivo using ¹⁹F magnetic resonance imaging (MRI) to detect the accumulation of the PFC at the tumor. ¹⁹F MRI or ¹⁹F MRS also can be performed on extracted tumor tissue (e.g. a biopsy) to detect the PFC.

[0218] Exemplary oncolytic viruses for use in the methods include diagnostic and therapeutic viruses. Exemplary oncolytic viruses are provided herein and include, but are not limited to, poxvirus, adenovirus, reovirus, herpes virus, adeno-associated virus, lentivirus, retrovirus, rhabdovirus, papillomavirus, vesicular stomatitis virus, measles virus, Newcastle disease virus, picornavirus, sindbis virus, papillomavirus, parvovirus, coxsackievirus, influenza virus, mumps virus, poliovirus and semliki forest virus. Exemplary poxviruses include, but are not limited to, viruses selected from among vaccinia virus, orthopoxvirus, parapoxvirus, avipoxvirus, capripoxvirus, leporipoxvirus, suipoxvirus, molluscipoxvirus, yatapoxvirus, entomopoxvirus A, entomopoxvirus B and entomopoxvirus C. Exemplary vaccinia viruses include Lister strain of vaccinia viruses, including, but not limited to, LIVP strains of vaccinia viruses.

### C. METHODS FOR IMAGING TUMOR INFLAMMATION INDUCED BY ONCOLYTIC VIRUSES

[0219] Provided herein are methods of detecting and monitoring infection of a tumor by an oncolytic virus. The methods provided are employ the ability of virus infection and replication to induce the recruitment of inflammatory cells, such as macrophages, to the tumor. The induction of tumor inflammation can be detected in vivo in a subject or ex vivo in a tumor sample from a subject using any agent that detects macrophage particularly imaging or other detectable agents. Exemplary of such agents are perfluorocarbon (PFC) imaging agents. Perfluorocarbon (PFC) imaging agents that are taken up by the inflammatory cells and detectable via nuclear magnetic resonance methods and/or other imaging methods as described herein. The methods can be employed to assess the presence of or level of tumor inflammation prior to, during, or following administration of an oncolytic virus therapy.

[0220] Also provided are methods for diagnosing, detecting or imaging tumors by administering oncolytic viruses, such as vaccinia viruses, where the viruses do not encode a heterologous detectable reporter protein or a protein that induces a detectable signal. Thus, the viruses can be unmodified viruses, or viruses that encode therapeutic proteins, but they do not need to encode a protein for detection. Administration of the virus leads to an inflammatory response, and the influx of macrophage. Any agent for detection of macrophage, such as a perfluorocarbon imaging agents, will detect the tumors by virtue of the influx of macrophage resulting from accumulation of the viruses. Thus, provided are indirect methods for detection of oncolytic viruses. Detection of oncolytic viruses permits detection, particularly imaging, of tumors, monitoring of therapy, assessment of colonization of tumors by oncolytic viruses and, thus, assessment of the potential effectiveness of an oncolytic virus for therapy for a particular tumor or subject. An advantage is that the viruses do not need to be adapted for detection.

[0221] 1. Exemplary Methods for Imaging Tumor Inflammation

[0222] In exemplary methods, a PFC imaging agent is administered to a tumor-bearing subject and the accumulation of the PFC in the tumor is detected or imaged, thereby detecting presence of tumor inflammation and or the level of tumor inflammation. The PFC imaging agent can be administered prior to, at the same time as, or following the administration of an oncolytic virus.

[0223] In some examples, an oncolytic virus is first administered to a tumor-bearing subject and, at a predetermined time thereafter, a PFC imaging agent is administered to the subject. Following administration of the PFC imaging agent, the accumulation of the PFC in the tumor is detected or imaged.

[0224] In some examples, a PFC imaging agent is first administered to a tumor-bearing subject and, at a predetermined time thereafter, an oncolytic virus is administered to the subject. Following administration of the oncolytic virus, the accumulation of the PFC in the tumor is detected or imaged.

[0225] In some examples, a PFC imaging agent is administered at the same time as an oncolytic virus. Following administration of the oncolytic virus with the PFC imaging agent, the accumulation of the PFC in the tumor is detected or imaged. In such examples, the oncolytic virus and the PFC imaging agent can be administered as a single composition or as two separate compositions.

[0226] In some examples, detection of the PFC signal at the tumor periphery indicates that the oncolytic virus has infected the tumor. In some examples, detection of the PFC signal as a diffuse signal throughout the tumor indicated that the oncolytic virus has not infected the tumor.

[0227] In some examples, the induction of tumor inflammation by an oncolytic virus is determined by comparing the level of tumor inflammation prior to administration of the virus to the level of tumor inflammation following administration of the oncolytic virus. An increase in the amount of tumor inflammation, as evidenced by an increase in the accumulation of PFC at the tumor, indicates that the oncolytic virus has infected the tumor. In such examples, a PFC imaging agent is administered to a tumor-bearing subject at a predetermined time prior to administration of the oncolytic virus and the accumulation of the PFC in the tumor is detected or imaged. The oncolytic virus is then administered to the subject, and the accumulation of the PFC in the tumor is detected or imaged. An increase in the accumulation of the PFC at the tumor indicates that the level of tumor inflammation has increased and that the oncolytic virus has infected the tumor.

[0228] In some examples, the level of tumor inflammation following administration of an oncolytic viruses is monitored over time. For example, accumulation of the PFC at the tumor can be detected or imaged at multiple time points following administration of the oncolytic virus, including, for example, at 2, 3, 4, 5, 6, 7, 8, 9, 10, 15, 20 or more time points following administration of the oncolytic virus.

[0229] In some examples, the induction of tumor inflammation by an oncolytic virus is determined by comparing the level of tumor inflammation following administration of the oncolytic virus to the level of tumor inflammation in a control. Exemplary controls include, but are not limited to a control tumor sample or in vivo or in vitro data from a subject who has been administered a PFC imaging agent but not the oncolytic virus therapy or can be a control tumor sample or in vivo or in vitro data from the test subject prior to receiving the oncolytic virus. In some examples, the control is a positive control sample a tumor sample or in vivo or in vitro data from a subject who has been administered a PFC imaging agent and an oncolytic virus therapy.

[0230] The oncolytic viruses used in the methods provided can be administered to the subject by any suitable method for administering a diagnostic or therapeutic oncolytic virus. Administration of oncolytic viruses to a subject, including a human subject or non-human mammalian subject, is well-known in the art. The oncolytic virus can be administered by any suitable route. For example, the oncolytic viruses can be administered to the subject systemically or locally to the tumor. Exemplary routes of administration include, but are not limited to intravenous, intraarterial, intratumoral, endoscopic, intralesional, intramuscular, intradermal, intraperitoneal, intravesicular, intraarticular, intrapleural, percutaneous, subcutaneous, oral, parenteral, intranasal, intratracheal, inhalation, intracranial, intraprostatic, intravitreal, topical, ocular, vaginal, or rectal routes of administration. In particular examples, the oncolytic viruses are administered intraperitoneally or intravenously.

[0231] The dosage regimen can be any of a variety of methods and amounts, and can be determined by one skilled in the art according to known clinical factors. As is known in the medical arts, dosages for any one subject can depend on many factors, including the subject's species, size, body surface area, age, sex, immunocompetence, and general health, the particular virus to be administered, duration and route of administration, the kind and stage of the disease, for example, tumor size, and other treatments or compounds, such as chemotherapeutic drugs, being administered concurrently. In addition to the above factors, such levels can be affected by the infectivity of the virus, and the nature of the virus, as can be determined by one skilled in the art. In the present methods, appropriate minimum dosage levels of viruses can be levels sufficient for the virus to survive, grow and replicate in a tumor or metastasis. Exemplary minimum levels for administering a virus to a 65 kg human can include at least or about 1×10² plaque forming units (PFU), at least or about 1×10³ plaque forming units (PFU), at least or about 1×10⁴ plaque forming units (PFU), at least or about 1×10⁵ plaque forming units (PFU), at least about 5×10⁵ PFU, at least about 1×10⁶ PFU, at least about 5×10⁶ PFU, at least about 1×10⁷ PFU, at least about 1×10⁸ PFU, at least about 1×10⁹ PFU, or at least about 1×10¹⁰ PFU. In the present methods, appropriate maximum dosage levels of viruses can be levels that are not toxic to the host, levels that do not cause splenomegaly of 3 times or more, levels that do not result in colonies or plaques in normal tissues or organs after about 1 day or after about 3 days or after about 7 days. Exemplary maximum levels for administering a virus to a 65 kg human can include no more than about 1×10¹⁴ PFU, no more than about 1×10¹³ PFU, no more than about 1×10¹² PFU, no more than about 1×10¹¹ PFU, no more than about 5×10¹⁰ PFU, no more than about 1×10¹⁰ PFU, no more than about 5×10⁹ PFU, no more than about 1×10⁹ PFU, or no more than about 1×10⁸ PFU.

[0232] In some examples, the oncolytic virus is administered in an amount sufficient to induce accumulation of the perfluorocarbon at the tumor where such dosage that is lower than a treatment dosage of the virus. For example, exemplary dosages include, but are not limited to, a dosage at or about 1×10² pfu to at or about 1×10⁸ pfu, such as, for example, at or about 1×10² pfu, 1×10³ pfu, 1×10⁴ pfu, 1×10⁵ pfu, 1×10⁶ pfu, 1×10⁷ pfu or 1×10⁸ pfu. In some examples, the oncolytic virus is administered at a dosage for treatment of a tumor or cancer. For example, exemplary dosages include, but are not limited to, a dosage at or about 1×10⁶ pfu to at or about 1×10¹⁴ pfu, such as, for example, at or about 1×10⁶ pfu, 1×10⁷ pfu or 1×10⁸ pfu, 1×10⁹ pfu, 1×10¹⁰ pfu, 1×10¹¹ pfu, 1×10¹² pfu, 1×10¹³ pfu, or 1×10¹⁴ pfu.

[0233] Generally, the PFC imaging agent is administered in a manner that is suitable for uptake by phagocytic cells of the immune system. Typically, the PFC imaging agent for use in the methods provided is in the form of an emulsion and is administered systemically, such as for example, intravenously. The PFC imaging agent can be administered prior to, at the same time as, or following administration of an oncolytic virus. In some examples, the PFC imaging agent is administered at a time following administration of an oncolytic virus sufficient for the virus to have accumulated in the tumor and/or induce inflammation at the tumor. In some examples, the PFC imaging agent is administered at a time following systemic administration of an oncolytic virus sufficient for the virus to be cleared from the bloodstream. In some examples, the PFC imaging agent is administered 1 hour, 2 hours, 3 hours, 4 hours, 6 hours, 12 hours, 18 hours, 24 hours, 2 days, 3 days, 4 days, 5 days, 6 days, 7 days, 8 days, 9 days, 10 days, 11 days, 12 days, 13 days, 14 days, 3 weeks 4 weeks, 1 month or longer following administration of the oncolytic virus. In some examples, the PFC imaging agent is administered at the same time as the oncolytic virus. In some examples, the PFC imaging agent is administered 1 hour, 2 hours, 3 hours, 4 hours, 6 hours, 12 hours, 18 hours, 24 hours, 48 hours, or longer prior to the administration of the oncolytic virus.

[0234] Generally, the amount of a PFC agent administered is sufficient for detection in vivo by ¹⁹F MRI at a tumor. High doses of PFCs are well-tolerated in humans and generally do not cause side effects. For use as an oxygen carrier, doses of PFC at 500 g were well-tolerated in human patients. Typically, side effects resulting from administration of PFC emulsions are due to the emulsification agent and can be controlled by selection of non-toxic or low toxicity emulsification agent for the production of the emulsion. Exemplary dosages of PFC imaging agent for administration include, but are not limited to, 0.1 g, 1 g, 5 g, 10 g, 20, 30 g, 40 g, 50 g, 100 g, 150 g, 200 g, 250 g, 300 g, 350 g, 400 g, 450 g, 500 g, 550 g, 600 g, 650 g, 700 g, 800 g, 850 g, 900 g, 950 g, 1000 g or more of the perfluorocarbon in an emulsion per average 65 kg human. Exemplary emulsion volumes for administration include, but are not, limited to, 0.05 ml/kg, 1 ml/kg, 2 ml/kg, 3 ml/kg, 4 ml/kg, 5 ml/kg, 6 ml/kg, 7 ml/kg, 8 ml/kg, 9 ml/kg, 10 ml/kg, 15 ml/kg, 20 ml/kg, 25 ml/kg, 30 ml/kg, 35 ml/kg, 40 ml/kg, 45 ml/kg, 50 ml/kg of the emulsion.

[0235] Typically, the tumor is detected or imaged at a time following systemic (e.g. intravenous) administration of the PFC imaging agent sufficient to clear the PFC imaging agent from the blood stream and accumulate at the site of tumor inflammation. In some examples, the tumor is detected or imaged 1 hour, 2 hours, 4 hours, 6 hours, 12 hours, 18 hours, 24 hours, 30 hours, 36 hours, 42 hours, 48 hours or later following administration of the PFC imaging agent. In particular examples, the tumor is imaged at about 24 to at about 48 hours following administration of the PFC imaging agent. In some examples, the tumor is detected or imaged at two or more time points following administration of the PFC imaging agent, including, for example, at 2, 3, 4, 5, 6, 7, 8, 9, 10, 15, 20 or more time points. Such time points can be prior to, at the same time as, or following administration of an oncolytic virus.

[0236] In some examples, the oncolytic virus is administered according to a dosage regimen and the induction of tumor inflammation is assessed following each successive cycle or multiple cycles of administration or during the cycle of administration at one or more predetermined time points following administration of the oncolytic virus. Exemplary lengths of time between successive cycles of administration of the virus include, but are not limited to, at least or about two days, three days, four days, five days, six days, seven days, 14 days, 21 days or 28 days. In some examples, the oncolytic virus is administered in an amount that is at least 1×10⁹ pfu at least one time over a cycle of administration. In some examples, the oncolytic virus is administered one time during a cycle of administration. In some examples, the oncolytic virus is administered a plurality of times during a cycle of administration, such as, for example, two times, three times, four times, five times, six times or seven times over the cycle of administration. In some examples, the virus is administered on the first day of the cycle, the first and second day of the cycle, each of the first three consecutive days of the cycle, each of the first four consecutive days of the cycle, each of the first five consecutive days of the cycle, each of the first six consecutive days of the cycle, or each of the first seven consecutive days of the cycle.

[0237] In some examples, the methods of detecting or imaging tumor inflammation can be used in combination with a method to detect or image expression of a reporter gene encoded by the oncolytic virus. Exemplary methods of detecting expressed reporter proteins are provided elsewhere herein and include, but are not limited to fluorescent, luminescent, spectrophotometric, chromogenic assays, acoustic/ultrasonic detection, or radioactive detection methods.

[0238] a. Exemplary Subjects

[0239] Generally, the methods provided herein can be performed on any subject that has a tumor. Typically, the tumor is a solid tumor. In some examples, the tumor is a metastatic tumor. In some examples, the subject has a pre-cancerous lesion (dysplasia), carcinoma, adenocarcinoma, or a sarcoma. In some examples, the subject has a tumor and is at risk of metastasis of the tumor. In some examples, the subject has an advanced stage cancer.

[0240] In some examples, the subject has a cancer that is adenocarcinoma, adenoma, adrenal cancer, adrenocortical carcinoma, AIDS-related cancer, anal cancer, appendix cancer, astrocytoma, basal cell carcinoma, bile duct cancer, bladder cancer, bone cancer, osteosarcoma/malignant fibrous histiocytoma, brainstem glioma, brain cancer, carcinoma, cerebellar astrocytoma, cerebral astrocytoma/malignant glioma, ependymoma, medulloblastoma, supratentorial primitive neuroectodermal tumor, visual pathway or hypothalamic glioma, breast cancer, bronchial adenoma/carcinoid, carcinoid tumor, carcinoma, cervical cancer, colon cancer, desmoplastic small round cell tumor, endometrial cancer, ependymoma. epidermoid carcinoma, esophageal cancer, Ewing's sarcoma, extracranial germ cell tumor, extragonadal germ cell tumor, extrahepatic bile duct cancer, eye cancer/intraocular melanoma, eye cancer/retinoblastoma, gallbladder cancer, gallstone tumor, gastric/stomach cancer, gastrointestinal carcinoid tumor, gastrointestinal stromal tumor, giant cell tumor, glioblastoma multiforme, glioma, hairy-cell tumor, head and neck cancer, heart cancer, hepatocellular/liver cancer, hyperplasia, hyperplastic corneal nerve tumor, in situ carcinoma, hypopharyngeal cancer, intestinal ganglioneuroma, islet cell tumor, Kaposi's sarcoma, kidney/renal cell cancer, laryngeal cancer, leiomyoma tumor, lip and oral cavity cancer, liposarcoma, liver cancer, non-small cell lung cancer, small cell lung cancer, macroglobulinemia, malignant carcinoid, malignant fibrous histiocytoma of bone, malignant hypercalcemia, malignant melanomas, marfanoid habitus tumor, medullary carcinoma, melanoma, merkel cell carcinoma, mesothelioma, metastatic skin carcinoma, metastatic squamous neck cancer, mouth cancer, mucosal neuromas, multiple myeloma, mycosis fungoides, myelodysplastic syndrome, myeloma, myeloproliferative disorder, nasal cavity and paranasal sinus cancer, nasopharyngeal carcinoma, neck cancer, neural tissue cancer, neuroblastoma, oral cancer, oropharyngeal cancer, osteosarcoma, ovarian cancer, ovarian epithelial tumor, ovarian germ cell tumor, pancreatic cancer, parathyroid cancer, penile cancer, pharyngeal cancer, pheochromocytoma, pineal astrocytoma, pineal germinoma, pineoblastoma, pituitary adenoma, pleuropulmonary blastoma, polycythemia vera, primary brain tumor, prostate cancer, rectal cancer, renal cell tumor, reticulum cell sarcoma, retinoblastoma, rhabdomyosarcoma, salivary gland cancer, seminoma, Sezary syndrome, skin cancer, small intestine cancer, soft tissue sarcoma, squamous cell carcinoma, squamous neck carcinoma, stomach cancer, supratentorial primitive neuroectodermal tumor, testicular cancer, throat cancer, thymoma, thyroid cancer, topical skin lesion, trophoblastic tumor, urethral cancer, uterine/endometrial cancer, uterine sarcoma, vaginal cancer, vulvar cancer, Waldenström's macroglobulinemia or Wilm's tumor. In particular examples, the cancer is a cancer of the bladder, brain, breast, bone marrow, cervix, colon/rectum, kidney, liver, lung/bronchus, ovary, pancreas, prostate, skin, stomach, thyroid, or uterus. The methods provided herein can be used to image numerous tumors including, but not limited to, any of the tumors described herein.

[0241] In some examples, the subject is mammal. Exemplary mammalian subjects include, but are not limited to primates, such as humans, apes and monkeys; rodents, such as mice, rats, rabbits, and ferrets; ruminants, such as goats, cows, deer, and sheep; horses, pigs, dogs, cats, and other animals. In some examples, the subject is patient. In some examples, the patient is a human patient.

[0242] 2. Perfluorocarbon Imaging Agents for Use in the Methods

[0243] a. Perfluorocarbon Emulsions

[0244] Typically, the perfluorocarbon (PFC) imaging agents for use in the methods provided herein are in the form of an emulsion containing a PFC and one or more emulsification and/or emulsion stabilization agents. The compositions also can contain additional components such as additional surfactants, including additional emulsifiers or emulsion stabilization agents, lipids, additives, therapeutic agents or diagnostic agents. Exemplary PFCs for use in a PFC emulsion are provided herein. In some examples, the PFC emulsion employed in the methods provided is a commercially available PFC emulsion, such as, for example, V-Sense 580H (30% v/v perfluoro-15-crown-5-ether), V-Sense 1000H (20% v/v perfluoro-15-crown-5-ether) or V-Sense DM Green (CelSense, Pittsburgh, Pa.) or Fluorovist® (HemaGen/PFC, St. Louis, Mo.). Exemplary PFC emulsions that can be used in the methods provided also are described in, for example, U.S. Patent App. Pub. Nos. US2009/0280055, US2007/0253910, now U.S. Pat. No. 8,263,043, US2008/0292554, now U.S. Pat. No. 8,147,806, US2011/0110863, US 2009/0074673, now U.S. Pat. No. 8,227,610, US 2009/0263329.

[0245] i. Exemplary Perfluorocarbons (PFCs)

[0246] The perfluorocarbon (PFC) imaging agents for use in the methods provided herein contain one or more perfluorocarbons (PFCs). Generally, the perfluorocarbon contains a plurality of fluorine atoms bound to carbon, such as for example, 5, 10, 15, 20 fluorine atoms in the molecule bound to carbon. In some examples, the PFC imaging agent contains a perfluorocarbon that is a linear or branched chain perfluorocarbon. In some examples, the PFC imaging agent contains a perfluorocarbon that is a perfluorocarbon is a cyclic perfluorocarbon. Exemplary perfluorocarbons include, but are not limited to, perfluoroethers, such as perfluoropolyethers (PFPEs) and perfluoro-crown ethers (PFCEs), including but not limited to, perfluoro-15-crown-5-ether, perfluoro-18-crown-6-ether and perfluoro-12-crown-4-ether, perfluoroalkylethers, perfluoroalkanes such as, but not limited to, perfluoropentane (PFP), perfluorohexane (PFH), perfluorooctane, perfluorononane, perfluorohexyl bromide, perfluorooctyl bromide (PFOB), and perfluorodecyl bromide; perfluoroalkenes such as, but not limited to, bisperfluorobutylethylene; perfluorocycloalkanes such as perfluorodecalin, perfluorocyclohexanes, perfluoroadamantane, perfluorobicyclodecane, and perfluoromethyl decahydroquinoline; perfluoro amines such as perfluoroalkyl amines; and C1-C8 substituted compounds thereof, isomers thereof, and combinations thereof. Additional exemplary PFCs for use in a perfluorocarbon (PFC) imaging agent for use in the methods provided herein include, but are not limited to, PFCs described in, U.S. Patent App. Pub. Nos. US 2009/0074673, now U.S. Pat. No. 8,227,610, and US 2010/0233094. In particular examples, the perfluorocarbon is a perfluoro-crown ether, such as, for example, perfluoro-15-crown-5-ether.

[0247] (1) Modified Perfluorocarbons

[0248] In some examples, the perfluorocarbon imaging agent for use in the methods provided herein contains a perfluorocarbon that is a modified perfluorocarbon. In some examples, the modified perfluorocarbon contains an additional moiety. In some examples, the additional moiety is a functional moiety. In some examples, the functional moiety is a detectable moiety and/or a therapeutic moiety. In some examples, the detectable moiety is detectable by a method other than a nuclear magnetic resonance technique. In some examples, the detectable moiety is a fluorescent moiety or a PET moiety. In some examples, the functional moiety is therapeutic agent such as a radionuclide, chemotherapeutic agent or toxin useful for the treatment or a tumor.

[0249] In some examples, the perfluorocarbon imaging agents used in the methods are detectable by more than one imaging method. For example, the perfluorocarbon imaging agent can be detectable by a nuclear magnetic resonance methods and another method, such as, but not limited, to fluorescent imaging, positron emission tomography (PET), or ultrasonography. In some examples, the perfluorocarbon is a modified perfluorocarbon that contains one or more ¹⁸F isotopes for detection of the fluorocarbon by positron emission spectroscopy. Exemplary modified perfluorocarbon contain a mixture of ¹⁸F and ¹⁹F isotopes, thus providing a dual mode label that is suitable for MRI/MRS and PET. ¹⁸F and ¹⁹F may also be added in separate monomers to form a mixed copolymer, or ¹⁸F portions may be located at either end of a linear polyether, at the position where most other functional moieties would be added. ¹⁸F has no NMR signal and so may be added at positions that would, for example, tend to decrease NMR linewidth, simplify the NMR spectrum, or alleviate chemical shifts from resonances that adversely affect the read-out obtained by a nuclear magnetic resonance technique. In addition, perfluorocarbons can incorporate other radioisotopes that are effective PET probes, such as ¹¹C, ¹⁵O, and ¹³N. Those skilled in the art can, in view of this specification, devise many other PET-detectable moieties that can be incorporated into or, for example, attached to an endgroup(s), of the PFC imaging reagents. In some examples, the perfluorocarbon is a modified perfluorocarbon that contains a quantum dot nanoparticle attached to a perfluorocarbon (see, e.g. U.S. Patent App. Pub. No. 2010/0233094).

[0250] In some examples, the perfluorocarbon is a modified perfluorocarbon that is conjugated to a fluorophore. Many suitable fluorophores are known in the art, including fluorescein and its derivatives (e.g., Oregon Green 488 and 514, Dichlorofluorescein, Carboxyfluorescein, etc., where all are available from Molecular Probes), lissamine, phycoerythrin, rhodamine (Perkin Elmer Cetus), Cy2, Cy3, Cy3.5, Cy5, Cy5.5, Cy7, Alexa dyes (Molecular Probes), BODIPy dyes (Molecular Probes) and Fluor X (Amersham). Fluorescent moieties include derivatives of fluorescein, benzoxadioazole, coumarin, eosin, Lucifer Yellow, pyridyloxazole and rhodamine. These and many other exemplary fluorescent moieties are described in the Handbook of Fluorescent Probes and Research Chemicals (2000, Molecular Probes, Inc.).

[0251] In some examples, the perfluorocarbon is a modified perfluorocarbon that is conjugated to a targeting agent, such as a ligand or a receptor. In some examples, the perfluorocarbon is a modified perfluorocarbon that is conjugated to an internalization peptide, such as antepennepedia protein, HIV transactivating peptide (TAT), mastoparan, melittin, bombolitten, delta hemolysin, paradaxin, Pseudomonas exotoxin A, clathrin, Diptheria toxin, C9 complement protein or a fragment thereof.

[0252] ii. Selection of Perfluorocarbons

[0253] Perfluorocarbons for use in MRI imaging generally are selected based on the magnetic properties of the fluorine atoms of the compound. PFCs containing magnetically equivalent fluorine atoms are advantageous because the atoms resonate at the same frequency. Typically, a perfluorocarbon with a narrow bandwidth resonance frequency that is distinct. In some examples, the PFC possesses a single narrow bandwidth resonance frequency. For example, the PFC perfluoro-15-crown-5-ether possesses a single narrow resonance frequency.

[0254] Generally, the PFC selected is non-toxic (i.e. the perfluorocarbon can be administered to a subject and cause minimal or no side effects). Generally, the PFC imaging agent must be able to be phagocytosed by a monocyte or a macrophage. The selected PFC generally does not affect the biological properties of the macrophage following phagocytosis of the compound. In some examples, the PFC imaging agent does not incorporate into cell membranes.

[0255] In particular examples, the PFC imaging agent contains two or more PFCs and can be detected at distinct resonance frequencies. In such examples, the PFCs are typically selected such that ¹⁹F MRI signals derived from each PFC do not interfere with one another. In particular examples, where the PFC imaging agent contains two or more PFCs, the PFCs are selected such that ¹⁹F MRI signals derived from each perfluorocarbon are distinct (i.e. the signal bandwidth resonance frequency of one PFC does not overlap with any resonance frequency of another PFC). In some examples, each PFC can be detected independently based on distinct resonance.

[0256] b. Emulsification and Emulsion Stabilization Agents

[0257] Emulsification agents aid in the formation of PFC nanoparticles of the emulsion and stabilize the emulsion. Exemplary emulsification agents, include, but are not limited to, nonionic surfactants, cationic surfactants, anionic surfactants, and amphoteric surfactants.

[0258] In particular examples, the emulsification agent or emulsion stabilization agent is a block copolymer. Non-limiting examples of suitable poly(ethylene oxide)-polyester block copolymers include poly(ethylene oxide) block copolymers with ε-caprolactone, (L or D,L) lactide, D,L-lactic acid, D-lactic acid, L-lactic acid, glycolide, glycolic acid, lactic and glycolic acid (PLGA), hydroxy hexanoic acid, γ-butyrolactone, γ-hydroxy butyric acid, δ-valerolactone, hydroxy valeric acid, hydroxybutyric acids, malic acid, copolymers thereof, and combinations thereof.

[0259] In particular examples, the emulsification agent or emulsion stabilization agent is a nonionic triblock copolymer. In particular examples, the nonionic triblock copolymer is a poloxamer (i.e. a Pluronic™) that contains a central hydrophobic chain of poly(propylene oxide) (PPO, polyoxypropylene) flanked by two hydrophilic chains of poly(ethylene oxide) (PEO, polyoxyethylene) (i.e. PEO-PPO-PEO). In particular examples, the PEO-PPO-PEO triblock copolymer has an average molecular weight of 1900, 2900, 6500, 8400. In a particular example, the PEO-PPO-PEO triblock copolymer has an average molecular weight of 1900 and a hydrophilic-lipophilic balance (HLB) value of about 19. In a particular example, the PEO-PPO-PEO triblock copolymer has an average molecular weight of 2900 and a hydrophilic-lipophilic balance (HLB) value of about 15. In a particular example, the PEO-PPO-PEO triblock copolymer has an average molecular weight of 6500 and a hydrophilic-lipophilic balance (HLB) value of about 15. In a particular example, the PEO-PPO-PEO triblock copolymer has an average molecular weight of 8400 and a hydrophilic-lipophilic balance (HLB) value of about 29. Exemplary poloxamers that can be used to generate a PFC emulsion include, but are not limited to, Pluronic™ L-35, Pluronic™ L64, Pluronic™ P105, Pluronic™ F-68, and Pluronic™ F-127 (BASF Corporation).

[0260] Additional exemplary emulsification agents that can be used to generate PFC emulsions, include, but are not limited to, polyvinyl alcohol (PVA), Hamposyl™ L30, sodium dodecyl sulfate, Aerosol 413, Aerosol 200, Lipoproteol™ LCO, Standapol™ LCO, Standapol™ SH 135, Fizul™ 10-127, Cyclopol™ SBFA 30, Deriphat™ 170, Lonzaine™ JS, Niranol™ C2N-SF, Amphoterge™ W2, Amphoterge™ 2WAS, Brij™ 35, Triton™ X-100, Brij™ 52, Span™ 20, Generol™ 122 ES, Triton™ N-42, Triton™ N-101, Triton™ X-405, Tween™ 80, Tween™ 85, and Brij™ 56.

[0261] In some examples, the emulsion contain an emulsion stabilization agent. In some examples, the emulsion stabilization agent also is emulsification agent.

[0262] In some examples, the PFC emulsion contains one or more lipid for stabilization of the emulsion. In particular examples, the lipid is mixed with the emulsification agent to enhance stabilization of the emulsion. In some examples, the lipid can be coupled to a targeting agent. Exemplary lipids include, but are not limited to, natural or synthetic phospholipids, fatty acids, cholesterols, lysolipids, sphingomyelins, tocopherols, glucolipids, stearylarginines, cardiolipins, plasmalogens, a lipid with ether or ester linked fatty acids, polymerized lipids, and a mixture thereof. In a particular example, the lipid in the PFC emulsion is dimyristoylphosphatidylcholine (DMPC).

[0263] c. Characteristics of Perfluorocarbon Imaging Agent Emulsions

[0264] Generally, the mean particle size of the nanoparticles of the emulsion is less than or about 800 nm, such as, for example, less than or about 750 nm, less than or about 700 nm, less than or about 650 nm, less than or about 600 nm, less than or about 550 nm, less than or about 500 nm, less than or about 450 nm, than or about 400 nm, than or about 350 nm, than or about 300 nm, than or about 250 nm, than or about 200 nm, than or about 150 nm, than or about 100 nm, than or about 50 nm, or than or about 25 nm. Typically, the mean particle size of the nanoparticles of the emulsion is less than or about 500 nm. In particular examples, the PFC droplet size in the emulsion is about 145 nm. Typically, the polydispersity index of the emulsion ranges from about 0.1 to about 0.2.

[0265] The amount of the PFC in the emulsion relative other components of the emulsion can be varied. Exemplary percentages of PFC in an emulsion by volume include, but are not limited to, at or about 5% v/v, at or about 10% v/v, 15% v/v, 20% v/v, 25% v/v, 30% v/v, 35% v/v, 40% v/v, 45% v/v, 50% v/v, 55% v/v, 60% v/v, 65% v/v, 70% v/v, 75% v/v, 80% v/v, 85% v/v, 90% v/v, and 95% v/v. In some examples the perfluorocarbon is present in the emulsion from about 5% v/v to about 60% v/v of the emulsion, such as, for example, 10% v/v to about 40% v/v. In particular examples, the PFC is 20% v/v of the emulsion. In particular examples, the PFC is perfluoro-15-crown-5-ether and the PFC is 20% v/v of the emulsion. In particular examples, the PFC is 30% v/v of the emulsion. In a particular example, the PFC is perfluoro-15-crown-5-ether and the PFC is 30% v/v of the emulsion. In a particular example, the emulsion is V-Sense 1000H (CelSense Inc., Pittsburgh, Pa.). In particular examples, the PFC is 40% v/v of the emulsion. In particular examples, the PFC is perfluorooctylbromide and the PFC is 40% v/v of the emulsion.

[0266] Exemplary percentages of PFC in an emulsion by weight include, but are not limited to, at or about 5% wt/wt, at or about 10% wt/wt, 15% wt/wt, 20% wt/wt, 25% wt/wt, 30% wt/wt, 35% wt/wt, 40% wt/wt, 45% wt/wt, 50% wt/wt, 55% wt/wt, 60% wt/wt, 65% wt/wt, 70% wt/wt, 75% wt/wt, 80% wt/wt, 85% wt/wt, 90% wt/wt, and 95% wt/wt. In some examples the perfluorocarbon is present in the emulsion from about 5% v/v to about 60% v/v of the emulsion, such as, for example, 10% wt/wt to about 40% wt/wt.

[0267] d. Addition of Therapeutic and Diagnostic Agents

[0268] The PFC imaging agents for use in the methods provided herein can additionally contain one or more therapeutic agents and/or one or more additional diagnostic agents for delivery to a tumor. The therapeutic and/or diagnostic agents can be used for therapy and or detection or monitoring of a tumor. Therapeutic agents that can be included in a PFC emulsion include, but are not limited to chemotherapeutic agents, hormones, or any other biologically or chemically active agents, including nucleic acids, peptides, proteins, antibodies, and/or radionuclides that can be used to treat a condition such as various tumors and cancers. In some aspects, the therapeutic agent can include, but is not limited to, paclitaxel, doxorubicin, gemcitabine, adriamycin, cisplatin, taxol, methotrexate, 5-fluorouracil, betulinic acid, amphotericin B, diazepam, nystatin, propofol, testosterone, estrogen, prednisolone, prednisone, 2,3 mercaptopropanol, progesterone, multi-drug resistant (MDR) suppressing agents, or any combination thereof. In a non-limiting example, the PFC emulsion contains paclitaxel (PTX). A non-limiting example, the PFC emulsion is a perfluoro-15-crown-5-ether (PFCE) emulsion containing paclitaxel (PTX) (see Rapoport et al. (2011) J Control Release 153(1):4-15).

[0269] PFC emulsions carrying therapeutic and diagnostic agents can be delivered to the tumor and released by ultrasound induced (e.g. sonication with 1-MHz therapeutic ultrasound) acoustic vaporization which induces cavitation of the nanoparticles of the emulsion (see, e.g. U.S. Patent App. Pub. No. 2010/0178305).

[0270] e. Preparation of Perfluorocarbon Emulsions

[0271] The perfluorocarbon emulsions can be produced by any variety of standard methods known in the art for the generation of nanoemulsions. Exemplary methods for the generation of perfluorocarbon emulsions are described in, for example, U.S. Pat. Nos. 4,990,283, 5,330,681, 5,690,907; 5,780,010; 5,989,520; 5,958,371; U.S. Patent Pub. Nos. US 2010/0233094, US 2009/0280055, US 2007/0253910, US2008/0292554, now U.S. Pat. No. 8,147,806, and US 2011/0110863, US 2009/0074673, US2009/0263329; and PCT publication WO 02/060524

[0272] Exemplary methods for generation of a PFC emulsion include high energy and low energy methods. In some examples, the nanoemulsion is a produced by a high energy method. Exemplary high energy methods include, but are not limited to, sonication, high pressure homogenization, high shear agitation and microfluidization. In some examples, the nanoemulsion is a produced by a low energy method. An exemplary low energy method includes, but is not limited to, such as such as vortexing or a thin film method (see, e.g., U.S. Patent Pub. No. US 2010/0233094).

[0273] Equipment, such as homogenizer and emulsifiers for the production of emulsions are readily available in the art. Exemplary equipment for the production of emulsions includes, but is not limited to, Sonifier Cell disruptor, Emulsiflex C5 (Avestin), PowerGen 1000 homogenizer (Fisher Scientific), and Model M-1105 emulsifier/Microfluidizer (Microfluidics Co.). The resulting emulsion can further be sterilized, for example, by autoclaving or passing through a suitable filter.

[0274] The properties of prepared emulsions can be determined. For example, particle size, stability and purity of the emulsions can be measured. Particle size can be measured, for example by dynamic light scattering (e.g. Malvern Zetasizer Nano, Malvern, Worcestershire, UK or Zetatrac™ Particle Metrix, Meerbusch, Germany). Additionally, dual imaging PFC agents that contain dyes or fluorescent moieties can be analyzed by standard methods including, but not limited to, chromogenic assays, spectroscopy and fluorescence microscopy.

[0275] 3. Detection and Imaging Methods

[0276] a. In Vivo Detection and Imaging

[0277] Detection and imaging of PFC accumulation generally is performed by MRI. MRI examination may be conducted according to any suitable methodology known in the art. Many different types of MRI pulse sequences, or the set of instructions used by the MRI apparatus to orchestrate data collection, and signal processing techniques (e.g. Fourier transform and projection reconstruction) have been developed over the years for collecting and processing image data (for example, see Magnetic Resonance Imaging, Third Edition, editors D. D. Stark and W. G. Bradley, Mosby, Inc., St. Louis Mo. 1999). The reagents and methods provide are not tied to any particular imaging pulse sequence or processing method of the raw NMR signals. For example, MRI methods that can be applied in the methods provided broadly encompasses spin-echo, stimulated-echo. gradient-echo, free-induction decay based imaging, and any combination thereof. Fast imaging techniques, where more than one line in k-space or large segments of k-space are acquired from each excited signal, are also highly suitable to acquire the ¹⁹F (or ¹H) data. Examples of fast imaging techniques include fast spin-echo approaches (e.g. FSE, turbo SE, TSE, RARE, or HASTE), echo-planar imaging (EPI), combined gradient-echo and spin-echo techniques (e.g. GRASE), spiral imaging, and burst imaging. The development of new and improved pulse sequence and signal processing methods is a continuously evolving field, and persons skilled in the art can devise multiple ways to image the ¹⁹F labeled cells in their anatomical context. Exemplary methods for imaging perfluorocarbons in vivo by MRI are described in, for example, U.S. Patent App. Pub. Nos. US 2009/0280055, US 2007/0253910, US 2008/0292554, US 2011/0110863, US 2009/0074673, and US 2009/0263329.

[0278] For MRI, the tumor can be imaged in vivo using a magnetic resonance imaging system with surface coils adjustable to ¹⁹F and ¹H resonance frequencies. ¹H MRI provides an anatomical image of tumor and surrounding tissues that can be compared to or overlayed with the ¹⁹F signal image. Acquisition of ¹H anatomical images allows precise determination of the anatomical location of ¹⁹F signal within subject, including the precise location within the tumor. Suitable equipment for detection of ¹⁹F and ¹H is available in the art. In some examples, the tumor is imaged using a 7T Bruker Biospec System (Bruker BioSpin GmbH, Reinstetten, Germany). Typically, the MRI methods is performed at room temperature. Exemplary parameters for ¹⁹F and ¹H MRI can be found in the examples and in the art as described in U.S. Patent App. Pub. Nos. US 2009/0280055, US 2007/0253910, US 2008/0292554, US 2011/0110863, US 2009/0074673, and US 2009/0263329 and patents based thereon. In some examples, quantification of the signal is performed using a computer and imaging software.

[0279] b. Ex Vivo Detection and Imaging

[0280] Tumor inflammation also can be determined ex vivo in a sample obtained from the subject. In some examples, a tumor sample (i.e. biopsy) is obtained from a subject at a predetermined time following administration of an oncolytic virus. Detection of PFC accumulation in the sample can be determined by a nuclear resonance methods such as, for example, ¹⁹F MRI or ¹⁹F MRS. Exemplary methods for extraction and imaging of tumor tissue by ¹⁹F MRI and ¹⁹F MRS are described in the Examples provided and in Ahrens et al. (2005) Nat Biotechnol 23(8):983-987.

[0281] In some examples, the sample is a tissue biopsy and is obtained, for example, by needle biopsy, CT-guided needle biopsy, aspiration biopsy, endoscopic biopsy, bronchoscopic biopsy, bronchial lavage, incisional biopsy, excisional biopsy, punch biopsy, shave biopsy, skin biopsy, bone marrow biopsy, and the Loop Electrosurgical Excision Procedure (LEEP). Typically, a non-necrotic, sterile biopsy or specimen is obtained that is greater than 100 mg, but which can be smaller, such as less than 100 mg, 50 mg or less, 10 mg or less or 5 mg or less; or larger, such as more than 100 mg, 200 mg or more, or 500 mg or more, 1 gm or more, 2 gm or more, 3 gm or more, 4 gm or more or 5 gm or more. The sample size to be extracted for the assay can depend on a number of factors including, but not limited to, the number of assays to be performed, the health of the tissue sample, the type of cancer, and the condition of the patient. The tissue is typically placed in a sterile vessel, such as a sterile tube or culture plate, and can be optionally immersed in an appropriate media.

[0282] Additional analysis of the ex vivo sample can be performed, such as, for example, immunohistochemistry or PCR analysis of gene expression for detection of particular cell types in the sample. In some examples, immunohistochemical analysis of macrophage specific markers, such as CD68, or other immune cell specific markers can be examined. In some examples, the sample can be analyzed for the expression of a detectable gene encoded by the virus, such as a fluorescent or luminescent protein or other detectable gene product. In some examples, the sample can be analyzed for the detectable moieties conjugated to a modified perfluorocarbon such as for example, fluorescent moieties, PET imaging moieties (e.g. ¹⁸F) or other imaging moieties as described herein.

### D. VIRUSES FOR USE IN THE METHODS

[0283] 1. Exemplary Oncolytic Viruses

[0284] The viruses for use in the methods provided herein typically are replication competent viruses that can selectively infect neoplastic cells (i.e. oncolytic viruses). Numerous oncolytic viruses have been identified or developed. These include vaccinia viruses, vesicular stomatitis viruses, herpes viruses, measles viruses and adenoviruses. Such viruses have been employed for the detection, imaging and therapy of tumors. One of skill in the art can readily identify such viruses, and can adapt them for the methods described herein. Viruses used in the methods described herein also can be further modified to improve the suitability of the virus for use as a therapeutic and/or diagnostic virus.

[0285] Oncolytic viruses include viruses that preferentially infect and accumulate in tumor cells and viruses that are modified to do so. Viruses and viral vectors include, but are not limited to, poxviruses, herpesviruses, adenoviruses, adeno-associated viruses, lentiviruses, retroviruses, rhabdoviruses, papillomaviruses, vesicular stomatitis virus, measles virus, Newcastle disease virus, picornavirus, Sindbis virus, papillomavirus, parvovirus, reovirus, coxsackievirus, influenza virus, mumps virus, poliovirus, and semliki forest virus.

[0286] Typically, the virus for use in the methods is a cytoplasmic virus which does not require entry of viral nucleic acid molecules in to the nucleus of the host cell during the viral life cycle. A variety of cytoplasmic viruses are known, including, but not limited to, poxviruses, African swine flu family viruses, and various RNA viruses such as picornaviruses, caliciviruses, togaviruses, coronaviruses and rhabdoviruses. Exemplary cytoplasmic viruses provided herein are viruses of the poxvirus family, including orthopoxviruses. Exemplary of poxviruses are vaccinia viruses.

[0287] Viruses for use in the methods provided herein typically are modified viruses, which are modified relative to the wild-type virus. Such modifications of the viruses provided can enhance one or more characteristics of the virus. Such characteristics can include, but are not limited to, attenuated pathogenicity, reduced toxicity, preferential accumulation in tumor, increased ability to activate an immune response against tumor cells, increased immunogenicity, increased or decreased replication competence, and ability to express additional exogenous proteins, and combinations thereof. For examples, the viruses can be modified to express one or more detectable gene products, including proteins that can be used for detecting, imaging and monitoring of infected tumor cells. In other examples, the viruses can be modified to express one or more gene products for the therapy of a tumor.

[0288] Viruses for use in the methods provided herein can contain one or more heterologous nucleic acid molecules inserted into the genome of the virus. A heterologous nucleic acid molecule can contain an open reading frame operatively linked to a promoter for expression or can be a non-coding sequence that alters the attenuation of the virus. In some cases, the heterologous nucleic acid replaces all or a portion of a viral gene.

[0289] a. Poxviruses

[0290] In some examples, the virus for use in the methods provided herein is selected from the poxvirus family. Poxviruses include Chordopoxyiridae such as orthopoxvirus, parapoxvirus, avipoxvirus, capripoxvirus, leporipoxvirus, suipoxvirus, molluscipoxvirus and yatapoxvirus, as well as Entomopoxyirinae such as entomopoxvirus A, entomopoxvirus B, and entomopoxvirus C. One skilled in the art can select a particular genera or individual chordopoxyiridae according to the known properties of the genera or individual virus, and according to the selected characteristics of the virus (e.g., pathogenicity, ability to elicit an immune response, preferential tumor localization, preferential tumor cell infection), the intended use of the virus, the tumor type and the host organism. Exemplary chordopoxyiridae genera are orthopoxvirus and avipoxvirus.

[0291] Avipoxviruses are known to infect a variety of different birds and have been administered to humans. Exemplary avipoxviruses include canarypox, fowlpox, juncopox, mynahpox, pigeonpox, psittacinepox, quailpox, peacockpox, penguinpox, sparrowpox, starlingpox, and turkeypox viruses.

[0292] Orthopoxviruses are known to infect a variety of different mammals including rodents, domesticated animals, primates and humans. Several orthopoxviruses have a broad host range, while others have narrower host range. Exemplary orthopoxviruses include buffalopox, camelpox, cowpox, ectromelia, monkeypox, raccoon pox, skunk pox, tatera pox, uasin gishu, vaccinia, variola, and volepox viruses. In some embodiments, the orthopoxvirus selected can be an orthopoxvirus known to infect humans, such as cowpox, monkeypox, vaccinia, or variola virus. Optionally, the orthopoxvirus known to infect humans can be selected from the group of orthopoxviruses with a broad host range, such as cowpox, monkeypox, or vaccinia virus.

[0293] i. Vaccinia Viruses

[0294] One exemplary orthopoxvirus for use in the methods provided herein is vaccinia virus. Vaccinia virus strains have been shown to specifically colonize solid tumors, while not infecting other organs (see, e.g., Zhang et al. (2007) Cancer Res 67:10038-10046; Yu et al., (2004) Nat Biotech 22:313-320; Heo et al., (2011) Mol Ther 19:1170-1179; Liu et al. (2008) Mol Ther 16:1637-1642; Park et al., (2008) Lancet Oncol, 9:533-542). Vaccinia is a cytoplasmic virus, thus, it does not insert its genome into the host genome during its life cycle. The linear dsDNA viral genome of vaccinia virus is approximately 200 kb in size, encoding a total of approximately 200 potential genes. A variety of vaccinia virus strains are available for uses in the methods provided, including Western Reserve (WR) (SEQ ID NO: 18), Copenhagen (SEQ ID NO: 19), Tashkent, Tian Tan, Lister, Wyeth, IHD-J, and IHD-W, Brighton, Ankara, MVA, Dairen I, LIPV, LC 16M8, LC16MO, LIVP, WR 65-16, Connaught, New York City Board of Health.

[0295] Exemplary vaccinia viruses are Lister or LIVP vaccinia viruses. In one embodiment, the Lister strain can be an attenuated Lister strain, such as the LIVP (Lister virus from the Institute of Viral Preparations, Moscow, Russia) strain, which was produced by further attenuation of the Lister strain. The LIVP strain was used for vaccination throughout the world, particularly in India and Russia, and is widely available. In another embodiment, the viruses and methods provided herein can be based on modifications to the Lister strain of vaccinia virus.

[0296] Lister (also referred to as Elstree) vaccinia virus is available from any of a variety of sources. For example, the Elstree vaccinia virus is available at the ATCC under Accession Number VR-1549. The Lister vaccinia strain has high transduction efficiency in tumor cells with high levels of gene expression. LIVP and its production are described, for example, in U.S. Pat. Nos. 7,588,767, 7,588,771, 7,662,398 and 7,754,221 and U.S. Patent Publication Nos. US 2007/0202572, US 2007/0212727, US 2010/0062016, US 2009/0098529, US 2009/0053244, US 2009/0155287, US 2009/0117034, US 2010/0233078, US 2009/0162288, US 2010/0196325, US 2009/0136917 and US 2011/0064650.

[0297] Vaccinia virus possesses a variety of features for use in cancer gene therapy and vaccination including broad host and cell type range, a large carrying capacity for foreign genes (up to 25 kb of exogenous DNA fragments (approximately 12% of the vaccinia genome size) can be inserted into the vaccinia genome), high sequence homology among different strains for designing and generating modified viruses in other strains, and techniques for production of modified vaccinia strains by genetic engineering are well established (Moss (1993) Curr. Opin. Genet. Dev. 3: 86-90; Broder and Earl (1999) Mol. Biotechnol. 13: 223-245; Timiryasova et al. (2001) Biotechniques 31: 534-540). A variety of vaccinia virus strains are available, including Western Reserve (WR), Copenhagen, Tashkent, Tian Tan, Lister, Wyeth, IHD-J, and IHD-W, Brighton, Ankara, MVA, Dairen I, LIPV, LC16M8, LC16MO, LIVP, WR 65-16, Connaught, New York City Board of Health. Exemplary of vaccinia viruses for use in the methods provided herein include, but are not limited to, Lister strain or LIVP strain of vaccinia viruses.

[0298] The exemplary modifications of the Lister strain described herein (see Example 1) also can be adapted to other vaccinia viruses (e.g., Western Reserve (WR), Copenhagen, Tashkent, Tian Tan, Lister, Wyeth, IHD-J, and IHD-W, Brighton, Ankara, MVA, Dairen I, LIPV, LC16M8, LC16MO, LIVP, WR 65-16, Connaught, New York City Board of Health). The modifications of the Lister strain described herein also can be adapted to other viruses, including, but not limited to, viruses of the poxvirus family, adenoviruses, herpes viruses and retroviruses.

[0299] LIVP strains that can be used in the methods provided herein include LIVP clonal strains derived from LIVP that have a genome that is or is derived from or is related to a the parental sequence set forth in SEQ ID NO: 2 (see U.S. Patent Application Ser. No. 61/517,297, which is incorporated herein by reference). These include LIVP clonal strains that have been shown to exhibit greater anti-tumorigenicity and/or reduced toxicity compared to the recombinant or modified virus strain designated GLV-1h68 (having a genome set forth in SEQ ID NO:1; and U.S. Patent Application Ser. No. 61/517,297). In particular, the clonal strains are present in a virus preparation propagated from LIVP. Exemplary LIVP clonal strains include but are not limited to LIVP 1.1.1 (SEQ ID NO: 20), LIVP 2.1.1 (SEQ ID NO: 21), LIVP 4.1.1 (SEQ ID NO: 22), LIVP 5.1.1 (SEQ ID NO: 23), LIVP 6.1.1 (SEQ ID NO: 24), LIVP 7.1.1 (SEQ ID NO: 25), and LIVP 8.1.1 (SEQ ID NO: 26).

[0300] For purposes herein, the methods are exemplified with GLV-1h68, but it is understood that the methods can be employed with any oncolytic virus that can be administered for therapy and/or diagnosis of a tumor.

[0301] The LIVP and clonal strains for use in the methods provided herein have a sequence of nucleotides that have at least 70%, such as at least 75%, 80%, 85% or 90% sequence identity to SEQ ID NO: 2. For example, the clonal strains have a sequence of nucleotides that has at least 91%, 92%, 93%, 94%, 95%, 95%, 97%, 98%, 99%, 99.1%, 99.2%, 99.3%, 99.4%, 99.5%, 99.6%, 99.7%, 99.8%, 99.9%, and 100% identical SEQ ID NO: 2. Such LIVP clonal viruses include viruses that differ in one or more open reading frames (ORF) compared to the parental LIVP strain that has a sequence of amino acids set forth in SEQ ID NO: 2. The LIVP clonal virus strains can contain a nucleotide deletion or mutation in any one or more nucleotides in any ORF compared to SEQ ID NO: 2, or can contain an addition or insertion of viral DNA compared to SEQ ID NO: 2.

[0302] In some examples, the LIVP strain for use in the methods is a clonal strain of LIVP or a modified form thereof containing a sequence of nucleotides selected from: nucleotides 2,256-181,114 of SEQ ID NO:20, nucleotides 11,243-182,721 of SEQ ID NO:21, nucleotides 6,264-181,390 of SEQ ID NO:22, nucleotides 7,044-181,820 of SEQ ID NO:23, nucleotides 6,674-181,409 of SEQ ID NO:24, nucleotides 6,716-181,367 of SEQ ID NO:25 or nucleotides 6,899-181,870 of SEQ ID NO:26.

[0303] In some examples, the LIVP strain for use in the methods is a clonal strain of LIVP or a modified form thereof containing a sequence of nucleotides that has at least 97% sequence identity to a sequence of nucleotides 2,256-181,114 of SEQ ID NO:20, nucleotides 11,243-182,721 of SEQ ID NO:21, nucleotides 6,264-181,390 of SEQ ID NO:22, nucleotides 7,044-181,820 of SEQ ID NO:23, nucleotides 6,674-181,409 of SEQ ID NO:24, nucleotides 6,716-181,367 of SEQ ID NO:25 or nucleotides 6,899-181,870 of SEQ ID NO:26.

[0304] (1) Modified Vaccinia Viruses

[0305] Exemplary vaccinia viruses for use in the methods provided include vaccinia viruses with insertions, mutations or deletions. Exemplary insertions, mutations or deletions include those that result in an attenuated vaccinia virus relative to the wild type strain. For example, vaccinia virus insertions, mutations or deletions can decrease pathogenicity of the vaccinia virus, for example, by reducing the toxicity, reducing the infectivity, reducing the ability to replicate, or reducing the number of non-tumor organs or tissues to which the vaccinia virus can accumulate. Other exemplary insertions, mutations or deletions include, but are not limited to, those that increase antigenicity of the virus, those that permit detection, monitoring, or imaging, those that alter attenuation of the virus, and those that alter infectivity. For example, the ability of vaccinia viruses provided herein to infect and replicate within tumors can be enhanced by mutations that increase the extracellular enveloped form of the virus (EEV) that is released from the host cell, as described elsewhere herein. Modifications can be made, for example, in genes that are involved in nucleotide metabolism, host interactions and virus formation or at other nonessential gene loci. Any of a variety of insertions, mutations or deletions of the vaccinia virus known in the art can be used herein, including insertions, mutations or deletions of: the thymidine kinase (TK) gene, the hemagglutinin (HA) gene, and F14.5L gene, among others (e.g., A35R, E2L/E3L, K1L/K2L, superoxide dismutase locus, 7.5K, C7-K1L, J2R, B13R+B14R, A56R, A26L or 14L gene loci). The vaccinia viruses for use in the methods provided herein also can contain two or more insertions, mutations or deletions. Thus, included are vaccinia viruses containing two or more insertions, mutations or deletions of the loci provided herein or other loci known in the art. The viruses can be based on modifications to the Lister strain and/or LIVP strain of vaccinia virus. Any known vaccinia virus, or modifications thereof that correspond to those provided herein or known to those of skill in the art to reduce toxicity of a vaccinia virus. Generally, however, the mutation will be a multiple mutant and the virus will be further selected to reduce toxicity.

[0306] The modified viruses for use in the methods provided herein can encode heterologous gene products. The heterologous nucleic acid is typically operably linked to a promoter for expression of the heterologous gene in the infected cells. Suitable promoter include viral promoters, such as a vaccinia virus natural and synthetic promoters. Exemplary vaccinia viral promoters include, but are not limited to, P11k, P7.5 k early/late, P7.5 k early, P28 late, synthetic early P_{SE}, synthetic early/late P_{SEL} and synthetic late P_{SL} promoters.

[0307] (2) Exemplary Modified Vaccinia Viruses

[0308] Exemplary vaccinia viruses include those derived from vaccinia virus strain GLV-1h68 (also designated RVGL21 and for clinical trial as GL-ONC1; see SEQ ID NO:1), which has been described in U.S. Pat. Pub. No. 2005-0031643, now U.S. Pat. No. 7,588,767; see, also U.S. provisional application Ser. No. 61/517,297, which provides sequences of clonal strains of LIVP and derivatives thereof, including GLV-1h68).

[0309] GLV-1h68 contains DNA insertions into gene in an LIVP strain of vaccinia virus (SEQ ID NO: 2). The LIVP vaccinia virus strain was originally prepared by adapting the Lister strain (ATCC Catalog No. VR-1549) to calf skin (Institute of Viral Preparations, Moscow, Russia, Al'tshtein et al., (1983) Dokl. Akad. Nauk USSR 285:696-699)). It is available from the Institute of Viral Preparations. GLV-1h68 contains expression cassettes encoding detectable marker proteins in the F14.5L (also designated in LIVP as F3), thymidine kinase (TK) and hemagglutinin (HA) gene loci. An expression cassette containing a Ruc-GFP cDNA molecule (a fusion of DNA encoding Renilla luciferase and DNA encoding GFP) under the control of a vaccinia synthetic early/late promoter P_{SEL} ((P_{SEL})Ruc-GFP) is inserted into the F14.5L gene locus; an expression cassette containing a DNA molecule encoding beta-galactosidase under the control of the vaccinia early/late promoter P_{7.5k} ((P_{7.5k})LacZ) and DNA encoding a rat transferrin receptor positioned in the reverse orientation for transcription relative to the vaccinia synthetic early/late promoter P_{SEL} ((P_{SEL})rTrfR) is inserted into the TK gene locus (the resulting virus does not express transferrin receptor protein since the DNA molecule encoding the protein is positioned in the reverse orientation for transcription relative to the promoter in the cassette); and an expression cassette containing a DNA molecule encoding β-glucuronidase under the control of the vaccinia late promoter P₁₁ₖ ((P₁₁ₖ)guSA) is inserted into the HA gene locus. The GLV-1h68 virus exhibits a strong preference for accumulation in tumor tissues compared to non-tumorous tissues following systemic administration of the virus to tumor bearing subjects. This preference is significantly higher than the tumor selective accumulation of other vaccinia viral strains, such as WR (see, e.g. U.S. Pat. Pub. No. 2005-0031643 and Zhang et al. (2007) Cancer Res. 67(20):10038-10046).

[0310] Modified viruses for use in the methods provided herein include the strain designed GLV-1h68 (SEQ ID NO: 1) and all strains, derivatives, and modified forms thereof that contain different or additional insertions, deletions, and also variants thereof (see, e.g., U.S. Pat. Nos. 7,588,767, 7,588,771, 7,662,398 and 7,754,221 and U.S. Patent Publication Nos. 2007/0202572, 2007/0212727, 2010/0062016, 2009/0098529, 2009/0053244, 2009/0155287, 2009/0117034, 2010/0233078, 2009/0162288, 2010/0196325, 2009/0136917 and 2011/0064650). Exemplary viruses are generated by replacement of one or more expression cassettes of the GLV-1h68 strain with heterologous DNA encoding gene products for therapy and/or imaging.

[0311] Non-limiting examples of viruses that are derived from attenuated LIVP viruses, such as GLV-1h68, and that can be employed in the methods provided, include, but are not limited to, LIVP viruses described in U.S. Pat. Nos. 7,588,767, 7,588,771, 7,662,398 and 7,754,221 and U.S. Patent Publication Nos. 2007/0202572, 2007/0212727, 2010/0062016, 2009/0098529, 2009/0053244, 2009/0155287, 2009/0117034, 2010/0233078, 2009/0162288, 2010/0196325 and 2009/0136917, which are incorporated herein by reference in their entirety. For example, the vaccinia virus can be selected from among GLV-1h22, GLV-1h68, GLV-1i69, GLV-1h70, GLV-1h71, GLV-1h72, GLV-1h73, GLV-1h74, GLV-1h81, GLV-1h82, GLV-1h83, GLV-1h84, GLV-1h85, or GLV-1h86, which are described in U.S. Patent Publication No. 2009/0098529 and GLV-1h104, GLV-1h105, GLV-1h106, GLV-1h107, GLV-1h108 and GLV-1h109, which are described in U.S. Patent Publication No. 2009/0053244; GLV-1h99, GLV-1h100, GLV-1h101, GLV-1h139, GLV-1h146, GLV-1h151, GLV-1h152 and GLV-1h153, which are described in U.S. Patent Publication No. 2009/0117034.

[0312] Exemplary of viruses which have one or more expression cassettes removed from GLV-1h68 and replaced with a heterologous non-coding DNA molecule include GLV-1h70, GLV-1h71, GLV-1h72, GLV-1h73, GLV-1h74, GLV-1h85, and GLV-1h86. GLV-1h70 contains (P_{SEL})Ruc-GFP inserted into the F14.5L gene locus, (P_{SEL})rTrfR and (P_{7.5k})LacZ inserted into the TK gene locus, and a non-coding DNA molecule inserted into the HA gene locus in place of (P₁₁ₖ)gusA. GLV-1h71 contains a non-coding DNA molecule inserted into the F14.5L gene locus in place of (P_{SEL})Ruc-GFP, (P_{SEL})rTrfR and (P_{7.5k})LacZ inserted into the TK gene locus, and (P₁₁ₖ)gusA inserted into the HA gene locus. GLV-1h72 contains (P_{SEL})Ruc-GFP inserted into the F14.5L gene locus, a non-coding DNA molecule inserted into the TK gene locus in place of (P_{SEL})rTrfR and (P_{7.5k})LacZ, and P₁₁ₖgusA inserted into the HA gene locus. GLV-1h73 contains a non-coding DNA molecule inserted into the F14.5L gene locus in place of (P_{SEL})Ruc-GFP, (P_{SEL})rTrfR and (P_{7.5k})LacZ inserted into the TK gene locus, and a non-coding DNA molecule inserted into the HA gene locus in place of (P₁₁ₖ)gusA. GLV-1h74 contains a non-coding DNA molecule inserted into the F14.5L gene locus in place of (P_{SEL})Ruc-GFP, a non-coding DNA molecule inserted into the TK gene locus in place of (P_{SEL)}rTrfR and (P_{7.5k})LacZ, and a non-coding DNA molecule inserted into the HA gene locus in place of (P₁₁ₖ)gusA. GLV-1h85 contains a non-coding DNA molecule inserted into the F14.5L gene locus in place of (P_{SEL})Ruc-GFP, a non-coding DNA molecule inserted into the TK gene locus in place of (P_{SEL})rTrfR and (P_{7.5k})LacZ, and (P₁₁ₖ)gusA inserted into the HA gene locus. GLV-1h86 contains (P_{SEL})Ruc-GFP inserted into the F14.5L gene locus, a non-coding DNA molecule inserted into the TK gene locus in place of (P_{SEL})rTrfR and (P_{7.5k})LacZ, and a non-coding DNA molecule inserted into the HA gene locus in place of (P₁₁ₖ)gusA.

[0313] Other exemplary viruses include, but are not limited to, LIVP viruses that encode additional imaging agents such as ferritin and/or a transferrin receptor (e.g., GLV-1h82 and GLV-1h83 which encode E. coli ferritin at the HA locus; GLV-1h82 addition encodes the human transferrin receptor at the TK locus) or a click beetle luciferase-red fluorescent protein fusion protein (e.g., GLV-1h84, which encodes CBG99 and mRFP1 at the TK locus). During translation, the two proteins are cleaved into two individual proteins at picornavirus 2A element (Osborn et al., Mol. Ther. 12: 569-74, 2005). CBG99 produces a more stable luminescent signal than does Renilla luciferase with a half-life of greater than 30 minutes, which makes in vitro and in vivo assays more convenient. mRFP1 provides improvements in in vivo imaging relative to GFP since mRFP1 can penetrate tissue deeper than GFP. Other exemplary viruses include, but are not limited to, LIVP viruses that encode the far-red fluorescent protein TurboFP635 (scientific name “Katushka”) from the sea anemone Entacmaea quadricolor, such as for example, GLV-1h188 (SEQ ID NO: 3), GLV-1h189 (SEQ ID NO: 4), GLV-1h190 (SEQ ID NO: 5), GLV-1h253 (SEQ ID NO: 6), and GLV-1h254 (SEQ ID NO: 7).

[0314] Other exemplary viruses include, but are not limited to, LIVP viruses that express one or more therapeutic gene products, such as angiogenesis inhibitors (e.g., GLV-1h81, which contains DNA encoding the plasminogen K5 domain (SEQ ID NO: 14) under the control of the vaccinia synthetic early-late promoter in place of the gusA expression cassette at the HA locus in GLV-1h68; GLV-1h104, GLV-1h105 and GLV-1h106, which contain DNA encoding a truncated human tissue factor fused to the αᵥβ₃-integrin RGD binding motif (tTF-RGD) (SEQ ID NO: 15) under the control of a vaccinia synthetic early promoter, vaccinia synthetic early/late promoter or vaccinia synthetic late promoter, respectively, in place of the LacZ/rTFr expression cassette at the TK locus of GLV-1h68; GLV-1h107, GLV-1h108 and GLV-1h109, which contain DNA encoding an anti-VEGF single chain antibody G6 (SEQ ID NO: 13) under the control of a vaccinia synthetic early promoter, vaccinia synthetic early/late promoter or vaccinia synthetic late promoter, respectively, in place of the LacZ/rTFr expression cassette at the TK locus of GLV-1h68) and proteins for tumor growth suppression (e.g., GLV-1h90, GLV-1h91 and GLV-1h92, which express a fusion protein containing an IL-6 fused to an IL-6 receptor (sIL-6R/IL-6) (SEQ ID NO: 17) under the control of a vaccinia synthetic early promoter, vaccinia synthetic early/late promoter or vaccinia synthetic late promoter, respectively, in place of the gusA expression cassette at the HA locus in GLV-1h68; and GLV-1h96, GLV-1h97 and GLV-1h98, which express IL-24 (melanoma differentiation gene, mda-7; SEQ ID NO: 16) under the control of a vaccinia synthetic early promoter, vaccinia synthetic early/late promoter or vaccinia synthetic late promoter, respectively, in place of the Ruc-GFP fusion gene expression cassette at the F14.5L locus of GLV-1h68). Additional therapeutic gene products that can be engineered in the viruses provided herein also are described elsewhere herein.

[0315] Exemplary transporter proteins that can be encoded by the viruses for in vivo imaging and therapy provided herein include, for example, the human norepinephrine transporter (hNET; SEQ ID NO: 27) and the human sodium iodide symporter (hNIS; SEQ ID NO: 28). Exemplary viruses that can be employed in the methods and use provided herein that encode the human norepinephrine transporter (hNET) include, but are not limited to, GLV-1h99, GLV-1h100, GLV-1h101, GLV-1h139, GLV-1h146, and GLV-1h150. GLV-1h99 encodes hNET under the control of a vaccinia synthetic early promoter in place of the Ruc-GFP fusion gene expression cassette at the F14.5L locus of GLV-1h68. GLV-1h100, GLV-1h101 encode hNET under the control of a vaccinia synthetic early promoter or vaccinia synthetic late promoter, respectively, in place of the LacZ/rTFr expression cassette at the TK locus of GLV-1h68. GLV-1h139 encodes hNET under the control of a vaccinia synthetic early promoter in place of the gusA expression cassette at the HA locus in GLV-1h68. GLV-1h146 and GLV-1h150, encode hNET under the control of a vaccinia synthetic early promoter or vaccinia synthetic late promoter, respectively, in place of the LacZ/rTFr expression cassette at the TK locus of GLV-1h100 and GLV-101, respectively. Thus, GLV-1h146 and GLV-1h150 encode hNET and IL-24. Exemplary viruses that can be employed in the methods and use provided herein that encode the human sodium iodide transporter (hNIS) include, but are not limited to, GLV-1h151, GLV-1h152 and GLV-1h153. GLV-1h151, GLV-1h152 and GLV-1h153 encode hNIS under the control of a vaccinia synthetic early promoter, vaccinia synthetic early/late promoter or vaccinia synthetic late promoter, respectively, in place of the gusA expression cassette at the HA locus in GLV-1h68.

[0316] b. Other Oncolytic Viruses

[0317] Oncolytic viruses for use in the methods provided here are well known to one skill in the art and include, for example, vesicular stomatitis virus, see, e.g., U.S. Pat. Nos. 7,731,974, 7,153,510, 6,653,103 and U.S. Pat. Pub. Nos. 2010/0178684, 2010/0172877, 2010/0113567, 2007/0098743, 20050260601, 20050220818 and EP Pat. Nos. 1385466, 1606411 and 1520175; herpes simplex virus, see, e.g., U.S. Pat. Nos. 7,897,146, 7731,952, 7,550,296, 7,537,924, 6,723,316, 6,428,968 and U.S. Pat. Pub. Nos. 2011/0177032, 2011/0158948, 2010/0092515, 2009/0274728, 2009/0285860, 2009/0215147, 2009/0010889, 2007/0110720, 2006/0039894 and 20040009604; retroviruses, see, e.g., U.S. Pat. Nos. 6,689,871, 6,635,472, 6,639,139, 5,851,529, 5,716,826, 5,716,613 and U.S. Pat. Pub. No. 20110212530; and adeno-associated viruses, see, e.g., U.S. Pat. Nos. 8,007,780, 7,968,340, 7,943,374, 7,906,111, 7,927,585, 7,811,814, 7,662,627, 7,241,447, 7,238,526, 7,172,893, 7,033,826, 7,001,765, 6,897,045, and 6,632,670.

[0318] Also included are other therapeutic vaccinia viruses, such as the virus designated JX-594, which is a vaccinia virus that expresses GM-CSF described, for example, in U.S. Pat. No. 6,093,700, and the Wyeth strain vaccinia virus designated JX-594, which is a TK-deleted vaccinia virus that expresses GM-CSF (see, International PCT application No WO 2004/014314, U.S. Pat. No. 5,364,773; Mastrangelo et al. (1998) Cancer Gene Therapy 6:409-422; Kim et al. (2006) Molecular Therapeutics 14:361-370).

[0319] In addition, adenoviruses, such as the ONYX viruses and others, have been modified, such as be deletion of EA1 genes, so that they selectively replicate in cancerous cells, and, thus, are oncolytic. Adenoviruses also have been engineered to have modified tropism for tumor therapy and also as gene therapy vectors.

[0320] c. Production and Preparation of Virus

[0321] The viruses for use in the methods provided herein can be formed by standard methodologies well known in the art for producing and/or modifying viruses. Briefly, the methods can include introducing into viruses one or more genetic modifications, followed by screening the viruses for properties reflective of the modification or for other desired properties.

[0322] i. Methods for Generating Recombinant Virus

[0323] Standard techniques in molecular biology can be used to generate the modified viruses for use in the methods provided herein. Methods for the generation, of recombinant viruses using recombinant DNA methods are well known in the art (e.g., see U.S. Pat. Nos. 4,769,330, 4,603,112, 4,722,848, 4,215,051, 5,110,587, 5,174,993, 5,922,576, 6,319,703, 5,719,054, 6,429,001, 6,589,531, 6,573,090, 6,800,288, 7,045,313, He et al. (1998) Proc. Natl. Acad. Sci. USA 95(5): 2509-2514, Racaniello et al. (1981) Science 214: 916-919, Hruby et al. (1990) Clin Micro Rev. 3:153-170). Such methods include, but are not limited to, various nucleic acid manipulation techniques, nucleic acid transfer protocols, nucleic acid amplification protocols, and other molecular biology techniques known in the art. For example, point mutations can be introduced into a gene of interest through the use of oligonucleotide mediated site-directed mutagenesis. Alternatively, homologous recombination can be used to introduce a mutation or exogenous sequence into a target sequence of interest. In an alternative mutagenesis protocol, point mutations in a particular gene also can be selected for using a positive selection pressure. See, e.g., Current Techniques in Molecular Biology, (Ed. Ausubel, et al.). Nucleic acid amplification protocols include but are not limited to the polymerase chain reaction (PCR). Use of nucleic acid tools such as plasmids, vectors, promoters and other regulating sequences, are well known in the art for a large variety of viruses and cellular organisms. Nucleic acid transfer protocols include calcium chloride transformation/transfection, electroporation, liposome mediated nucleic acid transfer, N-[1-(2,3-Dioloyloxy)propyl]-N,N,N-trimethylammonium methylsulfate meditated transformation, and others. Further a large variety of nucleic acid tools are available from many different sources including ATCC, and various commercial sources. One skilled in the art will be readily able to select the appropriate tools and methods for genetic modifications of any particular virus according to the knowledge in the art and design choice.

[0324] Any of a variety of modifications can be readily accomplished using standard molecular biological methods known in the art. The modifications will typically be one or more truncations, deletions, mutations or insertions of the viral genome. In one example, the modification can be specifically directed to a particular sequence. The modifications can be directed to any of a variety of regions of the viral genome, including, but not limited to, a regulatory sequence, to a gene-encoding sequence, or to a sequence without a known role. Any of a variety of regions of viral genomes that are available for modification are readily known in the art for many viruses, including the viruses specifically listed herein. As a non-limiting example, the loci of a variety of vaccinia genes provided herein and elsewhere exemplify the number of different regions that can be targeted for modification in the viruses provided herein. In some examples, the modification can be fully or partially random, whereupon selection of any particular modified virus can be determined according to the desired properties of the modified the virus. These methods include, for example, in vitro recombination techniques, synthetic methods and in vivo recombination methods as described, for example, in Sambrook et al. Molecular Cloning: A Laboratory Manual, 2nd edition, Cold Spring Harbor Laboratory Press, cold Spring Harbor N.Y. (1989), and in the Examples disclosed herein.

[0325] The viruses for use in the methods provided herein can be modified to express an exogenous gene. Exemplary exogenous gene products include proteins and RNA molecules. The modified viruses can express an additional detectable gene product, a therapeutic gene product, a gene product for manufacturing or harvesting, or an antigenic gene product for antibody harvesting. In some examples, the virus can encode a reporter protein, such as, for example, a fluorescent protein, a luminescent protein, a receptor or an enzyme. The characteristics of such gene products are described herein and elsewhere. In some examples of modifying an organism to express an exogenous gene, the modification also can contain one or more regulatory sequences to regulate expression of the exogenous gene. As is known in the art, regulatory sequences can permit constitutive expression of the exogenous gene or can permit inducible expression of the exogenous gene. Further, the regulatory sequence can permit control of the level of expression of the exogenous gene. In some examples, inducible expression can be under the control of cellular or other factors present in a tumor cell or present in a virus-infected tumor cell. In other examples, inducible expression can be under the control of an administrable substance, including IPTG, RU486 or other known induction compounds. Any of a variety of regulatory sequences are available to one skilled in the art and can be selected according to known factors and design preferences. In some examples, such as gene product manufacture and harvesting, the regulatory sequence can result in constitutive, high levels of gene expression. In some examples, such as anti-(gene product) antibody harvesting, the regulatory sequence can result in constitutive, lower levels of gene expression. In tumor therapy examples, a therapeutic protein can be under the control of an internally inducible promoter or an externally inducible promoter.

[0326] In other examples, organ or tissue-specific expression can be controlled by regulatory sequences. In order to achieve expression only in the target organ, for example, a tumor, the foreign nucleotide sequence can be linked to a tissue specific promoter and used for gene therapy. Such promoters are well known to those skilled in the art (see e.g., Zimmermann et al. (1994) Neuron 12: 11-24; Vidal et al. (1990) EMBO J. 9: 833-840; Mayford et al. (1995) Cell 81: 891-904; and Pinkert et al. (1987) Genes & Dev. 1: 268-76).

[0327] In some examples, the viruses can be modified to express two or more proteins, where any combination of the two or more proteins can be one or more detectable gene products, therapeutic gene products, gene products for manufacturing or harvesting or antigenic gene products for antibody harvesting. In one example, a virus can be modified to express a detectable protein and a therapeutic protein. In another example, a virus can be modified to express two or more gene products for detection or two or more therapeutic gene products. For example, one or more proteins involved in biosynthesis of a luciferase substrate can be expressed along with luciferase. When two or more exogenous genes are introduced, the genes can be regulated under the same or different regulatory sequences, and the genes can be inserted in the same or different regions of the viral genome, in a single or a plurality of genetic manipulation steps. In some examples, one gene, such as a gene encoding a detectable gene product, can be under the control of a constitutive promoter, while a second gene, such as a gene encoding a therapeutic gene product, can be under the control of an inducible promoter. Methods for inserting two or more genes in to a virus are known in the art and can be readily performed for a wide variety of viruses using a wide variety of exogenous genes, regulatory sequences, and/or other nucleic acid sequences.

[0328] Methods of producing recombinant viruses are known in the art (Falkner F G & Moss B (1990) Transient dominant selection of recombinant vaccinia viruses. J Virol 64(6):3108-3111). Provided herein for exemplary purposes are methods of producing a recombinant vaccinia virus. A recombinant vaccinia virus with an insertion in the F14.5L gene (NotI site of LIVP) can be prepared by the following steps: (a) generating (i) a vaccinia shuttle plasmid containing the modified F14.5L gene inserted at restriction site X and (ii) a dephosphorylated wt VV (VGL) DNA digested at restriction site X; (b) transfecting host cells infected with PUV-inactivated helper VV (VGL) with a mixture of the constructs of (i) and (ii) of step a; and (c) isolating the recombinant vaccinia viruses from the transfectants. One skilled in the art knows how to perform such methods, for example by following the instructions given in co-pending U.S. application Ser. Nos. 10/872,156 and 11/238,025; see also Timiryasova et al. (2001) Biotechniques 31: 534-540. In one example, restriction site X is a unique restriction site.

[0329] A variety of suitable host cells also are known to the person skilled in the art and include many mammalian, avian and insect cells and tissues which are susceptible for vaccinia virus infection, including chicken embryo, rabbit, hamster and monkey kidney cells, for example, HeLa cells, RK13, CV-1, Vero, BSC40 and BSC-1 monkey kidney cells.

[0330] 2. Expression of Therapeutic and Reporter Gene Products

[0331] The oncolytic viruses used in the methods provided herein can be modified to express one or more heterologous genes. Gene expression can include expression of a protein encoded by a gene and/or expression of an RNA molecule encoded by a gene. The viruses can be modified express one or more genes for the therapy of a tumor. The viruses also can be modified express one or more genes whose products are detectable or whose products can provide a detectable signal. These genes are often called “reporter genes”, and their products are called “reporter proteins” or “reporter gene products”. A reporter gene and its product are generally amenable to assays that are sensitive, quantitative, rapid, easy and reproducible. Many reporter genes have been described in the art, and their detection can be effected in a variety of ways. These heterologous genes can be introduced into the viruses and used to easily assess, for example, the activity of the promoter under which the reporter gene is controlled, the level of transcription and/or translation of the virally encoded genes, and in some instances, by inference, certain activities of the host cell in which the virus resides. In some examples, the reporter protein interacts with host cell proteins, resulting in a detectable change in the properties of the reporter protein.

[0332] Expression of heterologous genes can be controlled by a constitutive promoter, or by an inducible promoter. Expression also can be influenced by one or more proteins or RNA molecules expressed by the virus. Host cell factors also can influence the expression of heterologous genes. Depending upon the factors that influence the expression, the level of expression of a reporter gene can be used as an indicator for various processes within the virus, or within the host cell in which the virus grows. For example, if expression of the reporter gene relies on viral factors produced only after viral DNA replication occurs, then the level of the expression of the reporter gene can be used as a measure of the level of viral DNA replication.

[0333] a. Exemplary Reporter Gene Products

[0334] A variety of reporter genes that encode detectable proteins are known in the art, and can be expressed in the viruses in the methods provided herein. Detectable proteins include receptors or other proteins that can specifically bind a detectable compound, proteins that can emit a detectable signal such as a fluorescence signal, and enzymes that can catalyze a detectable reaction or catalyze formation of a detectable product. Thus, reporter proteins can be assayed by detecting endogenous characteristics, such as enzymatic activity or spectrophotometric characteristics, or indirectly with, for example, antibody-based assays.

[0335] i. Fluorescent Proteins

[0336] In some examples, the oncolytic viruses for use in the methods provided can express a gene encoding a protein that is a fluorescent protein. Fluorescent proteins emit fluorescence by absorbing and re-radiating the energy of light. Fluorescence can yield relatively high levels of light, compared to, for example, chemiluminescence, and is readily detected by various means known in the art and described herein. Many fluorescent proteins are known in the art and have been widely used as reporter proteins. The first cloned of these, and the most well-known, is green fluorescent protein (GFP) from the Aequorea victoria (Prasher et al. (1987) Gene 111: 229-233), which is a 27 kDa protein that produces a green fluorescence emission with a peak wavelength at 507 nm following excitation at either 395 or 475 nm. GFP also has been cloned from Aequorea coerulescens (Gurskaya et al. (2003) Biochem J. 373:403-8). The wild-type GFP gene has been modified by, for example, point mutation, optimizing codon usage or introducing a Kozak translation initiation site, to generate multiple variants with improved and/or alternate properties. For example, a variant termed enhanced green fluorescent protein (EGFP) contains a single point mutation that shifts the excitation wavelength to 488 nm, which is in the cyan region, and optimized codon usage which yields greater expression in mammalian systems (Yang et al. (1996) Nucl Acids Res. 24 4592-4593). Other variants are spectral variants which display blue, cyan and yellowish-green fluorescent emissions, generally referred to as blue fluorescent protein (BFP), cyan fluorescent protein (CFP), and yellow fluorescent protein (YFP). Examples of these and other variants of GFP include, but are not limited to, those described in U.S. Pat. Nos. 5,625,048, 5,804,387, 6,027,881, 6,150,176, 6,265,548, and 6,608,189.

[0337] GFP-like proteins have been isolated from other organisms, particularly the reef corals in the class Anthazoa. While some of the GFP-like proteins emit a green fluorescence, such as the green fluorescent protein from the anthozoan coelenterates Renilla reniformis and Renilla kollikeri (sea pansies) (U.S. Pat. Pub. No. 2003/0013849), others fluoresce with an even wider range of colors than the GFP variants, including blue, green, yellow, orange, red and purple (see e.g., U.S. Pat. No. 7,166,444, Miyawaki et al. (2002) Cell Struct Func 27: 343-347, Labas et al. (2002) Proc. Natl. Acad. Sci. USA 99:4256-4261). Examples of the GFP-like fluorescent proteins include, but are not limited to, those set forth in Table 3.

TABLE 3
Examples of GFP-like proteins

| | | Excitation | Emission | |
|---|---|---|---|---|
| Protein ID | | maxima | maxima | |
| (alternate ID) | Species | (nm) | (nm) | Color |
| amajGFP (amFP486) | Anemonia majano | 458 | 486 | green |
| dsfrGFP (DsFP483) | Discosoma striata | 456 | 484 | green |
| clavGFP (CFP484) | Clavularia sp. | 443 | 483 | green |
| cgigGFP | Condylactis gigantea | 399, 482 | 496 | green |
| hcriGFP | Heteractis crispa | 405, 481 | 500 | green |
| ptilGFP | Ptilosarcus sp. | 500 | 508 | green |
| rmueGFP | Renilla muelleri | 498 | 510 | green |
| zoanGFP (zFP560) | Zoanthus sp. | 496 | 506 | green |
| asulGFP (asFP499) | Anemonia sulcata | 403, 480 | 499 | green |
| dis3GFP | Discosoma sp.3 | 503 | 512 | green |
| dendGFP | Dendronephthya sp. | 494 | 508 | green |
| mcavGFP | Montastraea cavernosa | 506 | 516 | green |
| rfloGFP | Ricordea florida | 508 | 518 | green |
| scubGFP1 | Scolymia cubensis | 497 | 506 | green |
| scubGFP2 | Scolymia cubensis | 497 | 506 | green |
| zoanYFP | Zoanthus sp. | 494, 528 | 538 | yellow |
| DsRed (drFP583) | Discosoma sp.1 | 558 | 583 | orange-red |
| dis2RFP (dsFP593) | Discosoma sp.2 | 573 | 593 | orange-red |
| zoan2RFP | Zoanthus sp.2 | 552 | 576 | orange-red |
| cpFP611 | Entacmaea quadricolor | 559 | 611 | orange-red |
| mcavRFP | Montastraea cavernosa | 508, 572 | 520, 580 | orange-red |
| rfloRFP | Ricordea florida | 506, 566 | 517, 574 | orange-red |
| Kaede | Trachyphillia geoffroyi | 508, 572 | 518, 582 | orange-red |
| asulCP (asCP) | Anemonia sulcata | 568 | none | purple-blue |
| hcriCP (hcCP) | Heteracis crispa | 578 | none | purple-blue |
| cgigCP (cpCP) | Condylactis gigantea | 571 | none | purple-blue |
| cpasCP (cpCP) | Condylactis parsiflora | 571 | none | purple-blue |
| gtenCP (gtCP) | Goniopora tenuidens | 580 | none | purple-blue |

*Adapted from Miyawaki et al. (2002) Cell Struct Funct 27, 343-34.

[0338] Exemplary GFP variants and variants of GFP-like proteins from variety of species are known and can be employed for expression by an oncolytic virus for use in the methods provided herein. Such fluorescent protein include monomeric, dimeric and tetrameric fluorescent proteins. Exemplary monomeric fluorescent proteins include, but are not limited to: violet fluorescent proteins, such as for example, Sirius; blue fluorescent proteins, such as for example, Azurite, EBFP, SBFP2, EBFP2, TagBFP; cyan fluorescent proteins, such as for example, mTurquoise, eCFP, Cerulean, SCFP, TagCFP, mTFP1; green fluorescent proteins, such as for example, GFP, mUkG1, aAG1, AcGFP1, TagGFP2, EGFP, mWasabi, EmGFP (Emerald); yellow fluorescent proteins, such as for example; TagYFP, EYFP, Topaz, SYFP2, YPet, Venus, Citrine; orange fluorescent proteins, such as for example, mKO, mKO2, mOrange, mOrange2, red fluorescent proteins, such as for example; TagRFP, TagRFPt, mStrawberry, mRuby, mCherry; far red fluorescent proteins, such as for example; mRasberry, mKate2, mPlum, and mNeptune; and fluorescent proteins having an increased stokes shift (i.e. >100 nm distance between excitation and emission spectra), such as for example, Sapphire, T-Sapphire, mAmetrine, and mKeima. Exemplary dimeric and tetrameric fluorescent proteins include, but are not limited to: AmCyan1, Midori-Ishi Cyan, copGFP (ppluGFP2), TurboGFP. ZsGreen, TurboYFP, ZsYellow1, TurboRFP, dTomato, DsRed2, DsRed-Express, DsRed-Express2, DsRed-Max, AsRed2, TurboFP602, RFP611, Katushka (TurboFP635), Katushka2, and AQ143. Excitation and emission spectra for exemplary fluorescent proteins are well-known in the art (see also e.g. Chudakov et al. (2010) Physiol Rev 90, 1102-1163).

[0339] In particular examples, a GFP or GFP-like protein is selected for expression by an oncolytic virus for use in the methods provided herein. In other particular examples, a red or far-red fluorescent protein is selected for expression by an oncolytic virus for use in the methods provided herein. In further particular examples, the fluorescent protein Katushka (TurboFP635) protein is selected for expression by an oncolytic virus for use in the methods provided herein.

[0340] Selection of a particular fluorescent protein depends on variety of factors including, but not limited to, brightness, maturation rate, photostability, aggregation and pH stability of the fluorescent protein (see e.g. Chudakov et al. (2010) Physiol Rev 90, 1102-1163). Typically, a fluorescent protein for expression by an oncolytic virus is selected to provide a detectable signal within a reasonable time following infection of a tumor cell.

[0341] Other proteinaceous fluorophores include phycobiliproteins from certain cyanobacteria and eukaryotic algae. These proteins are among the most highly fluorescent known (Oi et al. (1982) J. Cell Biol. 93:981-986), and systems have been developed that are able to detect the fluorescence emitted from as little as one phycobiliprotein molecule (Peck et al. (1989) Proc. Natl. Acad. Sci. USA 86 4087-4091). Phycobiliproteins are classified on the basis of their color into two large groups, the phycoerythrins (red) and the phycocyanins (blue). Examples of fluorescent phycobiliproteins include, but are not limited to, R-Phycoerythrin (R-PE), B-Phycoerythrin (B-PE), Y-Phycoerythrin (Y-PE), C-Phycocyanin (P-PC), R-Phycocyanin (R-PC), Phycoerythrin 566 (PE 566), Phycoerythrocyanin (PEC) and Allophycocyanin (APC). The genes encoding the phycobiliproteins have been cloned from a multitude of species and have been used to express the fluorescent proteins in a heterologous host (Tooley et al. (2001) Proc. Natl. Acad. Sci. USA 98:10560-10565). The genes required for the expression of these or any other fluorophores can be cloned into the viruses used in the methods provided herein to generate a virus with a fluorescent reporter protein.

[0342] ii. Bioluminescent Proteins

[0343] In some examples, the oncolytic viruses can express a gene encoding a protein that is a bioluminescent protein. Chemiluminescence is a process in which photons are produced when molecules in an excited state transition to a lower energy level in an exothermic chemical reaction. The chemical reactions required to generate the excited states in this process generally proceed at a relatively low rate compared to, for example, fluorescence, and so yield a relatively low rate of photon emission. Because the photons are not required to create the excited states, they do not constitute an inherent background when measuring photon efflux, which permits precise measurement of very small changes in light. Bioluminescence is a form of chemiluminescence that has developed through evolution in a range of organisms, and is based on the interaction of the enzyme luciferase with a luminescent substrate luciferin. The luciferases can produce light of varying colors. For example, the luciferases from click beetles can produce light with emission peaks in the range of 547 to 593 nm, spanning four colors (Wood et al. (1989) Science 244: 700-702).

[0344] Thus, luciferases for use in the methods provided are enzymes or photoproteins that catalyze a bioluminescent reaction (i.e., a reaction that produces bioluminescence). Some exemplary luciferases, such as firefly, Gaussia and Renilla luciferases, are enzymes which act catalytically and are unchanged during the bioluminescence generating reaction. Other exemplary luciferases, such as the aequorin photoprotein to which luciferin is non-covalently bound, are changed, such as by release of the luciferin, during bioluminescence-generating reaction. The luciferase can be a protein, or a mixture of proteins (e.g., bacterial luciferase). The protein or proteins can be native, or wild luciferases, or a variant or mutant thereof, such as a variant produced by mutagenesis that has one or more properties, such as thermal stability, that differ from the naturally-occurring protein. Luciferases and modified mutant or variant forms thereof are well known. For purposes herein, reference to luciferase refers to either the photoproteins or luciferases.

[0345] Exemplary genes encoding bioluminescent proteins include, but are not limited to, bacterial luciferase genes from Vibrio harveyi (Belas et al. (1982) Science 218: 791-793), and Vibrio fischerii (Foran and Brown, (1988) Nucleic acids Res. 16:177), firefly luciferase (de Wet et al. (1987) Mol. Cell. Biol. 7:725-737), aequorin from Aequorea victoria (Prasher et al. (1987) Biochem. 26:1326-1332), Renilla luciferase from Renilla renformis (Lorenz et al. (1991) Proc. Natl. Acad. Sci. USA 88:4438-4442) and click beetle luciferase from Pyrophorus plagiophthalamus (Wood et al. (1989) Science 244:700-702). Other naturally occurring secreted luciferases include, for example, those from Vargula hilgendorfii, Cypridina noctiluca, Oplophorus gracilirostris, Metridia longa and Gaussia princeps. Native and synthetic forms of the genes can be used in the methods provided herein. The luxA and luxB genes of bacterial luciferase can be fused to produce the fusion gene (Fab2), which can be expressed to produce a fully functional luciferase protein (Escher et al. (1989) Proc. Natl. Acad. Sci. USA 86: 6528-6532). Transformation and expression of these and other genes encoding bioluminescent proteins in viruses can permit detection of viral infection, for example, using a low light and/or fluorescence imaging camera. In some examples, luciferases expressed by viruses can require exogenously added substrates such as decanal or coelenterazine for light emission. In other examples, viruses can express a complete lux operon, which can include proteins that can provide luciferase substrates such as decanal.

[0346] Bioluminescence substrates are the compounds that are oxidized in the presence of a luciferase and any necessary activators and which generates light. With respect to luciferases, these substrates are typically referred to as luciferins that undergo oxidation in a bioluminescence reaction. The bioluminescence substrates include any luciferin or analog thereof or any synthetic compound with which a luciferase interacts to generate light. Typical substrates include those that are oxidized in the presence of a luciferase or protein in a light-generating reaction. Bioluminescence substrates, thus, include those compounds that those of skill in the art recognize as luciferins. Luciferins, for example, include firefly luciferin, Cypridina (also known as Vargula) luciferin, coelenterazine, dinoflagellate luciferin, bacterial luciferin, as well as synthetic analogs of these substrates or other compounds that are oxidized in the presence of a luciferase in a reaction the produces bioluminescence.

[0347] iii. Other Enzymes

[0348] In some examples, the oncolytic viruses can express a gene encoding a protein that can catalyze a detectable reaction. Some commonly used reporter genes encode enzymes or other biochemical markers which, when active in the host cells, cause some visible change in the cells or their environment upon addition of the appropriate substrate. Two examples of this type of reporter are the E. coli genes lacZ (encoding β-galactosidase or “β-gal”) and gusA or iudA (encoding β-glucuronidase or “β-glu”). These bacterial sequences are useful as reporter genes because the cells in which they are expressed, prior to transfection, express extremely low levels (if any) of the enzyme encoded by the reporter gene. When host cells expressing the reporter gene (via heterologous expression from the virus) are incubated with an appropriate substrate, a detectable product is formed. The particular substrate used dictates the type of signal generated and the method of detection required. For example, β-galactosidase substrates include those that, when hydrolyzed by β-galactosidase, form products that can be detected, for example, by spectrophotometry (e.g., o-nitrophenyl-β-D-galactoside (ONPG) or 5-bromo-4-chloro-3-indolyl-β-D-galactopyranoside (X-gal)); fluorometry (e.g., a 4-methyl-umbelliferyl-β-galactopyranoside compound (MUG)); or via chemiluminescence (e.g., 1,2-dioxetane-galactopyranoside derivatives; Bronstein et al. (1996) Clin Chem. 42:1542-1546). Many substrates that facilitate the detection of enzymatic activity by various methods also exist for use with β-glucuronidase, including, but not limited to, 5-bromo-4-chloro-3-indolyl-β-D-glucuronic acid (X-Gluc), which produces a blue precipitate following hydrolysis; p-nitrophenyl β-D-glucuronide which also can be used in a spectrophotometrical format; 4-methylumbelliferyl-β-D-glucuronide (MUG), which can be used in a fluorometric assay; and sodium 3-(4-methoxyspiro{1,2-dioxetane-3,2′-(5′-chloro)-tricyclo[3.3.1.13,7]decan}-4-yl)phenyl-β-D-glucuronate (Glucuron®; U.S. Pat. No. 6,586,196 and Bronstein et al. (1996) Clin Chem. 42:1542-1546), which can be used in a chemiluminescent assay.

[0349] Other exemplary reporter genes that can be expressed in the viruses used in the methods provided herein include secreted embryonic alkaline phosphatase (SEAP) and chloramphenicol acetyltransferase (CAT). SEAP is a truncated form of human placental alkaline phosphatase that is secreted into the cell culture supernatant following expression. The alkaline phosphatase activity can be readily assayed using any of the substrates known in the art, and can be visualized by chemiluminescence (e.g., using the substrate CSPD [disodium 3-(4-methoxyspiro[1,2-d]oxetane-3,2′(5′-chloro)-tricyclo[3,3,1,13,7)decan]-4-yl)phenyl phosphate]); fluorescence (e.g., using the substrate MUP [4-methylumbelliferyl phosphate]); or spectrometry (e.g., using the substrate p-nitrophenyl phosphate (PNPP)).

[0350] The bacterial gene encoding chloramphenicol acetyltransferase (CAT), which catalyzes the addition of acetyl groups to the antibiotic chloramphenicol also can be cloned into the viruses and used to express a reporter protein. CAT activity can be monitored in several ways. In one method, cells infected by the virus expressing the CAT reporter gene can be lysed and incubated in a reaction mix containing 14C- or 3H-labeled chloramphenicol and n-Butyryl Coenzyme A (n-Butyryl CoA). The expressed heterologous CAT transfers the n-butyryl moiety of the cofactor to chloramphenicol. The reaction products can be extracted, separated and the amount of radioactive n-butyryl chloramphenicol is assayed by liquid scintillation counting. The radioactive n-butyryl chloramphenicol resulting from CAT activity also can be analyzed using thin-layer chromatography.

[0351] Additional exemplary reporter genes include, but are not limited to enzymes, such as β-lactamase, alpha-amylase, peroxidase, T4 lysozyme, oxidoreductase and pyrophosphatase.

[0352] iv. Proteins that Bind to Detectable Ligands

[0353] Exemplary detectable proteins also include proteins that can bind a contrasting agent, chromophore, or a compound or ligand that can be detected. In some examples, the ligand that binds to the detectable protein is covalently attached to a detectable moiety, such, for example a radiolabel, a chromogen, or a fluorescent moiety.

[0354] A variety of gene products that can specifically bind a detectable compound are known in the art, including, but not limited to receptors, metal binding proteins (e.g., siderophores, ferritins, transferrin receptors), ligand binding proteins, and antibodies. Any of a variety of detectable compounds can be used, and can be imaged by any of a variety of known imaging methods. Exemplary compounds include receptor ligands and antigens for antibodies. The ligand can be labeled according to the imaging method to be used. Exemplary imaging methods include, but are not limited to, X-rays, magnetic resonance methods, such as magnetic resonance imaging (MRI) and magnetic resonance spectroscopy (MRS), and tomographic methods, including computed tomography (CT), computed axial tomography (CAT), electron beam computed tomography (EBCT), high resolution computed tomography (HRCT), hypocycloidal tomography, positron emission tomography (PET), single-photon emission computed tomography (SPECT), spiral computed tomography and ultrasonic tomography.

[0355] Labels appropriate for X-ray imaging are known in the art, and include, for example, Bismuth (III), Gold (III), Lanthanum (III) or Lead (II); a radioactive ion, such as ⁶⁷Copper, ⁶⁷Gallium, ⁶⁸Gallium, ¹¹¹Indium, ¹¹³Indium, ¹²³iodine, ¹²⁵Iodine, ¹³¹Iodine, ¹⁹⁷Mercury, ²⁰³Mercury, ¹⁸⁶Rhenium, ¹⁸⁸Rhedum, ⁹⁷Rubidium, ¹⁰³Rubidium, ⁹⁹Technetium or ⁹⁰Yttrium; a nuclear magnetic spin-resonance isotope, such as Cobalt (II), Copper (II), Chromium (III), Dysprosium (III), Erbium (III), Gadolinium (III), Holmium (III), Iron (II), Iron (III), Manganese (II), Neodymium (III), Nickel (II), Samarium (III), Terbium (III), Vanadium (II) or Ytterbium (III); or rhodamine or fluorescein.

[0356] Labels appropriate for magnetic resonance imaging are known in the art, and include, for example, gadolinium chelates and iron oxides. Use of chelates in contrast agents is known in the art. Labels appropriate for tomographic imaging methods are known in the art, and include, for example, β-emitters such as ¹¹C, ¹³N, ¹⁵O or ⁶⁴Cu or γ-emitters such as ¹²³I. Other exemplary radionuclides that can, be used, for example, as tracers for PET include ⁵⁵Co, ⁶⁷Ga, ⁶⁸Ga, ⁶⁰Cu(II), ⁶⁷Cu(II), ⁵⁷Ni, ⁵²Fe and ¹⁸F (e.g., ¹⁸F-fluorodeoxyglucose (FDG)). Examples of useful radionuclide-labeled agents are a ⁶⁴Cu-labeled engineered antibody fragment (Wu et al. (2002) Proc. Natl. Acad. Sci. USA 97: 8495-8500), ⁶⁴Cu-labeled somatostatin (Lewis et al. (1999) J. Med. Chem. 42: 1341-1347), ⁶⁴Cu-pyruvaldehyde-bis(N4-methylthiosemicarbazone)(⁶⁴Cu-PTSM) (Adonai et al. (2002) Proc. Natl. Acad. Sci. USA 99: 3030-3035), ⁵²Fe-citrate (Leenders et al. (1994) J. Neural. Transm. Suppl. 43: 123-132), ⁵²Fe/^{52m}Mn-citrate (Calonder et al. (1999) J. Neurochem. 73: 2047-2055) and ⁵²Fe-labeled iron (III) hydroxide-sucrose complex (Beshara et al. (1999) Br. J. Haematol. 104: 288-295, 296-302).

[0357] v. Transporter Proteins

[0358] The viruses provided herein also can encode proteins, such as transporter proteins (e.g., the human norepinephrine transporter (hNET) or the human sodium iodide symporter (hNIS)), which can provide increase uptake diagnostic and therapeutic moieties across the cell membrane of infected cells for therapy, imaging or detection (see, e.g. U.S. Patent Pub. No. US-2009-0117034).

[0359] vi. Proteins Detectable by Antibodies

[0360] Viruses also can be modified to express a heterologous reporter protein that can be detected with antibodies, typically by indirect or direct Enzyme Linked ImmunoSorbent Assay (ELISA). Any protein against which a monoclonal antibody or polyclonal antibodies can be raised can be utilized for these purposes. For example, as a non-radioactive alternative, chloramphenicol acetyltransferase expression can be quantified in an ELISA via immunological detection of the CAT enzyme expressed in the virus (see e.g., Francois et al. (2005) Antimicrob. Agents Chemother. 49:3770-3775). In another example, the well-defined human Growth Hormone (hGH) reporter system can be utilized. When cloned into the viruses and expressed in the infected host cell, the hGH reporter protein can be secreted into the culture medium, which means that cell lysis is not necessary for quantifying the reporter protein. Detection of the secreted hGH can be carried out, for example, using ¹²⁵I-labeled antibodies against the growth hormone or with anti-hGH antibodies bound to the surface of a microtiter plate. For example, the hGH from the supernatant of the culture medium is added to the wells and binds to the antibody on the plate. The bound hGH can be detected in two steps via a digoxigenin-coupled anti-hGH antibody and a peroxidase-coupled anti-digoxigenin antibody. Bound peroxidase can then be quantified by incubation with a substrate.

[0361] vii. Fusion Proteins

[0362] The viruses also can be modified to express reporter proteins that are fusion proteins, encoded by fusion genes. The fusion protein can contain all or part of an endogenous viral protein, or contain only heterologous amino acids sequences. The fusion protein can contain a polypeptide, protein or fragment thereof that is itself detectable, such as by spectrometry, fluorescence, chemiluminescence, or any other method known in the art, or catalyzes a detectable reaction or some visible change in the host cells or their environment upon addition of the appropriate substrate, or binds a detectable product. In one example, the fusion gene is a fusion of two individual genes that are required for a fully functional dateable product. For example, the luxA and luxB genes of bacterial luciferase can be fused to produce the fusion gene (Fab2), which can be expressed to produce a fully functional luciferase protein, as described above. In another example, the fusion protein can contain more than one detectable element. For example, a fluorescent protein, such as GFP, can be expressed as a fusion protein with a bioluminescent protein, such as luciferase, or another fluorescent protein that differs in the wavelength of light emitted, such as DsRed. In another non-limiting example, an enzyme, such as β-galactosidase, can be expressed as a fusion protein with a protein or polypeptide detectable by antibodies, such as hGH.

[0363] viii. Proteins that Interact with Host Cell Proteins

[0364] The viruses also can be modified to express a reporter protein that directly interacts with one or more proteins that are expressed in the host cell. This interaction can result in a detectable change in the reporter protein such that the interaction can be measured. If the host cell proteins(s) are expressed during a particular biological process, then the reporter protein can be used to indicate the initiation of this process. In some examples, the reporter protein can be a substrate of a host cell protease. Once cleaved, one or more of the separate cleaved products can be differentially detected over the uncleaved protein. In one example, the virus can be modified to express a protein that contains a caspase target sequence, such as DEVD (SEQ ID NO: 29) or LEVD (SEQ ID NO: 30). For example, an oncolytic virus can be modified to express a fusion protein that contains a caspase target sequence that is flanked by two fluorescent molecules, such as CFP and YFP. Cleavage of the fusion protein results in fluorescent signals that can be differentiated from the uncleaved protein by fluorescence resonance energy transfer (FRET) analysis. FRET is a distance-dependent interaction between the electronic excited states of two dye molecules in which excitation is transferred from a donor molecule to an acceptor molecule without emission of a photon. When two suitable fluorescent molecules are separated by a sufficiently short distance, FRET will occur and observed emission at the wavelength corresponding to the donor will increase. When the molecules are separated further, FRET decreases (Zaccolo et al. (2004) Circ. Res. 94:866-873). The uncleaved fusion protein results in intense FRET, but when caspases are activated in the target cell during apoptosis, the fusion protein is cleaved and the molecules are separated, so FRET diminishes (He et al. (2004) Am. J. Pathol. 164:1901-1913). In other examples, a fusion protein is made of a luciferase and a fluorophore, linked by a cleavage sequence, and cleavage is detected by bioluminescence resonance energy transfer (BRET) analysis (Hu et al. (2005) J. Virol. Methods 128:93-103).

[0365] b. Exemplary Therapeutic Gene Products

[0366] In some examples, the oncolytic viruses provide oncolytic therapy of a tumor cell without the expression of a therapeutic gene. In some examples, the oncolytic viruses can express one or more genes whose products are useful for tumor therapy. For example, a virus can express a proteins cause cell death or whose products cause an anti-tumor immune response. Such genes can be considered therapeutic genes. A variety of therapeutic gene products, such as toxic or apoptotic proteins, or siRNA, are known in the art, and can be used with the viruses provided herein. The therapeutic genes can act by directly killing the host cell, for example, as a channel-forming or other lytic protein, or by triggering apoptosis, or by inhibiting essential cellular processes, or by triggering an immune response against the cell, or by interacting with a compound that has a similar effect, for example, by converting a less active compound to a cytotoxic compound.

[0367] Exemplary therapeutic gene products that can be expressed by oncolytic viruses include, but are not limited to, gene products (i.e., proteins and RNAs), including those useful for tumor therapy, such as, but not limited to, an anticancer agent, an anti-metastatic agent, or an antiangiogenic agent. For example, exemplary proteins useful for tumor therapy include, but are not limited to, tumor suppressors, cytostatic proteins and costimulatory molecules, such as a cytokine, a chemokine, or other immunomodulatory molecules, an anticancer antibody, such as a single-chain antibody, antisense RNA, siRNA, prodrug converting enzyme, a toxin, a mitosis inhibitor protein, an antitumor oligopeptide, an anticancer polypeptide antibiotic, an angiogenesis inhibitor, or tissue factor. For example, a large number of therapeutic proteins that can be expressed for tumor treatment in the viruses and methods provided herein are known in the art, including, but not limited to, a transporter, a cell-surface receptor, a cytokine, a chemokine, an apoptotic protein, a mitosis inhibitor protein, an antimitotic oligopeptide, an antiangiogenic factor (e.g., hk5), angiogenesis inhibitors (e.g., plasminogen kringle 5 domain, anti-vascular endothelial growth factor (VEGF) scAb, tTF-RGD, truncated human tissue factor-αᵥβ₃-integrin RGD peptide fusion protein), anticancer antibodies, such as a single-chain antibody (e.g., an antitumor antibody or an antiangiogenic antibody, such as an anti-VEGF antibody or an anti-epidermal growth factor receptor (EGFR) antibody), a toxin, a tumor antigen, a prodrug converting enzyme, a ribozyme, RNAi, and siRNA.

[0368] Additional therapeutic gene products that can be expressed by oncolytic viruses include, but are not limited to, cell matrix degradative genes, such as but not limited to, relaxin-1 and MMP9, and genes for tissue regeneration and reprogramming human somatic cells to pluripotency, such as but not limited to, nAG, Oct4, NANOS, Neogenin-1, Ngn3, Pdx1 and Mafa.

[0369] Costimulatory molecules for use in the methods provided herein include any molecules which are capable of enhancing immune responses to an antigen/pathogen in vivo and/or in vitro. Costimulatory molecules also encompass any molecules which promote the activation, proliferation, differentiation, maturation or maintenance of lymphocytes and/or other cells whose function is important or essential for immune responses.

[0370] An exemplary, non-limiting list of therapeutic proteins includes tumor growth suppressors such as IL-24, WT1, p53, pseudomonas A endotoxin, diphtheria toxin, Arf, Bax, HSV TK, E. coli purine nucleoside phosphorylase, angiostatin and endostatin, p16, Rb, BRCA1, cystic fibrosis transmembrane regulator (CFTR), Factor VIII, low density lipoprotein receptor, beta-galactosidase, alpha-galactosidase, beta-glucocerebrosidase, insulin, parathyroid hormone, alpha-1-antitrypsin, rsCD40L, Fas-ligand, TRAIL, TNF, antibodies, microcin E492, diphtheria toxin, Pseudomonas exotoxin, Escherichia coli Shiga toxin, Escherichia coli Verotoxin 1, and hyperforin. Exemplary cytokines include, but are not limited to, chemokines and classical cytokines, such as the interleukins, including, but not limited to, interleukin-1, interleukin-2, interleukin-6 and interleukin-12, tumor necrosis factors, such as tumor necrosis factor alpha (TNF-α), interferons such as interferon gamma (IFN-γ), granulocyte macrophage colony stimulating factor (GM-CSF), erythropoietin and exemplary chemokines including, but not limited to CXC chemokines such as IL-8 GROα, GROβ, GROγ, ENA-78, LDGF-PBP, GCP-2, PF4, Mig, IP-10, SDF-1α/β, BUNZO/STRC33, I-TAC, BLC/BCA-1; CC chemokines such as MIP-1α, MIP-1β, MDC, TECK, TARC, RANTES, HCC-1, HCC-4, DC-CK1, MIP-3α, MIP-3β, MCP-1, MCP-2, MCP-3, MCP-4, Eotaxin, Eotaxin-2/MPIF-2, I-309, MIP-5/HCC-2, MPIF-1, 6Ckine, CTACK, MEC; lymphotactin; and fractalkine. Exemplary other costimulatory molecules include immunoglobulin superfamily of cytokines, such as B7.1, B7.2.

[0371] Exemplary therapeutic proteins that can be expressed by oncolytic viruses used in the methods provided herein include, but are not limited to, erythropoietin (e.g., SEQ ID NO: 12), an anti-VEGF single chain antibody (e.g., SEQ ID NO: 13), a plasminogen K5 domain (e.g., SEQ ID NO: 14), a human tissue factor-αvβ3-integrin RGD fusion protein (e.g., SEQ ID NO: 15), interleukin-24 (e.g., SEQ ID NO: 16), or immune stimulators, such as IL-6-IL-6 receptor fusion protein (e.g., SEQ ID NO: 17).

[0372] In some examples, the oncolytic viruses used in the methods provided herein can express one or more therapeutic gene products that are proteins that convert a less active compound into a compound that causes tumor cell death. Exemplary methods of conversion of such a prodrug compound include enzymatic conversion and photolytic conversion. A large variety of protein/compound pairs are known in the art, and include, but are not limited to, Herpes simplex virus thymidine kinase/ganciclovir, Herpes simplex virus thymidine kinase/(E)-5-(2-bromovinyl)-2′-deoxyuridine (BVDU), varicella zoster thymidine kinase/ganciclovir, varicella zoster thymidine kinase/BVDU, varicella zoster thymidine kinase/(E)-5-(2-bromovinyl)-1-beta-D-arabinofuranosyluracil (BVaraU), cytosine deaminase/5-fluorouracil, cytosine deaminase/5-fluorocytosine, purine nucleoside phosphorylase/6-methylpurine deoxyriboside, beta lactamase/cephalosporin-doxorubicin, carboxypeptidase G2/4-[(2-chloroethyl)(2-mesyloxyethyl)amino]benzoyl-L-glutamic acid (CMDA), carboxypeptidase A/methotrexate-phenylamine, cytochrome P450/acetaminophen, cytochrome P450-2B1/cyclophosphamide, cytochrome P450-4B1/2-aminoanthracene, 4-ipomeanol, horseradish peroxidase/indole-3-acetic acid, nitroreductase/CB1954, rabbit carboxylesterase/7-ethyl-10-[4-(1-piperidino)-1-piperidino]carbonyloxy-camptothecin (CPT-11), mushroom tyrosinase/bis-(2-chloroethyl)amino-4-hydroxyphenylaminomethanone 28, beta galactosidase/1-chloromethyl-5-hydroxy-1,2-dihydro-3H-benz[e]indole, beta glucuronidase/epirubicin glucuronide, thymidine phosphorylase/5′-deoxy-5-fluorouridine, deoxycytidine kinase/cytosine arabinoside, and linamarase/linamarin.

[0373] Other therapeutic gene products that can be expressed by the oncolytic viruses used in the methods provided herein include siRNA and microRNA molecules. The siRNA and/or microRNA molecule can be directed against expression of a tumor-promoting gene, such as, but not limited to, an oncogene, growth factor, angiogenesis promoting gene, or a receptor. The siRNA and/or microRNA molecule also can be directed against expression of any gene essential for cell growth, cell replication or cell survival. The siRNA and/or microRNA molecule also can be directed against expression of any gene that stabilizes the cell membrane or otherwise limits the number of tumor cell antigens released from the tumor cell. Design of an siRNA or microRNA can be readily determined according to the selected target of the siRNA; methods of siRNA and microRNA design and down-regulation of genes are known in the art, as exemplified in U.S. Pat. Pub. Nos. 2003-0198627 and 2007-0044164, and Zeng et al., Molecular Cell 9:1327-1333 (2002).

[0374] Therapeutic gene products include viral attenuation factors, such as antiviral proteins. Antiviral proteins or peptides can be expressed by the viruses provided herein. Expression of antiviral proteins or peptides can control viral pathogenicity. Exemplary viral attenuation factors include, but are not limited to, virus-specific antibodies, mucins, thrombospondin, and soluble proteins such as cytokines, including, but not limited to TNFα, interferons (for example IFNα, IFNβ, or IFNγ) and interleukins (for example IL-1, IL-12 or IL-18).

[0375] Another exemplary therapeutic gene product that can be expressed by the oncolytic viruses used in the methods provided herein is a protein ligand, such as antitumor oligopeptide. Antitumor oligopeptides are short protein peptides with high affinity and specificity to tumors. Such oligopeptides could be enriched and identified using tumor-associated phage libraries (Akita et al. (2006) Cancer Sci. 97(10):1075-1081). These oligopeptides have been shown to enhance chemotherapy (U.S. Pat. No. 4,912,199). The oligopeptides can be expressed by the viruses provided herein. Expression of the oligopeptides can elicit anticancer activities on their own or in combination with other chemotherapeutic agents. An exemplary group of antitumor oligopeptides is antimitotic peptides, including, but not limited to, tubulysin (Khalil et al. (2006) Chembiochem. 7(4):678-683), phomopsin, hemiasterlin, taltobulin (HTI-286, 3), and cryptophycin. Tubulysin is from myxobacteria and can induce depletion of cell microtubules and trigger the apoptotic process. The antimitotic peptides can be expressed by the viruses provide herein and elicit anticancer activities on their own or in combination with other therapeutic modalities.

[0376] Another exemplary therapeutic gene product that can be expressed by the oncolytic viruses used in the methods provided herein is a protein that sequesters molecules or nutrients needed for tumor growth. For example, the virus can express one or more proteins that bind iron, transport iron, or store iron, or a combination thereof. Increased iron uptake and/or storage by expression of such proteins not only, increases contrast for visualization and detection of a tumor or tissue in which the virus accumulates, but also depletes iron from the tumor environment. Iron depletion from the tumor environment removes a vital nutrient from the tumors, thereby deregulating iron hemostasis in tumor cells and delaying tumor progression and/or killing the tumor.

[0377] Additionally, iron, or other labeled metals, can be administered to a tumor-bearing subject, either alone, or in a conjugated form. An iron conjugate can include, for example, iron conjugated to an imaging moiety or a therapeutic agent. In some cases, the imaging moiety and therapeutic agent are the same, e.g., a radionuclide. Internalization of iron in the tumor, wound, area of inflammation or infection allows the internalization of iron alone, a supplemental imaging moiety, or a therapeutic agent (which can deliver cytotoxicity specifically to tumor cells or deliver the therapeutic agent for treatment of the wound, area of inflammation or infection). These methods can be combined with any of the other methods provided herein.

[0378] In some examples, the oncolytic viruses used in the methods provided herein can be modified to express one or more antigens to elicit antibody production against an expressed gene product and enhance the immune response against the infected tumor cell. The sustained release of antigen can result in an immune response by the viral-infected host, in which the host can develop antibodies against the antigen, and/or the host can mount an immune response against cells expressing the antigen, including an immune response against tumor cells. Thus, the sustained release of antigen can result in immunization against tumor cells. In some embodiments, the viral-mediated sustained antigen release-induced immune response against tumor cells can result in complete removal or killing of all tumor cells. The immunizing antigens can be endogenous to the virus, such as vaccinia antigens on a vaccinia virus used to immunize against smallpox, measles, mumps, or the immunizing antigens can be exogenous antigens expressed by the virus, such as influenza or HIV antigens expressed on a viral capsid surface. In the case of smallpox, for example, a tumor specific protein antigen can be carried by an attenuated vaccinia virus (encoded by the viral genome) for a smallpox vaccine. Thus, the viruses provided herein, including the modified vaccinia viruses can be used as vaccines.

[0379] As shown previously, solid tumors can be treated with viruses, such as vaccinia viruses, resulting in an enormous tumor-specific virus replication, which can lead to tumor protein antigen and viral protein production in the tumors (U.S. Patent Publication No. 2005/0031643). Vaccinia virus administration to mice resulted in lysis of the infected tumor cells and a resultant release of tumor-cell-specific antigens. Continuous leakage of these antigens into the body led to a very high level of antibody titer (in approximately 7-14 days) against tumor proteins, viral proteins, and the virus encoded engineered proteins in the mice. The newly synthesized anti-tumor antibodies and the enhanced macrophage, neutrophils count were continuously delivered via the vasculature to the tumor and thereby provided for the recruitment of an activated immune system against the tumor. The activated immune system then eliminated the foreign compounds of the tumor including the viral particles. This interconnected release of foreign antigens boosted antibody production and continuous response of the antibodies against the tumor proteins to function like an autoimmunizing vaccination system initiated by vaccinia viral infection and replication, followed by cell lysis, protein leakage and enhanced antibody production.

[0380] The administered virus can stimulate humoral and/or cellular immune response in the subject, such as the induction of cytotoxic T lymphocytes responses. For example, the virus can provide prophylactic and therapeutic effects against a tumor infected by the virus or other infectious diseases, by rejection of cells from tumors or lesions using viruses that express immunoreactive antigens (Earl et al., Science 234: 728-831 (1986); Lathe et al., Nature (London) 32: 878-880 (1987)), cellular tumor-associated antigens (Bernards et al., Proc. Natl. Acad. Sci. USA 84: 6854-6858 (1987); Estin et al., Proc. Natl. Acad. Sci. USA 85: 1052-1056 (1988); Kantor et al., J. Natl. Cancer Inst. 84: 1084-1091 (1992); Roth et al., Proc. Natl. Acad. Sci. USA 93: 4781-4786 (1996)) and/or cytokines (e.g., IL-2, IL-12), costimulatory molecules (B7-1, B7-2) (Rao et al., J. Immunol. 156: 3357-3365 (1996); Chamberlain et al., Cancer Res. 56: 2832-2836 (1996); Oertli et al., J. Gen. Virol. 77: 3121-3125 (1996); Qin and Chatterjee, Human Gene Ther. 7: 1853-1860 (1996); McAneny et al., Ann. Surg. Oncol. 3: 495-500 (1996)), or other therapeutic proteins.

[0381] i. Anti-Metastatic Genes

[0382] The oncolytic viruses used in the methods provided herein can encode one more anti-metastatic agents that inhibit one or more steps of the metastatic cascade. In some examples, the viruses provided herein encode one more anti-metastatic agents that inhibit invasion of local tissue. In other examples, the oncolytic viruses used in the methods provided herein encode one more anti-metastatic agents that inhibit intravasation into the bloodstream or lymphatics. In other examples, the oncolytic viruses used in the methods provided herein encode one more anti-metastatic agents that inhibit cell survival and transport through the bloodstream or lymphatics as emboli or potentially single cells. In other examples, the oncolytic viruses used in the methods provided herein encode one more anti-metastatic agents that inhibit cell lodging in microvasculature at the secondary site. In other examples, the oncolytic viruses used in the methods provided herein encode one more anti-metastatic agents that inhibit growth into microscopic lesions and subsequently into overt metastatic lesions. In other examples, the oncolytic viruses used in the methods provided herein encode one more anti-metastatic agents that inhibit metastasis formation and growth within the primary tumor, where the inhibition of metastasis formation is not a consequence of inhibition of primary tumor growth. Anti-metastatic agents can inhibit specific steps in the metastatic cascade or multiple steps in the metastatic cascade.

[0383] An anti-metastatic agent expressed by a virus for use in the methods provided herein that inhibits metastasis of a tumor in one cell type can inhibit metastasis of other types of tumor cells. For example, an anti-metastatic agent expressed by a virus for use in the methods provided herein that inhibits metastasis of breast tumors also can inhibit metastasis of melanoma tumors (Welch et al. J. Natl. Cancer Inst. 95(12):839-841 (2003); Welch et al. J. Natl. Cancer Inst. 91:1351-1353 (1999); Kauffman et al. J. Urol. 169:1122-1133 (2003); Shevde et al., Cancer Lett. 198:1-20 (2003)).

[0384] Anti-metastatic agents expressed by the viruses provided herein can directly or indirectly inhibit one or more steps of the metastatic cascade. Exemplary anti-metastatic agents that can be expressed by the oncolytic viruses used in the methods provided herein include, but are not limited to, the following: BRMS-1 (Breast Cancer Metastasis Suppressor 1), CRMP-1 (Collapsin Response Mediator Protein-1), CRSP-3 (Cofactor Required for Sp1 transcriptional activation subunit 3), CTGF (Connective Tissue Growth Factor), DRG-1 (Developmentally-regulated GTP-binding protein 1), E-Cad (E-cadherin), gelsolin, KAI1, KiSS1 (Kisspeptin 1/Metastin), kispeptin-10, kispeptin-13, kispeptin-14, kispeptin-54, LKB1 (STK11 (serine/threonine kinase 11)), JNKK1/MKK4 (c-Jun-NH2-Kinase Kinase/Mitogen activated Kinase Kinase 4), MKK6 (mitogen activated kinase kinase 6), MKK7 (mitogen activated kinase kinase 7), Nm23 (NDP Kinase A), RASSF1-8 (Ras association (RalGDS/AF-6) domain family members), RKIP (Raf kinase inhibitor protein), RhoGDI2 (Rho GDP dissociation inhibitor 2), SSECKS (src-suppressed C-kinase substrate), Syk, TIMP-1 (Tissue inhibitor of metalloproteinase-1), TIMP-2 (Tissue inhibitor of metalloproteinase-2), TIMP-3 (Tissue inhibitor of metalloproteinase-3), TIMP-4 (Tissue inhibitor of metalloproteinase-4), TXNIP/VDUP1 (Thioredoxin-interacting protein). Such list of anti-metastatic agents is not meant to be limiting. Any gene product that can suppress metastasis formation via a mechanism that is independent of inhibition of growth within the primary tumor is encompassed by the designation of an anti-metastatic agent or metastasis suppressor and can be expressed by a virus as provided herein. One of skill in the art can identify anti-metastatic genes and can construct a virus expressing one or more anti-metastatic genes for therapy.

[0385] Exemplary anti-metastatic agents exist within many different types of cellular compartments and are not limited to any specific type of biomolecule. Anti-metastatic agents that are expressed by the viruses provided herein can localize within a variety of cellular compartments within the infected cell, on the surface of the infected cell and/or secreted by the infected cell. For example, anti-metastatic agents can be cell surface receptors, such as, for example KAI1, E cadherin and CD44; intracellular signaling molecules, such as, for example, MKK4, SSeCKs, Nm23, RhoGDI2, DRG-1, and RKIP; secreted ligands, such as, for example TIMPs and KiSS1, nuclear transcription factors and cofactors, such as, for example BRMS1, TXNIP and CRSP3, and proteins localized to the mitochondria, such as, for example, caspase 8 (Welch et al. J. Natl. Cancer Inst. 95(12):839-841 (2003). Anti-metastatic agents also encompass intracellular signaling molecules including cytoskeletal associated proteins, such as, for example, RhoGDI2 and gelsolin, and cytosolic proteins, such as, for example, JNKK1/MKK4, nm23-H1 and RKIP (see, e.g., Dong et al. Science, 268:884-886 (1995); Yin and Stossel, Nature, 281:583-6 (1979); Shimizu et al. Biochem. Biophys. Res. Commun. 175:199-206 (1991); Boller et al., J Cell Biol. 100:327-332 (1985); Girgrah et al., Neuroreport 2:441-444 (1991); Nash et al., Front Biosci. 11:647-59 (2006); Yeung et al., Nature 401:173-177 (1999); Bosnar et al., Exp. Cell Res. 298:275-284 (2004); Rinker-Schaeffer et al., Clin. Cancer Res. 12:3882-3889 (2006)).

[0386] c. Operable Linkage to Promoter

[0387] Heterologous nucleic acid sequences encoding a therapeutic or reporter protein can be expressed in the viruses by being operably linked to a promoter. The heterologous nucleic acid can be operatively linked to a native promoter or a heterologous (with respect to the virus) promoter. Any promoter known to initiate transcription of an operably-linked open reading frame can be used. The choice of promoter can, however, affect the timing (in relation to viral infection and replication) and the level of the expression of the reporter gene. In some instances, certain requirements exist when operably linking heterologous nucleic acid to the promoter to ensure optimal expression. For example, when a reporter gene is operably linked to a promoter for expression in vaccinia viruses, the heterologous nucleic acid typically does not contain any intervening sequences, such as introns, as the virus does not splice its transcripts. Methods and parameters for operably linking heterologous nucleic acids sequences to promoters for successful expression are well known in the art (see, e.g., U.S. Pat. Nos. 4,769,330, 4,603,112, 4,722,848, 4,215,051, 5,110,587, 5,174,993, 5,922,576, 6,319,703, 5,719,054, 6,429,001, 6,589,531, 6,573,090, 6,800,288, 7,045,313; He et al. (1998) Proc. Natl. Acad. Sci. USA 95(5): 2509-2514; Racaniello et al. (1981) Science 214: 916-919; Hruby et al. (1990) Clin Micro Rev. 3:153-170).

[0388] i. Promoter Characteristics

[0389] The heterologous nucleic acid can be operatively linked to a native promoter or a heterologous (with respect to the virus) promoter. Any suitable promoters, including synthetic and naturally-occurring and modified promoters, can be used. The promoter region includes specific sequences that are involved in polymerase recognition, binding and transcription initiation. These sequences can be cis acting or can be responsive to trans acting factors. Promoters, depending upon the nature of the regulation, can be constitutive or regulated. Regulated promoters can be inducible or environmentally responsive (e.g., respond to cues such as pH, anaerobic conditions, osmoticum, temperature, light, or cell density). Inducible promoters can include, but are not limited to, a tetracycline-repressed regulated system, ecdysone-regulated system, and rapamycin-regulated system (Agha-Mohammadi and Lotze (2000) J. Clin. Invest. 105(9): 1177-1183). Many promoter sequences are known in the art. See, for example, U.S. Pat. Nos. 4,980,285; 5,631,150; 5,707,928; 5,759,828; 5,888,783; 5,919,670, and, Sambrook, et al. Molecular Cloning: A Laboratory Manual, 2nd Ed., Cold Spring Harbor Press (1989). Synthetic promoters also can be generated. Specific cis elements that can function to modulate a minimal promoter, such as one that contains only a TATA box and an initiator sequence, can be identified and used to generate a promoter that is optimized for the intended use (Edelman et al. (2000) Proc. Natl. Acad. Sci. USA 97:3038-3043). Synthetic promoters for the expression of proteins in vaccinia virus are known in the art, and can include various regulatory elements that dictate the expression profile of the protein (such as the stage in the viral life cycle at which the protein is expressed), and/or enhance expression (see e.g., Pfleiderer et al. (1995) J Gen Virol. 76:2957-2962, Hammond et al. (1997) J Virol Methods. 66:135-138, Chakrabarti et al. (1997) BioTechniques 23:1094-1097). Synthetic promoters also include chemically synthesized promoters, such as those described in U.S. Pat. Pub. No. 2004/0171573.

[0390] Promoters that are responsive to external factors, either directly or indirectly, can be selected for use. External factors can include, for example, drugs and inhibitors, such as chemotherapeutic drugs. In one example, the heterologous nucleic acid, such as that which encodes a reporter protein, is operably linked to a promoter that is sensitive to one or more chemotherapeutic drugs. That is, the expression of the heterologous protein from the promoter is inhibited by the chemotherapeutic agent. In another example, the heterologous nucleic acid, such as that which encodes a reporter protein, is operably linked to a promoter that is resistant to one or more chemotherapeutic drugs. That is, the expression of the heterologous protein from the promoter is unaffected by the chemotherapeutic agent. Such a promoter can be of any origin, including mammalian or viral, and be natural or synthetic.

[0391] Promoters also can be selected for use on the basis of the relative expression levels that they initiate. Strong promoters are those that support a relatively high level of expression, while weak promoters are those that support a relatively low level of expression. For example, the vaccinia virus synthetic early/late and late promoters are relatively strong promoters, whereas vaccinia synthetic early, P7.5 k early/late, P7.5 k early, and P28 late promoters are relatively weaker promoters (see e.g., Chakrabarti et al. (1997) BioTechniques 23(6) 1094-1097).

[0392] ii. Viral and Host Factors

[0393] Expression of heterologous proteins can be influenced by one or more proteins or molecules expressed by the virus, or one or more factors expressed by the host. For example, various viral transcription factors can bind other proteins or to the promoter sequence to initiate transcription, or various host factors can interact with one or more regions in the promoter sequence, or with one or more other factors, to initiate transcription. The expression or availability of these molecules and proteins can dictate, for example, level of expression, or the timing of expression, of the heterologous protein under the control of the promoter with which the factors interact.

[0394] In one example, the expression of a heterologous protein, such as a reporter protein, from a virus can be controlled temporally by using a promoter that requires interaction with one or more host or viral factors that are expressed, or are available, at a particular stage of the viral life cycle, to initiate transcription. Vaccinia virus coordinates its progression through its replicative cycle by expressing individual proteins at specific times. The temporal regulation of gene expression is controlled at the level of transcriptional initiation, and occurs through a cascade. The transcription factors required for intermediate genes are expressed as early proteins, factors required for late genes are intermediate gene products and the late genes products are packaged into the virions and act as transcription factors for early genes. For example, the vaccinia virus early transcription factor (ETF), which is a dimer made from the products of two late genes, interacts with two regions of the early promoters and recruits the RNA polymerase to the site of transcription. Initiation of transcription results in the synthesis of the early genes within minutes of viral entry into the cell, and is independent of de novo protein synthesis because ETF and the RNA polymerase are already present in the virion. In some instances, genes are expressed continuously, which can be achieved by a tandem arrangement of early and intermediate or late promoters operably linked to the open reading frame (Broyles et al. (1986) Proc. Natl. Acad. Sci. USA 83:3141-3145, Ahn et al. (1990) Mol Cell Biol. 10:5433-5441).

[0395] Nearly all viruses, including, but not limited to, poxviruses (including vaccinia virus), adenoviruses, herpesviruses, flaviviruses and caliciviruses link the switch from early to late gene expression to genome replication. The intermediate genes are expressed immediately post-replication, followed closely thereafter by transcription of the late genes. In the absence of nucleic acid synthesis, transcriptional switch does not occur. Because of this regulated expression, inhibition of genome synthesis by, for example, the addition of inhibitors of nucleic acid synthesis such as cytosine arabinoside (Ara-C), results in the inhibition of intermediate and late gene transcription (Vos et al. (1988) EMBO J. 7:3487-3492, Kao et al. (1987) Virology 159:399-407). Therefore, operably linking a heterologous gene to a viral intermediate or late promoter links its expression in the virally-infected host to certain stages of the viral life cycle i.e., after DNA replication. In contrast, operably linking a heterologous gene to a viral early promoter results in its expression immediately following viral entry into the host cell. By selecting the appropriate promoter, a reporter protein can therefore be used to reflect transcriptional activity at various stages of the viral life cycle, which can be linked to multiple viral and/or host factors, and/or external factors, such as drugs and inhibitors.

[0396] iii. Exemplary Promoters

[0397] Exemplary promoters include synthetic promoters, including synthetic viral and animal promoters. Native promoters or heterologous promoters include, but are not limited to, viral promoters, such as vaccinia virus and adenovirus promoters. Vaccinia viral promoters can be synthetic or natural promoters, and include vaccinia early, intermediate, early/late and late promoters. Exemplary vaccinia viral promoters for use in the methods can include, but are not limited to, P7.5 k, P11k, PSL, PSEL, PSE, H5R, TK, P28, C11R, G8R, F 17R, I3L, I8R, A1L, A2L, A3L, H1L, H3L, H5L, H6R, H8R, D1R, D4R, D5R, D9R, D11L, D12L, D13L, M1L, N2L, P4b or K1 promoters. Other viral promoters can include, but are not limited to, adenovirus late promoter, Cowpox ATI promoter, T7 promoter, adenovirus late promoter, adenovirus E1A promoter, SV40 promoter, cytomegalovirus (CMV) promoter, thymidine kinase (TK) promoter, or Hydroxymethyl-Glutaryl Coenzyme A (HMG) promoter.

[0398] In some examples, it can be desirable to choose promoters that initiate expression at particular time points in the viral life cycle. An exemplary vaccinia early promoter is a synthetic early promoter (PSE), which typically initiates gene expression from 0-3 hours post infection. Exemplary vaccinia late promoters include, but are not limited to, a vaccinia 11k promoter (P11k) and a synthetic late promoter (PSL), which typically initiate gene expression 2-3 hours post-infection. Exemplary promoters in vaccinia virus that are expressed throughout the life cycle include tandem arrangements of vaccinia early and intermediate or late promoters (see e.g., Wittek et al. (1980) Cell 21: 487-493; Broyles and Moss (1986) Proc. Natl. Acad. Sci. USA 83: 3141-3145; Ahn et al. (1990) Mol. Cell. Biol. 10: 5433-54441; Broyles and Pennington (1990) J. Virol. 64: 5376-5382). Exemplary vaccinia early/late promoters that express throughout the vaccinia life cycle include, but are not limited to, a 7.5K promoter (P7.5 k) and a synthetic early/late promoter (PSEL).

[0399] In some examples, it can be desirable to choose a promoter of a particular relative strength. For example, in vaccinia, synthetic early/late PSEL and many late promoters (e.g., P11k and PSL) are relatively strong promoters, whereas vaccinia synthetic early, PSE, P7.5 k early/late, P7.5 k early, and P28 late promoters are relatively weak promoters (see e.g., Chakrabarti et al. (1997) BioTechniques 23(6) 1094-1097).

[0400] 3. Further Modifications of Oncolytic Viruses

[0401] The viruses used in the methods provided herein can be further modified. Such modifications can, for example, enhance the ease with which the methods are performed, reduce the time taken to perform the methods, provide conditions of increased safety or suitability for administration, compared to unmodified viruses. Such characteristics can include, but are not limited to, attenuated pathogenicity, reduced toxicity, increased or decreased replication competence, increased, decreased or otherwise altered tropism, increased or decreased sensitivity to drugs, such as nucleoside analogs and any combination thereof. The viruses used in the methods provided herein can be modified by any known method for modifying a virus. For example, the viruses can be modified to express one or more heterologous genes. The heterologous genes can be expressed under the control of endogenous viral promoters, or exogenous (i.e., heterologous to the virus) promoters, including synthetic promoters.

[0402] Oncolytic viruses have been genetically altered to attenuate their virulence, to improve their safety profile, enhance their tumor specificity, and they have also been equipped with additional genes, for example cytotoxins, cytokines, prodrug converting enzymes to improve the overall efficacy of the viruses (see, e.g., Kirn et al., (2009) Nat Rev Cancer 9:64-71; Garcia-Aragoncillo et al., (2010) Curr Opin Mol Ther 12:403-411; see U.S. Pat. Nos. 7,588,767, 7,588,771, 7,662,398 and 7,754,221 and U.S. Pat. Publ. Nos. 2007/0202572, 2007/0212727, 2010/0062016, 2009/0098529, 2009/0053244, 2009/0155287, 2009/0117034, 2010/0233078, 2009/0162288, 2010/0196325, 2009/0136917 and 2011/0064650.

[0403] The modifications can be effected by any method known in the art, and can be introduced into the virus before, after, simultaneously, or in the absence of, the introduction one or more reporter genes. In certain examples, the virus is modified to attenuate pathogenicity. In some examples, it can be desirable to generate a more attenuated virus. A more attenuated virus can be more suitable for in vivo administration and in in vitro assays, providing a safer environment for laboratory personnel and reducing the laboratory biosafety requirements. Attenuation of the virus can be effected by modification of one or more viral genes, such as by a point mutation, a deletion mutation, an interruption by an insertion, a substitution or a mutation of the viral gene promoter or enhancer regions. In such instances, it is advantageous to first identify a target gene involved in pathogenicity, although random mutagenesis can result in attenuation of the virus. The target genes also are typically non-essential, such that the ability of the virus to propagate without the need of a packaging cell lines is preserved when the genes are not expressed, or expressed at decreased levels. In viruses such as vaccinia virus, mutations in non-essential genes, such as the thymidine kinase (TK) gene or hemagglutinin (HA) gene have been employed to attenuate the virus (e.g., Buller et al. (1985) Nature 317, 813-815, Shida et al. (1988) J. Virol. 62(12):4474-80, Taylor et al. (1991) J. Gen. Virol. 72 (Pt 1):125-30, U.S. Pat. Nos. 5,364,773, 6,265,189, 7,045,313). The inactivation of these genes decreases the overall pathogenicity of the virus without eliminating the ability of the viruses to replicate in certain cell types.

[0404] Attenuation also can be effected without eliminating or reducing the expression of one or more particular genes involved in pathogenicity. For example, increasing the number of genes that the virus expresses can cause competition for viral transcription and/or translation factors, which can result in changes in expression of endogenous viral genes. Such changes can affect viral processes involved in viral replication, thus contributing to the attenuation of the virus. For example, viral processes, such as viral nucleic acid replication, transcription of other viral genes, viral mRNA production, viral protein synthesis, or virus particle assembly and maturation, can be affected. Insertion of gene expression cassettes that require binding of host factors for efficient transcription can be used to compete the transcription and/or translation factors away from the endogenous viral promoters and transcripts. For example, insertion of gene expression cassettes that contain vaccinia strong late promoters into vaccinia virus can be used to attenuate expression of endogenous vaccinia late genes.

[0405] Viruses provided herein also can contain a modification that alters its infectivity or resistance to neutralizing antibodies. In one non-limiting example deletion of the A35R gene in an vaccinia LIVP strain can decrease the infectivity of the virus. In some examples, the viruses provided herein can be modified to contain a deletion of the A35R gene. Exemplary methods for generating such viruses are described in PCT Publication No. WO2008/100292, which describes vaccinia LIVP viruses GLV-1j87, GLV-1j88 and GLV-1j89, which contain deletion of the A35R gene.

[0406] In another non-limiting example, replacement of viral coat proteins (e.g., A34R, which encodes a viral coat glycoprotein) with coat proteins from either more virulent or less virulent virus strains can increase or decrease the clearance of the virus from the subject. In one example, the A34R gene in an vaccinia LIVP strain can be replaced with the A34R gene from vaccinia IHD-J strain. Such replacement can increase the extracellular enveloped virus (EEV) form of vaccinia virus and can increase the resistance of the virus to neutralizing antibodies.

### E. APPLICATIONS OF THE METHOD

[0407] 1. Assessment and Modification of Treatment and Selection of Viruses and Subjects for Therapy

[0408] The methods provided herein for detection of tumor inflammation induced by oncolytic viruses using PFC imaging agents can be employed for a variety of applications including, but not limited to, detection of oncolytic virus localization to a tumor following administration, such as systemic administration to a tumor bearing subject, detection of virus replication in a tumor, identification of subject for therapy with an oncolytic virus, selection of oncolytic viruses for therapy, and monitoring therapy with an oncolytic virus. Because the PFC imaging agents are rapidly taken up by macrophages at the tumor or that are recruited to the tumor, the methods provided herein provided a quick and relatively easy assessment of whether the oncolytic virus has infected the tumor.

[0409] In some examples, the level of PFC accumulation in the tumor can be quantified and compared to a control a control or reference sample or database of values corresponding to a known level of tumor inflammation. One of skill in the art can establish objective threshold values for determining whether induction of tumor inflammation as a result if virus infection has occurred. In some examples, infection of the tumor is established by the analyzing the pattern of PFC accumulation (e.g. at the tumor periphery).

[0410] As shown in the Examples provided, the accumulation of PFC following virus infection was mainly at the tumor periphery in contrast to the diffuse localization throughout the tumor prior to infection. This distinct change in PFC localization allows one of skill in the art to track the tumor inflammatory response before and after infection and provides a reliable way to confirm whether infection of the tumor has occurred. In addition the strong peripheral localization can be employed to detect and monitor changes in tumor size and morphology.

[0411] In practicing the methods, treatment can be modified in accord with the results achieved. For example, if an oncolytic virus is administered to a subject and tumor infection is detected using the methods provided, then the oncolytic therapy can be continued. For example, additional doses of the oncolytic virus can be administered or additional cycles of treatment can be performed. If virus infection is not detected, treatment can be discontinued or modified. For example, an additional dose can be administer at the same dosage or a higher dosage, a different oncolytic virus can be administered, or oncolytic virus can be administered in combination with one or more anticancer agents. In some examples, if virus infection is detected using the methods provided, the subject is selected as a candidate to treatment with the particular oncolytic virus.

[0412] As described herein, in some examples, the oncolytic virus is first administered at a dose that is lower than the therapeutic dose in order to assess whether the virus infects the tumor. If the virus infection is detected, then a therapeutic dose of the virus can be administered. Exemplary doses for administration and cycles of treatment are provided elsewhere herein.

[0413] In some examples, the methods provided herein are employed to select a particular oncolytic virus treatment. Infection of the tumor is an indicator that the virus will be effective for treatment of the tumor. If virus infection is detected using the methods provided, then the oncolytic virus can be selected as a candidate for therapy of the tumor. In some examples, if virus infection is detected using the methods provided, the oncolytic virus can be selected as a candidate for therapy of a particular type of cancer or a particular type of tumor.

[0414] In some examples, the oncolytic virus is administered in combination one or additional anti-cancer agents. Additional exemplary anticancer agents that can be administered for cancer therapy in the methods provided include, but are not limited to, chemotherapeutic compounds (e.g., toxins, alkylating agents, nitrosoureas, anticancer antibiotics, antimetabolites, antimitotics, topoisomerase inhibitors), cytokines, growth factors, hormones, photosensitizing agents, radionuclides, signaling modulators, anticancer antibodies, anticancer oligopeptides, anticancer oligonucleotides (e.g., antisense RNA and siRNA), angiogenesis inhibitors, radiation therapy, or a combination thereof. Exemplary chemotherapeutic compounds include, but are not limited to, Ara-C, cisplatin, carboplatin, paclitaxel, doxorubicin, gemcitabine, camptothecin, irinotecan, cyclophosphamide, 6-mercaptopurine, vincristine, 5-fluorouracil, and methotrexate. As used herein, reference to an anticancer or chemotherapeutic agent includes combinations or a plurality of anticancer or chemotherapeutic agents unless otherwise indicated. Anticancer agents include anti-metastatic agents.

[0415] The methods provided herein can be used in combination with one or more additional methods for detecting or monitoring a cancer or tumor or monitoring an anti-cancer therapy. For example, a tumor or metastasis can be detected by physical examination of subject, laboratory tests, such as blood or urine tests, imaging and genetic testing, such as testing for gene mutations that are known to cause cancer. A tumor or metastasis can be detected using in vivo imaging techniques, such as digital X-ray radiography, mammography, CT (computerized tomography) scanning, MRI (magnetic resonance imaging), ultrasonography and PET (positron emission tomography) scanning. Alternatively, a tumor can be detected using tumor markers in blood, serum or urine, that is, by monitoring substances produced by tumor cells or by other cells in the body in response to cancer. For example, prostate specific antigen (PSA) levels are used to detect prostate cancer in men. Additionally, tumors can be detected and monitored by biopsy.

[0416] Any of a variety of monitoring steps can be used to monitor an anti-cancer therapy, including, but not limited to, monitoring tumor size, monitoring anti-(tumor antigen) antibody titer, monitoring anti-virus antibody titer, monitoring the presence and/or size of metastases, monitoring the subject's lymph nodes, monitoring the subject's weight or other health indicators including blood or urine markers, monitoring expression of a detectable gene product, and monitoring titer of the oncolytic reporter virus, in a tumor, tissue or organ of a subject.

[0417] 2. Application of the Methods to Tumor Therapies with Other Microorganisms

[0418] Other microorganisms such and yeast and bacteria also have been shown to preferentially accumulate in tumor tissues and can effect tumor treatment and detection imaging and monitoring of tumors (see, e.g. U.S. Patent Application Pub. Nos. US 2004/0234455, US 2005/0031643, US 2008/0193373, and U.S. Pat. No. 7,514,089). Introduction of such microorganisms also induces a potent inflammatory response at the tumor (Patyar et al. (2010) Journal of Biomedical Science 17:21). Previous studies shown that the inflammatory response in infection models, such as in models of Staphylococcus aureus infection, can be visualized using ¹⁹F imaging of intravenously administered PFCs (Hertlein et al. (2010) PLoS ONE 6(3):e18246).

[0419] Accordingly, the methods provided herein can be employed for the detection of inflammation induced anti-tumor therapies with other microorganisms in addition to the oncolytic virus therapies described herein. The methods provided herein for administration of PFC imaging agents in combination with oncolytic viruses can be modified accordingly and applied to methods of administration of PFC imaging agents in combination with other microorganisms, such as bacteria. Methods for administration of microorganisms for tumor diagnosis and treatment are known in the art and can be combined with the methods herein for detection of tumor inflammation induced by the microorganism. Exemplary microorganisms for tumor therapy include bacteria, particularly attenuated or non-pathogenic bacteria, including a mutual, commensal or probiotic strain of bacteria or an attenuated pathogenic bacterium. Strains of bacteria include, but are not limited to, bacteria selected from among Escherichia coli, Bacteroides, Eubacterium, Streptococcus, Actinomyces, Veillonella, Nesseria, Prevotella, Campylobacter, Fusobacterium, Eikenella, Porphyromonas, Priopionibacteria, Clostridia, Salmonella, Shigella, Bifidobacteria and Staphylococcus species. Exemplary E. coli bacteria include the probiotic E. coli bacterium, Nissle, such as Nissle 1917.

[0420] 3. Methods of Tracking Inflammation Using Cells Labeled with PFC Imaging Agents

[0421] In some examples, the recruitment of immune cells to active sites of inflammation can be detected and monitored by administered to the tumor-bearing subject cells that are labeled ex vivo with the PFC imaging agent and then administered to the subject. Methods of labeling selected cell populations, such as dendritic cells, monocytes, macrophages and antigen specific T cells, with PFC imaging agents, including PFC emulsions, are known in the art. Exemplary methods are described, for example, in U.S. Patent Pub. App. Nos. US 2008/0292554, US 2007/0253910, US 2011/0110863, and US 2009/0263329; Waiczes et al. (2011) PLoS ONE 6(7):e21981, Ahrens et al. (2005) Nat Biotechnol 23(8):983-987, Noth et al. (1997) Artif Cell Blood Sub 25(3):243-254, and Srinivas et al. (2009) Magn. Reson. Med. 58:725-734). In some examples, the PFC imaging agents are taken up by the cells by co-culturing the cells with the PFC emulsion. In some examples, the PFC contains one or more agents that promote the uptake of the PFC emulsion by the cells, such as, for example, cationic molecules, such as, for example, cationic lipids, cationic polymers, protamine sulfate and polyethyleneimine (PEI). In some examples, the PFC imaging agents are taken up by the cells using electroporation or magnetoelectroporation. Studies have shown that cell electroporation and magnetoelectroporation are effective for MRI in cell culture, including uptake by dendritic cells (Walczak P. (2005) Magn Reson Med. 54(4):769-74) and U.S. provisional application No. 60/792,003). After labeling, cells can be immediately administered, stored, further cultured, enriched, segregated, processed in way that is not incompatible with the intended use of the cells.

[0422] In exemplary methods, the immune cells are contacted with the PFC imaging agent ex vivo and then administered to the subject. In some examples, the cells are administered to the blood stream, such as by intravenous administration. The migration of the cells and recruitment to the tumor can then be monitored and imaged by ¹⁹F MRI as described herein. The cells for use in the method can be cells obtained from a donor, such as the subject, or can be cultured or engineered cells for administration. The cells can be administered prior to, at same time as, or following infection of the subject with the oncolytic virus. In some examples, the cells are administered and the tumor is imaged prior to infection with the oncolytic virus and then imaged following virus infection. In some examples, the tumor is imaged at multiple time points following virus infection. The methods provided herein for administration of PFCs emulsions in combination with oncolytic viruses, including parameters for administration and dosages for virus administration and detection and imaging the accumulation of PFCs by ¹⁹F magnetic resonance methods, can be modified accordingly and applied to methods of administration of PFC labeled cells in combination with the virus.

[0423] In some examples, the amount of PFC per cell can be quantified prior to administration to the subject. Following administration that amount of signal at the tumor can be quantified and correlated with the amount of cells recruited to a tumor. Such methods provide a measure of the degree of tumor inflammation. Exemplary methods for quantification of cells labeled with PFC imaging agent prior to and following administration to a subject are known in the art and include, for example, methods described in U.S. Patent Pub. No. US 2009/0074673.

[0424] 4. Therapy of Tumors Using Ultrasonic Release of Therapeutic Agents

[0425] Perfluorocarbon imaging agents for use in the methods provided herein also can be employed for the therapy of tumors. (U.S. Patent Application No. 2010/0178305) The nanoemulsions provided herein can contain one or more therapeutic agents for delivery to tumor. In some examples, the PFC nanoemulsion containing one or more therapeutic agents is delivered to a subject having a tumor, wherein the one or more therapeutic agents is released from the nanoemulsion at the site of the tumor. In some examples, the one or more therapeutic agents is released at the site of the tumor using ultrasonic radiation. In some examples, the PFC nanoemulsion contains a therapeutic agent that is an anti-cancer agents, such as a chemotherapeutic agent.

### F. COMBINATIONS, KITS, AND ARTICLES OF MANUFACTURE

[0426] Oncolytic viruses, perfluorocarbon (PFC) imaging agents and reagents, materials and devices for detecting accumulation of PFCs or expression of reporter gene encoded by the virus in vivo or ex vivo and combinations thereof, can be provided as combinations of the agents, which optionally can be packaged as kits. In non-limiting examples, an oncolytic virus can be provided in combination with a PFC imaging agent. In other non-limiting examples, an oncolytic virus and/or PFC imaging agent can be provided in combination with reagents for additional analysis of tumor tissue, such as for example, reagent to measure one or more additional tumor cell markers or immune cell markers. For example, a kit can include reagents to fix, permeabilize, stain, or lyse tumor cells or tissues, reagents for amplification of nucleic acid, antibodies for immunohistochemical analysis and/or primers for RT-PCR or qPCR.

[0427] Kits can optionally include one or more components such as instructions for use, additional reagents such as diluents, culture media, substrates, antibodies and ligands, and material components, such as sample collection devices, microscope slides, tubes, microtiter plates (e.g., multi-well plate) and containers for practice of the methods. Those of skill in the art will recognize many other possible containers and plates that can be used for contacting the various materials.

[0428] Exemplary kits can include reagents used in detection of expression of a reporter gene by the virus. Such reagents can include one or more substrates for detection of a reporter enzyme. In some examples, the kit includes a device, such as a fluorometer, luminometer, or spectrophotometer for assay detection.

[0429] In some examples, the oncolytic viruses can be supplied in a lyophilized form, and the kit can optionally include one or more solutions for reconstitution of the virus. In a further example, the lyophilized viruses can be supplied in the kit in appropriate amounts in the wells of one or more microtiter plates or sample tubes.

[0430] In some examples, a kit can contain instructions. Instructions typically include a tangible expression describing the virus and, optionally, other components included in the kit, and methods for assay, including methods for preparing and administering the virus, methods for administration and detection of PFCs, methods for preparing tumor samples, or methods for detection of reporter proteins expressed by the viruses.

[0431] The articles of manufacture provided herein can contain the viruses and/or PFC imaging agents and packaging materials. Packaging materials for use in packaging products are known to those of skill in the art. See, e.g., U.S. Pat. Nos. 5,323,907, 5,052,558 and 5,033,252. Examples of packaging materials include, but are not limited to, blister packs, bottles, tubes, bags, vials, containers, and any packaging material suitable for a selected formulation and intended use. Articles of manufacture include a label with instructions for use of the packaged material.

[0432] One of skill in the art will appreciate the various components that can be included in a kit, consistent with the methods and systems disclosed herein.

### G. EXAMPLES

[0433] The following examples are included for illustrative purposes only and are not intended to limit the scope of the claims or disclosure herein.

### Example 1

### Imaging Tumor Colonization with Vaccinia Virus GLV-1h68 in a Melanoma Tumor Model by ¹⁹F MRI

[0434] In this example, tumor inflammation induced by intravenous administration of a oncolytic vaccinia virus in a melanoma tumor model was detected and monitored in vivo by administration of a ¹⁹F labeled perfluorocarbon and detection by ¹H/¹⁹F 3D magnetic resonance imaging (MRI). Anatomical spatial ¹⁹F patterns of vaccinia virus treated mice were obtained by overlay of the ¹H anatomical MRI images with the ¹⁹F MRI signal images. Vaccinia virus infected mice were compared to non-infected mice to monitor the effect of vaccinia virus treatment on the recruitment of inflammatory cells to a tumor. Ex vivo ¹⁹F MRI and immunohistochemistry were performed to verify in vivo results. The vaccinia virus GLV-1h68 employed in this study encodes a Renilla luciferase-green fluorescent protein fusion protein (Ruc-GFP), useful for imaging infected tumor cells.

### A. Materials and Methods

[0435] Human 1936-MEL melanoma cells from temporally distinct cutaneous metastases were derived as previously described (Sabatino et al. (2008) Cancer Res. 68:222-231). The cells were cultured in RPMI supplemented with 10% FBS, 1 mM HEPES, 1 mM Ciprofloxacin and L-glutamine/penicillin/streptomycin and maintained at 37° C. under 5% CO₂.

[0436] 1936-MEL cells (7×10⁵ cells) were implanted on day 0 on the right limb of 6-8 week old athymic nude mice (NCI:Hsd:Athymic Nude-Foxn1^{nu}, Harlan) to generate subcutaneous xenograft tumors. Nine (9) days after tumor implantation, 1×10⁷ pfu (in 100 μl) of the attenuated vaccinia virus (VACV) strain GLV-1h68 (see U.S. Pat. No. 7,588,767; SEQ ID NO: 1) was injected intravenously into tumor-bearing animals (n=3). Control animals were injected with the same volume of PBS (n=3). At days 13 and 15 following tumor cell implantation (i.e. 4 and 6 days, respectively, following virus injection or PBS injection), a perfluoro-15-crown-5-ether PFC emulsion (20% v/v, mean droplet diameter 145 nm, 100 μl each injection; V-Sense 1000H, Celsense Inc., Pittsburgh, Pa.) was administered intravenously.

[0437] Magnetic resonance imaging (MRI) was performed using a 7 Tesla Bruker Biospec System (Bruker BioSpin GmbH, Reinstetten, Germany) at room temperature small animal scanner and a home-built birdcage coil (inner diameter=40 mm, length=64 mm) adjustable to ¹H and ¹⁹F resonance frequencies. In vivo ¹H 3D turbo-spin-echo (TSE) and ⁹F 3D TSE experiments were performed 17 days after tumor cell implantation (i.e. 8 days following virus injection or PBS injection). Prior to imaging, the animals were anesthetized with isoflurane at 2% over 2-3 hr in a tube-like container. In vivo MRI parameters employed were as follows:

[0438] For ¹H 3D TSE imaging: echo time (TE)=30 milliseconds (ms), repetition time (TR)=1000 ms, matrix (MTX)=100×150×125, Resolution (Res)=0.2 mm³, turbo factor (TF)=10, number of averages (NA)=1;

[0439] For ¹⁹F 3D TSE imaging: TE=4 ms TR=1000 ms, MTX=40×48×32, Res=0.625 mm³, TF=48, NA=60).

[0440] After in vivo MRI, mice were sacrificed and tumors excised. The excised tumors were fixed overnight in 4% paraformaldehyde in PBS and washed twice in PBS. Specimens of approximately 5-15 mm diameter were embedded in 10% Sucrose/PBS with 5% w/v low-melt Agarose. Ex vivo ¹H/¹⁹F 3D TSE was performed on the samples using the following parameters:

[0441] For ¹H 3D TSE imaging: TE=81 ms, TR=1000 ms, MTX=300×200×200, Res=0.2 mm³; TF=20, NA=1;

[0442] For ¹⁹F 3D TSE imaging: TE=5 ms, TR=1000 ms, MTX=48×64×64, Res=0.625 mm³, TF=64, NA=60.

[0443] After ex vivo MRI, the tumors were cut out of the Agarose and dehydrated overnight in 30% w/v Sucrose/PBS. Tumors were embedded for cryosectioning in Tissue-TEK and stored at −80° C.

[0444] For immunohistochemistry, the excised tumors were cryo-sectioned into 15 μm slices. Tissue sections were fixed in ice-cold acetone for 10 min. Monocytes and tissue macrophages were labeled with anti-CD68 antibodies (KP-1; Abeam®). Neutrophils were labeled with anti-Ly-6G antibodies (BDBiosciences). For secondary antibody labeling sections were labeled with donkey-anti-rat Cy3 (Jackson ImmunoResearch). The labeled tissue sections were analyzed using stereo-fluorescence microscopy (LeicaMZ16FA). Infection of tumor cells by GLV-1h68 also was visualized by fluorescence imaging of the GFP encoded by GLV-1h68 and expressed by the infected tumor cells.

### B. Results

[0445] Both VACV injected and PBS injected animals exhibited ¹⁹F signal located in the tumor by MRI. In PBS injected animals, the ¹⁹F signal was often spread out throughout the entire tumor with low signal intensity. In VACV injected animals, the ¹⁹F signal was located with high signal intensity mainly at the tumor margins. Ex vivo imaging of the VACV injected animals also showed ¹⁹F high signal intensity mainly at the tumor periphery. The distribution of the ¹⁹F MRI signal corresponded well to the strong histological staining pattern of macrophages (CD68) and neutrophils (Ly-6G), which were found mostly at the tumor margins. Detection of GFP expression in the tumor sections confirmed infection of the tumor cells by the VACV.

[0446] These results demonstrate that intravenous administration of VACV to tumor-bearing animals results in virus infection of the tumor and induces a massive inflammation characterized by accumulation of CD68-positive macrophages and Ly-6G-positive neutrophils at the tumor periphery. A similar signal pattern was detected by in-vivo and ex vivo ¹⁹F MRI indicating that intravenously administered PFC is taken up by macrophages that are recruited to the tumor, which is significantly enhanced by oncolytic virus infection. Thus, the results indicate that ¹⁹F labeled PFC emulsions can be administered systemically for noninvasive detection of oncolytic virus-induced immune cell recruitment at the tumor.

[0447] In PBS-injected controls, accumulation of the PFC in the tumor may be caused by the resident macrophage population in combination with the tumor specific enhanced permeability and retention (EPR) effects (see Fang et al. (2011) Adv. Drug Delivery Reviews 63:136-151). ¹⁹F signal has previously been found in well perfused tumor regions following intravenous injection of PFC emulsions (see Yu et al. (2005) Current Medicinal Chemistry 12:819-848).

[0448] Since modifications will be apparent to those of skill in this art, it is intended that this invention be limited only by the scope of the appended claims.

1. A method for detecting or imaging tissues infected by an oncolytic virus, comprising:
administering an oncolytic virus to a subject;
administering an agent for detection of macrophages or inflammatory cells in a subject;
detecting or imaging the accumulation of macrophages or inflammatory cells in a subject, wherein accumulation of the agent in tissues comprising macrophages or inflammatory cells indicates that the oncolytic virus has infected tissues comprising the macrophage or inflammatory cells, thereby detecting or imaging the cells infected by the oncolytic virus.

2. The method of claim 1, wherein the agent detects macrophages.

3. The method of claim 1, wherein:
the subject has a tumor; and
detection of the macrophages or inflammatory cells detects or images cells infected by the oncolytic virus, thereby detecting or imaging tumor cells or tissue in the subject.

4. The method of claim 1, further comprising repeating the method a plurality of times, whereby the progress of oncolytic therapy is monitored by periodically imaging or detecting the macrophages to detect or image changes in the profile of accumulated macrophages and thereby monitor therapy.

5. The method of claim 1, wherein the oncolytic virus does not encode any heterologous proteins for detection of the virus or heterologous proteins that induce a detectable signal.

6. The method of claim 1, wherein the virus is a clonal strain of a virus so that it does not encode any heterologous non-viral gene products.

7. The method of claim 1, wherein the virus encodes a therapeutic protein.

8. The method of claim 7, wherein the therapeutic protein is a protein for treating tumors.

9. The method of claim 4, wherein monitoring assesses whether the therapy is effective by detecting an increase in infected cells within a predetermined time after administration of the virus, wherein the time is sufficient for the oncolytic virus to infect tumor cells.

10. The method of claim 9, wherein the predetermined time is less than 24 days.

11. The method of claim 10, wherein accumulation of the agent in the tumor is indicative that the oncolytic virus treatment is or will be efficacious.

12. The method of claim 1, wherein the agent is detected or imaged in vivo in the subject or is detected ex vivo in a tumor biopsy sample or body fluid sample from the subject.

13. The method of claim 1, wherein the agent is detected or imaged by magnetic resonance imaging (MRI) or magnetic resonance spectroscopy (MRS).

14. The method of claim 1, wherein the imaging agent is administered at a predetermined time prior to the administration of the oncolytic virus or at a predetermined time following the administration of the oncolytic virus.

15. The method of claim 14, wherein the agent is administered 1 hour, 2 hours, 3 hours, 4 hours, 6 hours, 12 hours, 18 hours, 24 hours, 2 days, 3 days, 4 days, 5 days, 6 days, 7 days, 8 days, 9 days, 10 days, 11 days, 12 days, 13 days, 14 days, 3 weeks 4 weeks, 1 month following the administration of the oncolytic virus.

16. The method of claim 1, wherein the agent is administered at the same time as the oncolytic virus or sequentially or intermittently with the virus.

17. The method of claim 1, wherein the agent is detected or imaged at least 1 hour, 2 hours, 4 hours, 6 hours, 12 hours, 18 hours, 24 hours, 30 hours, 36 hours, 42 hours, or 48 hours following the administration of the imaging agent.

18. The method of claim 1, wherein the virus is administered at a dosage for treatment of a tumor or cancer.

19. The method of claim 1, wherein the agent is administered intravenously.

20. The method of claim 1, wherein the oncolytic virus is administered systemically.

21. The method of claim 20, wherein the oncolytic virus is administered by intravenous, intraarterial, intratumoral, endoscopic, intralesional, intramuscular, intraperitoneal, intradermal, intraperitoneal, intravesicular, intraarticular, intrapleural, percutaneous, subcutaneous, oral, parenteral, intranasal, intratracheal, inhalation, intracranial, intraprostatic, intravitreal, topical, ocular, vaginal, or a rectal route of administration.

22. The method of claim 1, wherein the virus is administered a plurality of times and the agent is detected or imaged at a predetermined time after each successive administration of the virus in a cycle of administration.

23. The method of claim 1, wherein the agent for detection of macrophage or inflammatory cells is an imaging agent containing a perfluorocarbon.

24. The method of claim 23, wherein the agent is a perfluorocarbon selected from among a linear perfluorocarbon, branched perfluorocarbon, and cyclic perfluorocarbon.

25. The method of claim 23, wherein agent is a perfluorocarbon imaging agent that contains a perfluorocarbon selected from among a perfluoropolyether, perfluoro crown ether, perfluoroalkane, perfluoropentane, perfluorohexane, perfluorononane, perfluorohexyl bromide, perfluorooctyl bromide, perfluorooctane, perfluorodecalin, perfluorocycloalkane, perfluoro amine, and mixtures thereof.

26. The method of claim 1, wherein the agent is a perfluorocarbon imaging agent that contains two or more perfluorocarbons.

27. The method of claim 1, wherein the agent is a perfluorocarbon imaging agent that is a perfluoroalkyl ether.

28. The method of claim 1, wherein the agent is a perfluorocarbon imaging agent that is perfluoro-15-crown-5-ether.

29. The method of claim 1, wherein the agent is a perfluorocarbon imaging agent that contains a poly(ethylene oxide) block copolymer.

30. The method of claim 29, wherein the poly(ethylene oxide) block copolymer is a poly(ethylene oxide)-polyester block copolymer.

31. The method of claim 30, wherein the poly(ethylene oxide) block copolymer is selected from among poly(ethylene oxide)-block-poly(ε-caprolactone) copolymer, poly(ethylene oxide)-block-(L) polylactide copolymer, poly(ethylene oxide)-block-(D) polylactide copolymer, poly(ethylene oxide)-block-(D,L) polylactide copolymer, and combinations thereof.

32. The method of claim 31, wherein the poly(ethylene oxide) block copolymer is a poly(ethylene oxide)-polyether block copolymer or is a polyethylene-polyether tri-block copolymer or is a poly(ethylene oxide)-polypropylene oxide)-poly(ethylene oxide) (PEO-PPO-PEO) tri-block copolymer.

33. The method of claim 23, wherein the agent is formulated as an emulsion.

34. The method of claim 1, wherein the agent contains a targeting moiety targeting it to macrophage and/or other inflammatory cells and/or a detectable moiety.

35. The method of claim 34, wherein the detectable moiety is a dye or a fluorescent molecule.

36. The method of claim 1, wherein the agent is a perfluorocarbon that comprises an ¹⁸F isotope.

37. The method of claim 1, wherein the subject is a human.

38. The method of claim 1, wherein the subject has a tumor of the lung, breast, colon, brain, prostate, liver, pancreas, esophagus, kidney, stomach, thyroid, bladder, uterus, cervix or ovary.

39. The method of claim 38, wherein the tumor is a metastatic tumor.

40. The method of claim 1, wherein the oncolytic virus is a vaccinia virus.

41. The method of claim 40, wherein the oncolytic virus is a Lister strain virus or a Wyeth strain virus.

42. The method of claim 41, wherein the virus is an LIVP virus.

43. The method of claim 1, wherein the oncolytic virus comprises nucleic acid encoding a heterologous gene product.

44. The method of claim 43, wherein the heterologous nucleic acid encodes a reporter gene product.

45. The method of claim 44, wherein the reporter gene product is a fluorescent protein, a bioluminescent protein, a receptor, or an enzyme.

46. The method of claim 45, wherein the fluorescent protein is selected from among a green fluorescent protein, an enhanced green fluorescent protein, a blue fluorescent protein, a cyan fluorescent protein, a yellow fluorescent protein, a red fluorescent protein, and a far-red fluorescent protein.

47. The method of claim 45, wherein:
the reporter product is a fluorescent protein that is Katushka (TurboFP635), a far-red mutant of the red fluorescent protein from sea anemone Entacmaea quadricolor; or
the reporter product is an enzyme selected from among a luciferase, β-glucuronidase, β-galactosidase, chloramphenicol acetyl tranferase (CAT), alkaline phosphatase, and horseradish peroxidase; or
the reporter product is a receptor that binds to a detectable moiety or a ligand attached to a detectable moiety.

48. The method of claim 47, wherein the reporter is a detectable moiety selected from among a radiolabel, a chromogen and a fluorescent moiety.

49. The method of claim 1, further comprising, in addition to detecting or imaging the macrophage or inflammatory cells, detecting the oncolytic virus by detecting a reporter gene product encoded by the virus.

50. The method of claim 1, wherein the oncolytic virus is detected in vivo in the subject or ex vivo in a tumor biopsy sample from the subject.

51. The method of claim 49, wherein the expression of the reporter gene product is detected by a method selected from among flow cytometry, fluorescence microscopy, fluorescence spectroscopy, magnetic resonance spectroscopy, positron emission tomography and luminescence spectroscopy.

52. The method of claim 1, wherein the virus comprises heterologous nucleic acid that encodes a therapeutic or diagnostic agent.

53. The method of claim 52, wherein:
the heterologous nucleic acid encodes an anticancer agent, an antimetastatic agent, an antiangiogenic agent, an immunomodulatory molecule, an antigen, a cell matrix degradative gene, an enzyme that modifies a substrate to produce a detectable product or signal or is detectable by antibodies, a protein that can bind a contrasting agent; or
the heterologous nucleic acid is a gene for tissue regeneration, reprogramming human somatic cells to pluripotency, optical imaging or detection, PET imaging or MRI imaging.

54. A combination, comprising:
an oncolytic virus; and
an agent for imaging macrophages.

55. The combination of claim 54, wherein the agent is a perfluorocarbon imaging agent.

56. The combination of claim 55, wherein the virus is a vaccinia virus.

57. The method of claim 1, wherein the virus is an LIVP virus designated GLV-1h68 or a derivative thereof.

The application's sequence listing, which the Patent Office published only in electronic form, follows.

SEQUENCE LISTING (30 sequences)

SEQ ID NO: 1 - DNA, 203057 bp, Artificial Sequence
  GLV-1h68 genome
ttatgagaccatcaaagagagaaagagaataaaaatatttttgtaaaactttttttatgagaccatcaaagagagaaagagaataaaaatatttttgtaaaacttttttatgagaccatcaaagagagaaagagaataaaaatatttttgtaaaacttttttatgagaccatcaaagagagaaagagaataaaaatatttttgtaaaactttttttatgagaccatcaaagagagaaagagaataaaaatatttttgtaaaactttttttatgagaccatcaaagagagaaagagaataaaaatatttttgtaaaactttttttatgagaccatcaaagagagaaagagaataaaaatatttttgtaaaactttttttatgagaccatcaaagagagaaagagaataaaaatatttttgtaaaactttttttatgagaccatcaaagagagaaagagaataaaaatatttttgtaaaactttttttatgagaccatcaaagagagaaagagaataaaaatatttttgtaaaactttttttatgagaccatcaaagagagaaagagaataaaaatatttttgtaaaactttttttatgagaccatcaaagagagaaagagaataaaaatatttttgtaaaactttttttatgagaccatcaaagagagaaagagaataaaaatatttttgtaaaactttttttatgagaccatcaaagagagaaagagaataaaaatatttttgtaaaactttttttatgagaccatcaaagagagaaagagaataaaaatatttttgtaaaactttttttatgagaccatcagaaagaggtttaatatttttgtgatactctgaaaggaaataggaataggaataggaatagtgtcataatcgtatcacactattgagacagaaaaagaagaagtcgcgagaggtaactttttgtgaatgtagttaagaacatttttgttttgcaaaccggaatatagtgtccggtacacttttttaattcgtggtgtgcctgaatcgttcgattaaccctactcatccaatttcagatgaatagagttatcgattcagacacacgctttgagttttgttgaatcgatgagtgaagtatcatcggttgcaccttcagatgccgatccgtcgacatacttgaatccatccttgacctcaagttcagatgattccttgcacatgtctccgatacgaacgctaaactctagattcttgacgcattttgtatcgacgatcgttgaaccgatgatatcttcgtaactcactttcttatgagagatgttagacccgagtactggatgggtcttgatgtcgctgtctttctcttcttcgctacatctgatgtcgatagacacttcacagtctttgatcatagcaagagcttcttcatgagtgatcgcgggagagtccttaccttgtcctggggacacgctggacaatctagcattcactgtgtttccatcagcggattctgagatggatttaatctgaggacatttggtgaatccaaagttcattctcagacctccaccgatgatggagtaataagtggtaggaggatctacatcctcgactgatgtggaatcatcttctgattccacctcgggatctggatctgactcggactctgtaatttccgttacggattggcaaatcttatcattggtcggtgtttggtcttgctttgtgactttgataataacatcgattcccatatgatgtttgttttcttcttccgtacacgaggaggaggatgaggatgattgctgaagactggcaggcatagcagctgccgccaggcacatgcatgccaggacgatatattgtttcataattgctattgattgagtactgttctttatgattctacttccttaccgtgcaataaattagaatatattttctacttttacgagaaattaattattgtatttattatttatgggtgaaaaacttactataaaaagtgggtgggtttggaattagtgatcagtttatgtatatcgcaactaccgggcatatggctatcgacatcgagaacattacccacatgataagagattgtatcagtttcgtagtcttgagtattggtattactatatagtatatagatgtcgcccactagagttactgtctccgaatgcggcatgatagtatcattctttgctttcgttaactgtttggaggaagaatctttgttattgcatttaatctcgaaattcagagtgcacacctttctcctgtaaagaaacctgaagtcgctaccttattaagaacggagaagtatccatcacgaaatacgggattacagtctttatgattcatagtaatagttagttccgacgttgagatggattcgctgagaccggtagtggtcgtccgagtacacgacgtgtcgttaactggatacaggttaatttccacatcgatatagttaaacgtatttctgggtacgggttcgcatttatctgcggaagagacggtgtgagaatatgttccgagaccacacggagaacagatgacgtctccggatactccgtatcctattccacattttgtttgggaaacacatgccttgcatccggatgatcctttgagaagacaataatatccgggagagcattcacagattctattgtgagtcgtgttacacgatcgcgtcttccgttacaacttagacaagcgggtaaatgattattgcgagatgtgaaggtacccgaaccacacggcgtacatcgtgtgttagtcttgctatcgcataatctggaagcgtatgttcccggacacaaattatggcgtttgtattcgttgtctttacactttccatcggatggtgcatgcggtgctatatctcttccgtttattattatacatgagagaaacaatatatacgagtataatacggacttcatgatttaataatgtagtaatcgttgtcttgttcctgtttcctacttctccaatcatatagatattttctttctatcatggataatatttgtaatggttctttccgtacaacatactgtttagatgatattgcgcataatttccggaggcaaatacgatagtctagattgaccgatggtagactctaatttattgagtgctttgtcgacgagtttacttttacgctccatcgatagatggcactgttctatgagatcgtcgtacatgggaaatgaaatgtgactgtctgaatgtatggctttaagatagctgtgataccgtatacaggtcggtgtcggagattcgaatctctttgaggcgacttatgtcacgatgatggaatctatcttatcgaatgatatatttttcataaatacacttttatagtcctcgtttaaacagaatttactatgtagttccgcgaatgactcgtcccttaataggcagtaggctagtatcttttttacgtagtaatcgtcgtagggagagacatcttgtagaacaacgatttcgttttgttttctcttctgtaactgcttttctggatggccgtattgattatcgagcgtgatactcgctccatattccaataaccgctttgcaaattgtatattattgacatcgaccgcgtaatatagtagagttatcgatcatatctatatcatccatgtacttgcttagtatatcaaatacatctatcagtatggtttcataacagtgatacccgcaattattaaatctcgataatatcagaccgtacatacatagacggccattgttcgatacgtgatttacagccgcgtgtccatattttccacgataaaccttacgacgtttacatcgacgagattattattaacaaagtagtcgtgtagaggatagttgttgtccgttatctaacatgcatcgaacgaccatatcgccgtaatgtaagtagtttatcagtatggcttgtacgatggattcatcctgttgtctaaatctctttagaatgttatcgatgatgtagtggttatattctctggaatcgtacgaagtaatactacgcattacgtcgacaagagtatgacgtctctcaataagaagattaacgatttccatgtctacattatatggggttactctaaatcgcttgtttagataatacgcctctaatatagggctgacgtcgtatactctacacgtgtccacatcctttattaataataatttaacaatctctatatctatggttgagaaagaccagtagtattggatgggtaaagatcctccttcgtctctgccatggatggaaacattgttatcgatcaaacatttaattacatccttggatagagattgagattctctatgagacgatatatagtaatgaagagagttcttacacatatcactgtcgtacatacaggtacgaaatacgtaaccggtgctgtaacattctgatttaagaagccatagcaatacttctggtctcggattaggcgtcgttacgtatatatccaccaatccgagaccattgattgcataattcgtattcttggacggacgtatccgtttatccacaattaggtattttagcagacgtaagtcgatattatccgaatacagatcgaaatcatttatattcgacttgagttcgttagaggaatttgaatagctggatatcagtagatgcacaatctgagattttacgtatctatgcttactgtatactcctagcggagttaatccttcgttgtttctacaaagtctctcgactccgcgagagaacaatcttaatgtctgtatcgcatttattggagacgtaacaatgtagcgcattgtttcctcgtctatctatatgttttgataagttgtgacacgtttcaatttctagttttatttttttgtacgtcacatcttcatccagtagacgacatagaatagtgcactctctaccacaataatccatagctattctggtgctaattattcctatttcacgaaggcaatcattcctcataagatgataaaaagtgtagtggagatttagtatttagcagtgcggatatgatccaagagggtgagatagtcgttctcgttcagaatctttcgcagcataagtagtatgtcgatatacttatcgttgaagactctttataaaagtctatttgtttatatttattgcggatagcagtatttccctataaaaagtatacgtcctgtggtgtctttaatcatgtacatgaatggatggtttatgtagaccttcgtacgatataccatcgaaaagttaatcgtaaatactcctgtaacggccgatgcttctgtatactcctcattaacatctataaacgtcgtatgtagaaatttttctacagtgatagtttcattacacatcttgctaaaatctgcataatatccgaatatattagtaagtcctaaattttctaaaatcggtaccagattatacggttctgtcatttccactttaaactttggcatatacaagtctatacttttagtagataacataccacaccattttttaaatttttcatctgttatatttttttctatgttatatataccttctatgtcgtccggtagtataattaccatactagagtttccctcgtatggaatatcgataatagagaatcctccgaataattcattaatatgtacatattgcaagttattctcggtacccaccatcatatcaacgctggtaactatattcttagaaatataaaacttgtctgtatatgtaagatgtttagaaaatggatatttccacattgctttaaaatggacggcgctaacaactgtcatacgagtattaatggatagcggactagtcaataaggaattaattttaccatttgtcattgtcttaacccattcgttgattagttcctttgtttggttagcattattaaagtttacagtttgaaaatcgtcttttattttttgtaggaaggaggcgtggaactcgatactatcgctaccgtatattttatttgcggtagctagtgtcgcacaatacggaatatctacctccatgtcatcattattgtcatcgggtgtattctcattcatattctctatatattttgatagttgttcagctgtagaaccagctgctccatgatttagaatagataaagtagataaaatggaaactggagaaatcaaaacattttcatcagggtgttttaagattagttctttaaagatatccatggtatagacctaacgataacgatatatatcataaataaataatgttaaatttcaatttatgtttgtaccccgtattcatacttaacaaattggtattgcgtacacaatcaatcatattacataccattaataatgcaagcataaaaaattgttagtagatgtttctaaatataggttccgtaagcaaagaatataagaatgaagcggtaatgataaaatcaatcgttatctaaaatgatcatactcatttattttattctattatattaacacatacatttttaacagcaacacattcaatattgtattgttatttttatattatttacacaattaacaatatattattagtttatattactgaattaataatataaaattcccaatcttgtcataaacacacactgagaaacagcataaacacagaatccatcaaaaatgttgataaattatctgatgttgttgttcgctgctatgataatcagatcattcgccgatagtggtaacgctatcgaaacgacattgccagaaattacaaacgctacaacagatattccagctatcagattatgcggtccagagggagatggatattgtttacacggtgactgtatccacgctagagatattgacggtatgtattgtagatgctctcatggttatacaggcattagatgtcagcatgtagtattagtagactatcaacgttcagaaaacccaaacactacaacgtcatatatcccatctcccggtattatgcttgtattagtaggcattattatgtgttgtctattatctgtttataggttcactcgacgaactaaactacctatacaagatatggttgtgccataatttttataaatttttttatgagtatttttacaaaaatgtataaagtgtatgtcttatgtatatttataaaaatgctaagtatgcgatgtatctatgttatttgtatttatctaaacaatacctctacctctagatattatacaaaaattttttatttcggcatattaaagtaaaatctagttaccttgaaaatgaatacagtgggtggttccgtatcaccagtaagaacataatagtcaaatacagtatccgattgagattttgcatacaatactagtctagaaagaaatttgtaatcatcttctgtgacgggagtccatatatctgtatcatcgtctagtttatcagtgtcccatgctatattcctgttatcatcattagttaatgaaaataactctcgtgcttcagaaaagtcaaatattgtatccatacatacatctccaaaactatcgcttatacgtttatctttaacgatacctatacctagatggttatttactaacagacattttccagatctattgactataactcctatagtttccacatcaaccaagtaatgatcatctattgttatataacaataacataactcttttccatttttatcagtatgtatatctatatcaacgtcgtcgttgtagtgaatagtagtcattgatctattatatgaaacggatatgtctagaacggcaattgttttacgtccagttaacactttcgttgatttaaagtctagagtctttgcaaacataatatccttatccgactttatatttcctgtagggtggtataattttattttgcctccacatatcggtgtttccaaatatattactagacaatattccatatagttattagttaagggtacccaattagaacacgtacgcttattatcatcatttggatcgtatttcataaaagttattgtgttatcgatgtcaacacattctacattttttaatcgtctatatagtatttttctgatattttctataatatcagaattgtcttccatcggaagttgtatactatcggaatcagttacatgtttaaataattctctgatgtcattccttatacaatcaaattcattattaaacagtttaatagtctgtagacctttatcgtcgtaaatatccattgtcttattagttacgcttatttttatgtgtttttacgttgctttattatattttataagaatgattgtttgacgaatcacgagaactattaagacacattattaggtatatattataaaaaagtttttgattacgatgttataagaggaaagaggacacattaacatcatacatcaattaactacattcttataacatcgtaatcaaaagaattgcaattttgatgtataacaactgtcaatgggttatggaattgtatattacatattatacggtatgttggtaacgacaaataccggtcggtaattgtctgccggtgtaatagaattatatatatctatctattacaccggccttgtatacataataataagttgtggtagtatgatctccatatttataatttaggactttgtattcagtatttttggaatcataaaaaataaaaaaaagttttactaatttaaaatttaaaaagtatttacatttttttcactgtttagtcgcggatatggaattcgatcctgccaaaatcaatacatcatctatagatcatgtaacaatattacaatacatagatgaaccaaatgatataagactaacagtatgcattatccgaaatattatatcaatatcacaaaaataaatacacatttggctaatcaatttcgggcttggaaaaaacgtatcgccggaagggactatatgactaacttatctagagatacaggaatacaacaatcaaaacttactgaaactatacgtaactgtcaaaaaaatagaaacatatatggtctatatatacactacaatttagttattaattggataaccgatgtgattatcaatcaatattaagagggttggtaaattggtacatagctaataatacctatactccaaatacacccaataatacaacaaccatttctgagttggatatcatcaaaatactaaataaatacgaggacgtgtatagagtaagtaaagaaaaagaatgtggaatttgctatgaagttgtttactcaaaacgatagatactttggtttattggattcgtgtactcatatattttgcataacatgcatcaatatatggcatagaacacgaagagaaaccggtgcgtcggataattgtcctatatgccgtacccgttttagaaacataacaatgagcaagttctataagctagttaactaataaataaaaagtttaatttgttgacgacgtatgtcgttattttttctcgtataaaagattaatttgattctaatataatctttagtattggataaatatcaattcaaattaattccattagattatatcataaataaaaatagtagcacacaactacttcagcaaacattctttttataaatgccatctagcgtagcgaggacacaagtgaacctataattatcaaatttattagtatcagtcacatgaaggactttacgtagagtgacgattccactatctgtggtacgaacggtttcatcttctttgatgccatcacccagatgttctataaacttggtatcctcgtccgatttcatatcctttgccaaccaatacatatagctaaactcaggcatatgttccacacatcctgaacaatgaaattctccagaagatgttacaatgtctagatttggacatttggtttcaaccgcgttaacatatgagtgaacacacccatacatgaaagcgatgagaaataggattctcatcttgccaaaatatcactagaaaaaatttatttatcagttttaaaggtataaaaaatacttattgttgctcgaatattttgtatttgatggtatacggaagattagaaatgtaggtattatcatcaactgattctatggttttatgtattctatcatgtttcactattgcgttggaaataatatcatatgcttccacatatattttattttgttttaactcataatactcacgtaattctggattattggcatatctatgaataattttagctccatgatcagtaaatattaatgagaacatagtattaccacctaccattatttttttcatctcattcaattcttaattgcaaagatctatataatcattatagcgttgacttatggactctggaatcttagacgatgtacagtcatctataatcatggcatatttaatacattgttttatagcatagtcgttatctacgatgttagatatttctctcaatgaatcaatcacacaatctaatgtaggtttatgacataatagcattttcagcagttcaatgtttttagattcgttgatggcaatggctatacatgtatatccgttatttgatctaatgttgacatctgaaccggattctagcagtaaagatactagagattgtttattatatctaacagccttgtgaagaagtgtttctcctcgtttgtcaatcatgttaatgtctttaagataaggtaggcaaatgtttatagtactaagaattgggcaagcataagacatgtcacaaagacccttttttgtatgtataagtgtaaaaattataacatccatagttggatttacataggtgtccaatcgggatctctccatcatcgagataattgatggcatctcccttccttttttagtagatatttcatcgtgtaagaatcaatattaatatttctaaagtatccgtgtatagcctctttatttaccacagctccatattccactagagggatatcgccgaatgtcatatactcaattagtatatgttggaggacatccgagttcattgttttcaatatcaaagagatggtttccttatcatttctccatagtggtacaatactacacattattccgtgcggctttccattttccaaaaacaatttgaccaaatctaaatctacatctttattgtatctataatcactatttagataatcagccataattcctcgagtgcaacatgttagatcgtctatatatgaataagcagtgttatctattcctttcattaacaatttaacgatgtctatatctatatgagatgacttaatataatattgaagagctgtacaatagtttttatctataaaagacggcttgattccgtgattaattagacatttaacaacttccggacgcacatatgctctcgtatccgactctgaatacagatgagagatgatatacagatgcaatacggtaccgcaatttcgtagttgataatcatcatacgcgtatcagtactcgtcctcataaagaacactgcagccattttctatgaacaaatcaataattttagaaacaggatcattgtcattacataattttctataactgaacgatggttttcacatttaacactcaagtcaaatccatgttctaccaacacctttatcaagtcaacgtctacatttttggatttcatatagctgaatatattaaagttatttatgttgctaaatccagtggcttctagtagagccatcgctatatccttattaactttaacatgtctactatttgtgtattcttctaatggggtaagctgtctccaatttttgcgtaatggattagtgccactgtctagtagtagtttgacgacctcgacattattacaatgctcattaaaaaggtatgcgtgtaaagcattattcttgaattggttcctggtatcattaggatctctgtctttcaacatctgtttaagttcatcaagagccacctcctcattttccaaatagtcaaacattttgactgaatgagctactgtgaactctatacacccacacaactaatgtcattaaatatcatgtcaaaaacttgtacaattattaataaaaataatttagtgtttaaattttaccagttccagattttacacctccgttaatacctccattaaccccactggacgatcctcctccccacattccaccgccaccagatgtataagttttagatcctttattactaccatcatgtccatggataaagacactccacatgccgccactaccccctttagaagacatattaataagacttaaggacaagtttaacaataaaattaatcacgagtaccctactaccaacctacactattatatgattatagtttctatttttacagtaccttgactaaagtttctagtcacaagagcaatactaccaacctacactattatatgattatagtttctatttttataggaacgcgtacgagaaaatcaaatgtctaatttctaacggtagtgttgataaacgattgttatccgcggatacctcctctatcatgtcgtctattttcttactttgttctattaacttattagcattatatattatttgattataaaacttatattgcttattagcccaatctgtaaatatcggattattaacatatcgtttctttgtaggtttatttaacatgtacatcactgtaagcatgtccttaccatttattttaatttgacgcatatccgcaatttctttttcgcagtcggttataaattctatatatgatggatacatgctacatgtgtacttataatcgactaatatgaagtacttgatacatattttcagtaacgatttattattaccacctatgaataagtacctgtgatcgtctaggtaatcaactgttttcttaatacattcgatggttggtaatttactcagaataatttccaatatcttaatatataattctgctatttctgggatatatttatctgccagtataacacaaatagtaatacatgtaaacccatattttgttattatattaatgtctgcgccattatctattaaccattctactaggctgacactatgcgactcaatacaatgataaagtatactacatccatgtttatctattttgtttatatcatcaatatacggcttacaaagttttagtatcgataacacatccaactcacgcatagagaaggtagggaataatggcataatatttattaggttatcatcattgtcattatctacaactaagtttccattttttaaaatatactcgacaactttaggatctctattgccaaatttttgaaaatatttatttatatgcttaaatctatataatgtagctccttcatcaatcatacatttaataacattgatgtatactgtatgataagatacatattctaacaatagatcttgtatagaatctgtatatcttttaagaattgtggatattaggatattattacataaactattacacaattctaaaatataaaacgtatcacggtcgaataatagttgatcaactatataattatcgattttgtgatttttcttcctaaactgtttacgtaaatagttagatagaatattcattagttcatgaccactatagttactatcgaataacgcgtcaaatatttcccgtttaatatcgcatttgtcaagataataatagagtgtggtatgttcacgataagtataataacgcatctctttttcgtgtgaaattaaatagtttattacgtccaaagatgtagcataaccatcttgtgacctagtaataatataataatagagaactgttttacccattctatcatcataatcagtggtgtagtcgtaatcgtaatcgtctaattcatcatcccaattataatattcaccagcacgtctaatctgttctattttgatcttgtatccatactgtatgttgctacatgtaggtattcctttatccaataatagtttaaacacatctacattgggatttgatgttgtagcgtatttttctacaatattaataccatttttgatactatttatttctatacctttcgaaattagtaatttcaataagtctatattgatgttatcagaacatagatattcgaatatatcaaaatcattgatatttttatagtcgactgacgacaataacaaaatcacaacatcgtttttgatattattatttttcttggtaacgtatgcctttaatggagtttcaccatcatactcatataatggatttgcaccactttctatcaatgattgtgcactgctggcatcgatgttaaatgttttacaactatcatagagtatcttatcgttaaccatgattggttgttgatgctatcgcattttttggtttctttcatttcagttatgtatggatttagcacgtttgggaagcatgagctcatatgatttcagtactgtagtgtcagtactattagtttcaataagatcaatctctagatctatagaatcaaaacacgataggtcagaagataatgaatatctgtaggcttcttgttgtactgtaacttctggttttgttagatggttgcatcgtgctttaacgtcaatggtacaaattttatcctcgctttgtgtatcatattcgtccctactataaaattgtatattcagattatcatgcgatgtgtatacgctaacggtatcaataaacggagcacaccatttagtcataaccgtaatccaaaaatttttaaagtatatcttaacgaaagaagttgtgtcattgtctacggtgtatggtactagatcctcataagtgtatatatctagagtaatgtttaatttattaaatggttgataatatggatcctcgtgacaatttccgaagatggaaataagacataaacacgcaataaatctaattgcggacatggttactccttaaaaaaatacgaataatcaccttggctatttagtaagtgtcatttaacactatactcatattaatccatggactcataatctctatacgggattaacggatgttctatatacggggatgagtagttctcttctttaactttatactttttactaatcatatttagactgatgtatgggtaatagtgtttgaagagctcgttctcatcatcagaataaatcaatatctctgtttttttgttatacagatgtattacagcctcatatattacgtaatagaacgtgtcatctaccttattaactttcaccgcatagttgtttgcaaatacggttaatcctttgacctcgtcgatttccgaccaatctgggcgtataatgaatctaaactttaattgcttgtaatcattcgaaataatttttagtttgcatccgtagttatcccctttatgtaactgtaaatttctcaacgcgatatctccattaataatgatgtcgaattcgtgctgtatacccatactgaatggatgaacgaataccgacggcgttaatagtaatttactttttcatctttacatattgggtactagttttactatcataagtttataaattccacaagctactatggaataagccaaccatcttagtataccacacatgtcttaaagtttattaattaattacatgttgttttatatatatcgctacgaatttaaagagaaattagtttaggaagaaaaattatctatctacatcatcacgtctctgtattctacgatagagtgctactttaagatgcgacagatccgtgtcatcaaatatatactccattaaaatgattattccggcagcgaacttgatattggatatatcacaacctttgttaatatctacgacaatagacagcagtcccatggttccataaacagtgagtttatctttctttgaagagatattttgtagagatcttataaaactgtcgaatgacatcgcatttatatctttagctaaatcgtatatgttaccatcgtaatatctaaccgcgtctatcttaaacgtttccatcgctttaaagacgtttccgatagatggtctcatttcatcagtcatactgagccaacaaatataatcgtgtataacatctttgatagaatcagactctaaagaaaacgaatcggctttattatacgcattcatgataaacttaatgaaaaatgtttttcgttgtttaagttggatgaatagtatgtcttaataattgttattatttcattaattaatatttagtaacgagtacactctataaaaacgagaatgacataactaatcataactagttatcaaagtgtctaggacgcgtaattttcatatggtatagatcctgtaagcattgtctgtattctggagctattttctctatcgcattagtgagttcagaatatgttataaatttaaatcgaataacgaacataactttagtaaagtcgtctatattaactcttttattttctagccatcgtaataccatgtttaagatagtatattctctagttactacgatctcatcgttgtctagaatatcacatactgaatctacatccaattttagaaattggtctgtgttacatatctcttctatattattgttgatgtattgtcgtagaaaactattacgtagaccattttctttataaaacgaatatatagtactccaattatctttaccgatatatttgcacacataatccattctctcaatcactacatctttaagattttcgttgttaagatatttggctaaactatataattctattagatcatcaacagaatcagtatatatttttctagatccaaagacgaactctttggcgtcctctataatattcccagaaaagatattttcgtgttttagtttatcgagatctgatctgttcatatacgccatgattgtacggtacgttatgataaccgcataaaataaaaatccattttcatttttaaccaatactattcataattgagattgatgtaatactttgttactttgaacgtaaagacagtacacggatccgtatctccaacaagcacgtagtaatcaaatttggtgttgttaaacttcgcaatattcatcaatttagatagaaacttatactcatcatctgttttaggaatccatgtattattaccactttccaacttatcattatcccaggctatgtttcgtccatcatcgttgcgcagagtgaataattcttttgtattcggtagttcaaatatatgatccatgcatagatcggcaaagctattgtagatgtgatttttcctaaatctaatataaaactcgtttactagcaaacactttcctgatttatcgaccaagacacatatggtttctaaatctatcaagtggtggggatccatagttatgacgcagtaacatatattattacattcttgactgtcgctaatatctaaatatttattgttatcgtattggattctgcatatagatggcttgtatgtcaaagatatagaacacataaccaatttatagtcgcgctttacattctcgaatctaaagttaagagatttagaaaacattatatcctcggatgatgttatcactgtttctggagtaggatatattaaagtctttacagatttcgtccgattcaaataaatcactaaataatatcccacattatcatctgttagagtagtatcattaaatctattatattttatgaaagatatatcactgctcacctctatatttcgtacatttttaaactgtttgtataatatctctctgatacaatcagatatatctattgtgtcggtagacgataccgttacatttgaattaatggtgttccattttacaacttttaacaagttgaccaattcatttctaatagtatcaaactctccatgattaaatattttaatagtatccattttatatcactacggacacaaagtagctgacataaaccattgtataatttttatgttttatgtttattagcgtacacattttggaagttccggcttccatgtatttcctggagagcaagtagatgatgaggaaccagatagtttatatccgtacttgcacttaaagtctacattgtcgttgtatgagtatgatcttttaaacccgctagacaagtatccgtttgatattgtaggatgtggacatttaacaatctgacacgtgggtggatcggaccattctcctcctgaacacaggacactagagttaccaatcaacgaatatccactattgcaactataagttacaacgctcccatcggtataaaaatcctcgtatccgttatgtcttccgttggatatagatggaggggattggcatttaacagattcacaaataggtgcctcgggattccataccatagatccagtagatcctaattcacaatacgatttagattcaccgatcaactgatatccgctattacaagagtacgttatactagagccaaagtctactccaccaatatcaagttggccattatcgatatctcgaggcgatgggcatctccgtttaatacattgattaaagagtgtccatccagtacctgtacatttagcatatataggtcccattttttgctttctgtatccaggtagacatagatattctatagtgtctcctatgttgtaattagcattagcatcagtctccacactattcttaaatttcatattaatgggtcgtgacggaatagtacagcatgatagaacgcatcctattcccaacaatgtcaggaacgtcacgctctccaccttcatatttatttatccgtaaaaatgttatcctggacatcgtacaaataataaaaagcccatatatgttcgctattgtagaaattgtttttcacagttgctcaaaaacgatggcagtgacttatgagttacgttacactttggagtctcatctttagtaaacatatcataatattcgatattacgagttgacatatcgaacaaattccaagtatttgattttggataatattcgtattttgcatctgctataattaagatataatcaccgcaagaacacacgaacatctttcctacatggttaaagtacatgtacaattctatccatttgtcttccttaactatatatttgtatagataattacgagtctcgtgagtaattccagtaattacatagatgtcgccgtcgtactctacagcataaactatactatgatgtctaggcatgggagacttttttatccaacgatttttagtgaaacattccacatcgtttaatactacatatttctcatacgtggtataaactccacccattacatatatatcatcgtttacgaataccgacgcgcctgaatatctaggagtaattaagtttggaagtcttatccatttcgaagtgccgtgtttcaaatattctgccacacccgttgaaatagaaaattctaatcctcctattacatataactttccatcgttaacacaagtactaacttctgattttaacgacgacatattagtaaccgttttccattttttcgttttaagatctacccgcgatacggaataaacatgtctattgttaatcatgccgccaataatgtatagacaattatgtaaaacatttgcattatagaattgtctatctgtattaccgactatcgtccaatattctgttctaggagagtaatgggttattgtggatatataatcagagtttttaatgactactatattatgttttataccatttcgtgtcactggctttgtagatttggatatagttaatcccaacaatgatatagcattgcgcatagtattagtcataaacttgggatgtaaaatgttgatgatatctacatcgtttggatttttatgtatccactttaataatatcatagctgtaacatcctcatgatttacgttaacgtcttcgtgggataagatagttgtcagttcatcctttgataattttccaaattctggatcggatgtcaccgcagtaatattgttgattatttctgacatcgacgcattatatagttttttaattccatatcttttagaaaagttaaacatccttatacaatttgtgaaattaatattatgaatcatagtttttacacatagatctactacaggcggaacatcaattattatggcagcaactagtatcatttctacattgtttatggtgatgtttatcttcttccagcgcatatagtctaatagcgattcaaacgcgtgatagtttataccattcaatataatcgcttcatcctttagatggtgatcctgaatgcgtttaaaaaaattatacggagacgccgtaataatttccttattcacttgtataatttccccattgatagaaaatattacgctttccattcttaaagtactataagtaattatagtataatgtaaacgtttatatattcaatatttttataaaaatcattttgacattaattcctttttaaatttccgtctatcatctatagaaacgtattctatgaatttataaaatgcttttacgtgtcctatcgtaggcgatagaaccgctaaaaagcctatcgaatttctacaaaagaatctgttatatggtatagggagagtataaaacattaaatgtccgtacttattaaagtattcagtagccaatcctaactctttcgaatacttattaatggctcttgttctgtacgaatctatttttttgaacaacggacctagtggtatatcttgttctatgtatctaaaataatgtctgactagatccgttagtttaatatccgcagtcatcttgtctagaatggcaaatctaactgcgggtttaggctttagtttagtttctatatctacatctatgtctttatctaacaccaaaaatataatagctaatattttattacaatcatccggatattcttctacgatctcactaactaatgtttctttggttatactagtatagtcactatcggacaaataaagaaaatcagatgatcgatgaataatacatttaaattcatcatctgtaagatttttgagatgtctcattagaatattattagggttagtactcattatcattcggcagctattacttattttattatttttcaccatatagatcaatcattagatcatcaaaatatgtttcaatcatcctaaagagtatggtgaatgactcttcccatctaatttctgaacgttcaccaatgtctctagccactttggcactaatagcgatcattcgcttagcgtcttctatattattaactggttgatttaatctatctagcaatggaccgtcggacagcgtcattctcatgttcttaatcaatgtacatacatcgccgtcatctaccaattcatccaacaacataagctttttaaaatcatcattataataggtttgatcgttgtcatttctccaaagaatatatctaataagtagagtcctcatgcttagttaacaactattttttatgttaaatcaattagtacaccgctatgtttaatacttattcatattttagtttttaggattgagaatcaatacaaaaattaatgcatcattaattttagaaatacttagtttccacgtagtcaatgaaacatttgaactcatcgtacaggacgttctcgtacaggacgtaactataaaccggtttatatttgttcaagatagatacaaatccgataactttttttacgaattctacgggatccactttaaaagtgtcataccgggttctttttatttttttaaacagatcaatggtgtgatgttgattaggtcttttacgaatttgatatagaatagcgtttacatattctccataatggtcaatcgccatttgttcgtatgtcataaattctttaattatatgacactgtgtattatttagttcatccttgttcattgttaggaatctatccaaaatggcaattatactagaactataggtgcgttgtatacacatattgatgtgtctgtttatacaatccatgatatttggatccatgctactaccttcgggtaaaattgtagcatcatataccatttctagtactttaggttcattattatccattgcagaggacgtcatgatcgaatcataaaaaaatatattatttttatgttattttgttaaaaataatcatcgaatacttcgtaagatactccttcatgaacataatcagttacaaaacgtttatatgaagtaaagtatctacgatttttacaaaagtccggatgcataagtacaaagtacgcgataaacggaataataatagatttatctagtctatctttttctatagctttcatagttagatacatggtctcagaagtaggattatgtaacatcagcttcgataaaatgactgggttatttagtcttacacattcgctcatacatgtatgaccgttaactacagagtctacactaaaatgattgaacaatagatagtctaccattgtttcgtattcagatagtacagcgtagtacatggcatcttcacaaattatatcattgtctaatagatatttgacgcatcttatggatcccacttcaacagccatcttaaaatcatattgctttcctttatcattaataatttctagaacatcatctctatcataaaagatacaaatattaactgtttgatccgtaataacattgctagtcaatagcaatttgttaataagatgcgctgggctcaatgtcttaataagaagtgtaagaggactatctccgaatttgttttgtttattaacatccgttgatggaagtaaaagatctataatgtctacattcttgactgttttagagcatacaatatggagaggtgtatttccatcatgatctggttttgagggactaattcctagtttcatcatccatgagattgtagaagcttttggattgtctgacataagatgtctatgaatatgatttttgccaaatttatccactatcctggcttcgaatccgatggacattatttttttaaacactctttctgaaggatctgtacacgccaacaacggaccacatccttcttcatcaaccgagttgttaatcttggctccatactgtaccaataaatttattctctctatgacttcatcatctgttcccgagagataatatagaggtgttttatgctgtttatcacacgcgtttggatctgcgccgtgcgtcagcagcatcgcgactattctattattattaattttagaagctatatgcaatggataatttccatcatcatccgtctcatttggagagtatcctctatgaagaagttcttcgacaaatcgttcatctagtcctttaattccacaatacgcatgtagaatgtgataattatttccagaaggttcgatagcttgtagcatattcctaaatacatctaaatttttactattatatttggcataaagagatagataatactcggccgacataatgttgtccattgtagtataaaaattaatatttctatttctatttctgtatatttgcaacaatttactctctataacaaatatcataacttagtttttttatgtcaagaaggcactggtttagttcatctataaatgtcacgccataactaccacgcatgccatactcagaattatgataaagatatttatccttggggtgtaggtaatggggattaatctttgttggatcagtctctaagttaacacatgtcacacatgatccatttatagttatatcacacgatgatgatttatgaattgattccggaagatcgctatcgtattttgtggttccacaattcatttccatacatgttattgtcacactaatattatgatgaactttatctagccgctgagtggtaaacaacagaacagatagtttattatctttaccaacaccctcagccgctgccacaaatctctgatccgtatccatgatggtcatgtttatttctagtccgtatccagtcaacactatgttagcatttctgtcgatatagctttcactcatatgacactcaccaataatagtagaattaatgtcgtaatttacaccaatagtgagttcggcggcaaagtaccaataccggtaatcttgtcgaggaggacatatagtattcttgtattctaccgaatacccgagagatgcgatacaaaagagcaagactaatttgtaaaccatcttactcaaaatatgtaacaatagtacgatgcaatgagtaagacaataggaaatctatcttatatacacataattattctatcaattttaccaattagttagtgtaatgttaacaaaaatgtgggagaatctaattagtttttctttacacaattgacgtacatgagtctgagttccttgtttttgctaattatttcatccaatttattattcttgacgatatcgagatcttttgtataggagtcaaacttgtattcaacatgcttttctataatcattttagctatttcggcatcatccaatagtacattttccagattagcagaatagatattaatgtcgtatttgaacagagcctgtaacatctcaatgtctttattatctatagccaatttaatgtccggaatgaagagaagggaattattggtgtttgtcgacgtcatatagtcgagcaagagaatcatcatatccacgtgtccattttttatagtgatgtgaatacaactaaggagaatagccagatcaaaagtagatggtatctctgaaagaaagtaggaaacaatacttacatcattaagcatgacggcatgataaaatgaagttttccatccagttttcccatagaacatcagtctccaatttttcttaacaaacagttttaccgtttgcatgttaccactatcaaccgcataatacaatgcggtgtttcccttgtcatcaaattgtgaatcatccagtccactgaatagcaaaatctttactattttggtatcttccaatgtggctgcctgatgtaatggaaattcattctctagaagatttttcaatgctccagcgttcaacaacgtacatactagacgcacgttattatcagctattgcataatacaaggcactatgtccatggacatccgccttaaatgtatctttactagagagaaagcttttcagctgcttagacttccaagtattaattcgtgacagatccatgtctgaaacgagacgctaattagtgtatattttttcattttttataattttgtcatattgcaccagaattaataatatctttaatagatctgattagtagatacatggctatcgcaaaacaacatatacacatttaataaaaataatatttattaagaaaattcagatttcacgtacccatcaatataaataaaataatgattccttacaccgtacccatattaaggagattccaccttacccataaacaatataaatccagtaatatcatgtctgatgatgaacacaaatggtgtattaaattccagtttttcaggagatgatctcgccgtagctaccataatagtagatgcctctgctacagttccttgttcgtcgacatctatctttgcattctgaaacattttataaatatataatgggtccctagtcatatgtttaaacgacgcattatctggattaaacatactaggagccatcatttcggctatcgacttaatatccctcttattttcgatagaaaatttagggagtttaagattgtacactttattccctaattgagacgaccaatagtctaattttgcagccgtgatagaatctgtgaaatgggtcatattatcacctattgccaggtacatactaatattagcatccttatacggaaggcgtaccatgtcatattctttgtcatcgattgtgattgtatttccttgcaatttagtaactacgttcatcatgggaaccgttttcgtaccgtacttattagtaaaactagcattgcgtgttttagtgatatcaaacggatattgccatatacctttaaaatatatagtattaatgattgcccatagagtattattgtcgagcatattagaatctactacattagacataccggatctacgttctactatagaattaattttattaaccgcatctcgtctaaagtttaatctatataggccgaatctatgatattgttgataatacgacggtttaatgcacacagtattatctacgaaactttgataagttagatcagtgtacgtatatttagatgttttcagcttagctaatcctgatattaattctgtaaatgctggacccagatctctttttctcaaatccatagtcttcaataattctattctagtattacctgatgcaggcaatagcgacataaacatagaaaacgaataaccaaacggtgagaagacaatattatcatcttgaatatttttatacgctactataccggcattggtaaatccttgtagacgataggcggacgctgaacacgctaacgatagtatcaataacgcaatcatgattttatggtattaataattaaccttatttttatgttcggtataaaaaaattattgatgtctacacatccttttgtaattgacatctatatatccttttgtataatcaactctaatcactttaacttttacagttttccctaccagtttatccctatattcaacatatctatccatatgcatcttaacactctctgccaagatagcttcagagtgaggatagtcaaaaagataaatatatagagcataatcattctcgtatactctgccctttattacatcacccgcattgggcaacgaataacaaaatgcaagcatcttgttaacgggctcgtaaattgggataaaaattatgtttttattgtcttatatctattttattcaagagaatattcaggaatttctttttccggttgtatctcgtcgcagtatatatcatttgtacattgtttcatattttttaatagtttacaccttttagtaggactagtatcgtacaattcatagctgtattttgaattccaatcacgcataaaaatatcttccaattgttgacgaagacctaatccatcatccggtgtaatattaatagatgctccacatgtatccgtaaagtaatttcctgtccaatttgaggtacctatataggccgttttatcggttaccatatatttggcatggtttaccctagaatacggaatgggaggatcagcatctggtacaataaatagctttacttctatatttatgtttttagattttagcatagcgatagatcttaaaaagtttctcatgataaacgaagatcgttgccagcaactaatcaatagcttaacggatacttgtctgtctatagcggatcttcttaattcatcttctatataaggccaaaacaaaattttacccgccttcgaataaataatagggataaagttcataacagatacataaacgaatttactcgcatttctaatacatgacaataaagcggttaaatcattggttctttccatagtacatagttgttgcggtgcagaagcaataaatacagagtgtggaacgccgcttacgttaatactaagaggatgatctgtattataatacgacggataaaagtttttccaattatatggtagattgttaactccaagataccagtatacctcaaaaatttgagtgagatccgctgccaagttcctattattgaagatcgcaatacccaattccttgacctgagttagtgatctccaatccatgttagcgcttcctaaataaatatgtgtattatcagatatccaaaattttgtatgaagaactcctcctaggatatttgtaatatctatgtatcgtacttcaactccggccatttgtagtctttcaacatcctttaatggtttgttagatttattaacggctactctaactcgtactcctcttttgggtaattgtacaatctcgtttaatattatcgtgccgaaattcgtacccacttcatccgataaactccaataaaaagatgatatatctagtgtttttgtggtattggatagaatttccctccacatgttaaatgtagacaaatatactttatcaaattgcatacctataggaatagtttctgtaatcactgcgattgtattatccggattcattttatttgttaaaagaataatcctatatcacttcactctattaaaaatccaagtttctatttctttcatgactgattttttaacttcatccgtttccttatgaagatgatgtttggcaccttcataaatttttatttctctattacaatttgcatgttgcatgaaataatatgcacctaaaacatcgctaatcttattgtttgttccctggagtatgagagtcggggggtgttaatcttggaaattatttttctaaccttgttggtagccttcaagacctgactagcaaatccagccttaattttttcatgattgactaatgggtcgtattggtatttataaactttatccatatctctagatactgattctggacatagctttccgactggcgcatttggtgtgatggttcccataagtttggcagctagcagattcagtcttgaaacagcatctgcattaactagaggagacattagaatcattgctgtaaacaagtttggattatcgtaagaggctagctcccatggaatgacccaataagtagatttaatagttaccacgtgctgtaccaaagtcatcaatcatcattttttcaccattacttcttccatgtccaatatgatcatgtgagaatactaaaattcctaacgatgatatgttttcagctagttcgtcataacgtccagaatgtttaccagctccatgacttatgaatactaatgccttaggatatgtaataggtttccaatatttacaatatatgtaatcattgtccagattgaacatacagtttgcactcatgattcacgttatataactatcaatattaacagttcgtttgatgatcatattatttttatgttttattgataattgtaaaaacatacaattaaatcaatatagaggaaggagacggctactgtcttttgtaagatagtcatggcgactaaattagattatgaggatgctgttttttactttgtggatgatgataaaatatgtagtcgcgactccatcatcgatctaatagatgaatatattacgtggagaaatcatgttatagtgtttaacaaagatattaccagttgtggaagactgtacaaggaattgatgaagttcgatgatgtcgctatacggtactatggtattgataaaattaatgagattgtcgaagctatgagcgaaggagaccactacatcaattttacaaaagtccatgatcaggaaagtttattcgctaccataggaatatgtgctaaaatcactgaacattggggatacaaaaagatttcagaatctagattccaatcattgggaaacattacagatttgatgaccgacgataatataaacatcttgatactttttctagaaaaaaaattgaattgatgatataggggtcttcataacgcataattattacgttagcattctatatccgtgttaaaaaaaattatcctatcatgtatttgagagttttatatgtagcaaacatgatagctgtgatgccaataagctttagatattcacgcgtgctagtgttagggatggtattatctggtggtgaaatgtccgttatataatctacaaaacaatcatcgcatatagtatgcgatagtagagtaaacatttttatagtttttactggattcatacatcgtctacccaattcggttataaatgaaattgtcgccaatcttacacccaaccccttgttatccattagcatagtattaacttcgttatttatgtcataaactgtaaatgattttgtagatgccatatcatacatgatattcatgtccctattataatcattactaactttatcacaatatatgttgataatatctatatatgatctagtctttgtgggcaactgtctatacaagtcgtctaaacgttgtttactcatatagtatcgaacagccatcattacatggtcccgttccgttgatagataatcgagtatgttagtggacttgtcaaatctatataccatattttctggaagtggatatacatagtcgtgatcaacattattgctagcctcatcttctatatcctgtactataccattatctatatcatctacataatctatgatattattacacataaacatcgacaacatactattgtttattatctaagtcctgttgatccaaacccttgatctcctctatttgtactatctagagattgtacttcttccagttctggataatatatacgttgatagattagctgagctattctatctccagtatttacattaaacgtacattttccattattaataagaatgactcctatgtttcccctataatcttcgtctattacaccacctcctatatcaatgccttttagtgacagaccagacctaggagctattctaccatagcagaacttaggcatggacatactaatatctgtcttaattaactgtctttctcctggagggatagtataatcgtaagcgctatacaaatcatatccggcagcacccggcgattgcctagtaggagatttagctctgttagtttccttaacaaatctaactggtgagttaatattcatgttgaacataaaactaatattttatttcaaaattatttaccatcccatatattccatgaataagtgtgatgattgtacacttctatagtatctatatacgatccacgataaaatcctcctatcaatagcagtttattatccactatgatcaattctggattatccctcggataaataggatcatctatcagagtccatgtattgctggattcacaataaaattccgcatttctaccaaccaagaataaccttctaccgaacactaacgcgcatgatttataatgaggataataagtggatggtccaaactgccactgatcatgattgggtagcaaatattctgtagttgtatcagtttcagaatgtcctcccattacgtatataacattgtttatggatgccactgctggattacatctaggtttcagaagactcggcatattaacccaagcagcatccccgtggaaccaacgctcaacagatgtgggatttggtagacctcctactacgtataatttattgttagcgggtatcccgctagcatacagtctggggctattcatcggaggaattggaatccaattgtttgatatataatttacagctatagcattgttatgtatttcattgttcatccatccaccgatgagatatactacttctccaacatgagtacttgtacacatatggaatatatctataatttgatccatgttcataggatactctatgaatggatacttgtatgatttgcgtggttgtttatcacaatgaaatattttggtacagtctagtatccattttacattatttatacctctgggagaaagataatttgacctgattacatttttgataaggagtagcagatttcctaatttatttcttcgcctcatataccacttaatgacaaaatcaactacataatcctcatctggaacatttagttcatcgctttctagaataagtttcatagatagataatcaaaattgtctatgatgtcatcttccagttccaaaaagtgtttggcaataaagtttttagtatgacataagagattggatagtccgtattctatacccatcatgtaacactcgacacaatattcctttctaaaatctcgtaagataaagtttatacaagtgtagatgataaattctacagaggttaatatagaagcacgtaataaattgacgacgttatgactatctatatatacctttccagtatatgagtaaataactatagaagttaaactgtgaatgtcaaggtctagacaaacccttgtaactggatctttatttttcgtgtatttttgacgtaaatgtgtgcgaaagtaaggagataactttttcaatatcgtagaattgactattatattgcctcctatggcatcaataattgttttgaatttcttagtcatagacaatgctaatatattcttacagtacacagtattgacaaatatcggcatttatgtttctttaaaagtcaacatctagagaaaaatgattatctttttgagacataactcccattttttggtattcacccacacgtttttcgaaaaaattagtttttccttccaatgatatattttccatgaaatcaaacggattggtaacattataaatttttttaaatcccaattcagaaatcaatctatccgcgacgaattctatatatgttttcatcatttcacaattcattcctataagtttaactggaagagccgcagtaagaaattcttgttcaatggatactgcatctgttataatagatctaacggtttcttcactcggtggatgcaataaatgtttaaacatcaaacatgcgaaatcgcagtgcagaccctcgtctctactaattagttcgttggaaaacgtgagtccgggcattaggccacgctttttaagccaaaatatggaagcgaatgatccagaaaagaaaattccttctactgcagcaaaggcaataagtctctctccataaccggcgctgtcatgtatccacttttgagcccaatcggccttcttttttacacaaggcatcgtttctatggcattaaagagatagtttttttcattactatctttaacataagtatcgatcaaaagactatacatttccgaatgaatgttttcaatggccatctgaaatccgtagaaacatctagcctcggtaatctgtacttctgtacaaaatcgttccgccaaattttcattcactattccgtcactggctgcaaaaaacgccaatacatgttttataaaatatttttcgtctggtgttagtttattccaatcattgatatctttagatatatctacttcttccactgtccaaaatgatgcctctgcctttttatacatgttccagatgtcatgatattggattgggaaaataacaaatctatttggatttggtgcaaggatgggttccataactaaattaacaataacaataaattttttttcagttatctatatgcctgtacttggattttttgtacatcgatatcgccgcaatcactacaataattacaagtattattgatagcattgttattagtactatcataattaaattatctacattcatgggtgctgaataatcgttattatcatcattatcattttgtaattgtgacatcatactagataaatcgtttgcgagattgttgtgggaagcgggcatggaggatgcattatcattattatttaacgccttccatttggattcacaaatgttacgcacattcaacattttatggaaactataattttgtgaaaacaaataacaagaaaactcgtcatcgttcaaatttttaacgatagtaaaccgattaaacgtcgagctaatttctaacgctagcgactctgttggatatgggtttccagatatatatcttttcagttcccctacgtatctataatcatctgtaggaaatggaagatatttccatttatctactgttcctaatatcatatgtggtggtgtagtagaaccattaagcgcgaaagatgttatttcgcatcgtattttaacttcgcaataatttctggttagataacgcactctaccagtcaagtcaatgatattagcctttacagatatattcatagtagtcgtaacgatgactccatcttttagatgcgatactcctttgtatgtaccagaatcttcgtacctcaaactcgatatatttaaacaagttaatgagatattaacgcgttttatgaatgatgatatataaccagaagttttatcctcggtggctagcgctataaccttatcattataataccaactagtgtgattaatatgtgacacgtcagtgtgggtacaaatatgtacattatcgtctacgtcgtattcgatacatccgcatacagccaacaaatataaaatgacaaatactctaacgccgttcgtacccatcttgatgcggtttaataaatgttttgatttcaatttattgtaaaaaaagattcggttttatactgttcgatattctcattgcttatattttcatctatcatctccacacagtcaaatccgtggttagcatgcacctcatcaaccggtaaaagactatcggactcttctatcattataactctagaatatttaatttggtcattattaatcaagtcaattatcttatttttaacaaacgtgagtattttactcattttttataaaaacttttagaaatatacagactctatcgtgtgtctatatcttctttttatatccaatgtatttatgtctgatttttcttcatttatcatatataatggtccaaattctacacgtgcttcggattcatccagatcattaaggttcttataattgtaacatccttctcttccctcttctacatcttccttcttattcttattcttagcgtcacagaatctaccacagcaggatcccatgacgagcgtcatattaaactaatccattttcaattataatatatgattagtaatgaccattaaaataaaaaatattcttcataaccggcaagaaagtgaaaagttcacattgaaactatgtcagtagtatacatcatgaaatgatgatatatatatactctattttggtggaggattatatgatataattcgtggataatcatttttaagacacatttctttattcgtaaatcttttcacgttaaatgagtgtccatattttgcaatttcttcatatgatggcggtgtacgtggacgaggctgctcctgttcttgttgtggtcgccgactgtcgtgtctgcgtttagatccctccattatcgcgattgcgtagatggagtactattttataccttgtaattaaatttttttattaattaaacgtataaaaacgttccgtatctgtatttaagagccagatttcgtctaatagaacaaatagctacagtaaaaataactagaataattgctacacccactagaaaccacggatcgtaatacggcaatcggttttcgataataggtggaacgtatattttatttaaggacttaacaattgtctgtaaaccacaatttgcttccgcggatcctgtattaactatctgtaaaagcatatgttgaccgggcggagccgaacattctccgatatctaatttctgtatatctataatattattaacctccgcatacgcattacagttcttttctagcttggataccgcactaggtacatcgtctagatctattcctatttcctcagcgatagctcttctatccttttccggaagcaatgaaatcacttcaataaatgattcaaccatgagtgtgaaactaagtcgagaattactcatgcatttgttagttattcggagcgcgcaatttttaaactgtcctataacctctcctatatgaatagcacaagtgacattagtagggatagaatgttgagctaatttttgtaaataactatctataaaaagattatacaaagttttaaactctttagtttccgccatttatccagtctgagaaaatgtctctcataataaatttttccaagaaactaattgggtgaagaatggaaacctttaatctatatttatcacagtctgttttggtacacatgatgaattcttccaatgccgtactaaattcgatatctttttcgatttctggatatgtttttaataaagtatgaacaaagaaatggaaatcgtaataccagttatgtttaactttgaaattgttttttattttcttgttaatgattccagccacttgggaaaagtcaaagtcgtttaatgccgatttaatacgttcattaaaaacaaactttttatcctttagatgaattattattggttcattggaatcaaaaagtaagatattatcgggtttaagatctgcgtgtaaaaagttgtcgcaacagggtagttcgtagattttaatgtataacagagccatctgtaaaaagataaactttatgtattgtaccaaagatttaaatcctaatttgatagctaactcggtatctactttatctgccgaatacagtgctaggggaaaaattataatgtttcctctttcatattcgtagttagttctcttttcatgttcgaaaaagtgaaacatgcggttaaaatagtttataacattaatattactgttaataactgccggataaaagtgggatagtaatttcacgaatttgatactgtcctttctctcgttaaacgcctttaaaaaaactttagaagaatatctcaatgagagttcctgaccatccatagtttgtatcaataatagcaacatatgaagaacacgtttatacagagtatgtaaaaatgttaatttatagtttaatcccatggcccacgcacacacgattaattttttttcatctccctttagattgttgtatagaaatttgggtactgtgaactccgccgtagtttccatgggactatataattttgtggcctcgaatacaaattttactacatagttatctatcttaaagactataccatatcctcctgtagatatgtgataaaaatcgtcgtttataggataaaatcgtttatccttttgttggaaaaaggatgaattaatgtaatcattctcttctatctttagtagtgtttccttattaaaattcttaaaataatttaacaatctaactgacggagcccaattttggtgtaaatctaattgggacattatattgttaaaatacaaacagtctcctaatataacagtatctgataatctatggggagacatccattgatattcaggggatgaatcattggcaacacccatttattgtacaaaaagccccaatttacaaacgaaagtccaggtttgatagagacaaacaattaactattttgtctctgtttttaacacctccacagtttttaatttctttagtaatgaaattattcacaatatcagtatcttctttatctaccagagattttactaacttgataaccttggctgtctcattcaatagggtagtaatatttgtatgtgtgatattgatatctttttgaattgtttcttttagaagtgattctttgatggtgccagcatacgaattacaataatgcagaaactcggttaacatgcaggaattatagtaagccaattccaattgttgcctgtgttgtattagagtgtcaatatgagcaatggtgtccttgcgtttctctgatagaatgcgagcagcgattttggcgttatcatttgacgatatttctggaatgacgaatcctgtttctactaactttttggtaggacaaagtgaaacaatcaagaagatagcttctcctcctatttgtggaagaaattgaactcctctagatgatctactgacgatagtatctccttgacagatattggaccgaattacagaagtacctggaatgtaaagccctgaaaccccctcattttttaagcagattgttgccgtaaatcctgcactatgcccaagatagagagctcctttggtgaatccatctctatgtttcagtttaaccaagaaacagtcagctggtctaaaatttccatctctatctaatacagcatctaacttgatgtcaggaactatgaccggtttaatgttatatgtaacattgagtaaatccttaagttcataatcatcactgtcatcagttatgtacgatccaaacaatgtttctaccggcatagtggatacgaagatgctatccatcagaatgtttccctgattagtattttctatatagctattcttctttaaacgattttccaaatcagtaactatgttcatttttttaggagtaggacgcctagccagtatggaagaggattttctagatcctctcttcaacatctttgatctcgatggaatgcaaaaccccatagtgaaacaaccaacgataaaaataatattgtttttcactttttataattttaccatctgactcatggattcattaatatctttataagagctactaacgtataattctttataactgaactgagatatatacaccggatctatggtttccataattgagtaaatgaatgctcggcaataactaatggcaaatgtatagaacaacgaaattatactagagttgttaaagttaatattttctatgagctgttccaataaattatttgttgtgactgcgttcaagtcataaatcatcttgatactatccagtaaaccgtttttaagttctggaatattatcatcccattgtaaagcccctaattcgactatcgaatatcctgctctgatagcagtttcaatatcgacggacgtcaatactgtaataaaggtggtagtattgtcatcatcgtgataaactacgggaatatggtcgttagtaggtacggtaactttacacaacgcgatatataactttccttttgtaccatttttaacgtagttgggacgtcctgcagggtattgttttgaagaaatgatatcgagaacagatttgatacgatatttgttggattcctgattattcactataatataatctagacagatagatgattcgataaatagagaaggtatatcgttggtaggataatacatccccattccagtattctcggatactctattgatgacactagttaagaacatgtcttctattctagaaaacgaaaacatcctacatggactcattaaaacttctaacgctcctgattgtgtctcgaatgcctcgtacaaggatttcaaggatgccatagattctttgaccaacgatttagaattgcgtttagcatctgatttttttattaaatcgaatggtcggctctctggtttgctaccccaatgataacaatagtcttgtaaagataaaccgcaagaaaatttatacgcatccatccaaataaccctagcaccatcggatgatattaatgtattattatagattttccatccacaattattgggccagtatactgttagcaacggtatatcgaatagattactcatgtaacctactagaatgatagttcgtgtactagtcataatatctttaatccaatctaaaaaatttaaaattagattttttacactgttaaagttaacaaaagtattacccgggtacgtggatatcatatatggcattggtccattatcagtaatagctccataaactgatacggcgatggtttttatatgtgtttgatctaacgaggaagaaattcgcgcccacaattcatctctagatatgtatttaatatcaaacggtaacacatcaatttcgggacgcgtatatgtttctaaatttttaatccaaatataatgatgacctatatgccctattatcatactgtcaactatagtacacctagggaacttacgatacatctgtttcctataatcgttaaattttacaaatctataacatgctaaaccttttgacgacagccattcattaatttctgatatggaatctgtattctcgataccgtatcgttctaaagccagtgctatatctccctgttcgtgggaacgctttcgtataatatcgatcaacggataatctgaagtttttggagaataatatgactcatgatctatttcgtccataaacaatctagacataggaattggaggcgatgatcttaattttgtgcaatgagtcgtcaatcctataacttctaatcttgtaatattcatcatcgacataatactatctatgttatcatcgtatattagtataccatgaccttcttcatttcgtgccaaaatgatatacagtcttaaatagttacgcaatatctcaatagtttcataattgttagctgttttcatcaaggtttgtatcctgtttaacatgatggcgttctataacgtctctattttctatttttaattttttaaatttttaacgatttactgtggctagatacccaatctctctcaaatatttttttagcctcgcttacaagctgtttatctatactattaaaactgacgaatccgtgattttggtaatgggttccgtcgaaatttgccgaagtgatatgaacatattcgtcgtcgactatcaacaattttgtattattctgaatagtgaaaaccttcacagatagatcattttgaacacacaacgcatctagacttttggcggttgccatagaatatacgtcgttcttatcccaattaccaactagaagtctgatcttaactcctctattaatggctgcttctataatggagttgtaaatgtcgggccaatagtagctattaccgtcgacacgtgtagtgggaactatggccaaatgttcaatatctatactagtcttagctgacctgagtttatcaataactacatcggtatctagatctctagaatatcccaataggtgttccggagaatcagtaaagaacactccacctataggattcttaatatgatacgcagtgctaactggcaaacaacaagccgcagagcataaattcaaccatgaattttttgcgctattaaaggctttaaaagtatcaaatcttctacgaagatctgtggccagcgggggataatcagaatatacacctaacgttttaatcgtatgtatagatcctccagtaaatgacgcgtttcctacataacatctttcatcatctgacacccaaaaacaaccgagtagtagtcccacattattttttttatctatattaacggttataaaatttatatccgggcagtgactttgtagctctcccagatttcttttccctcgttcatctagcaaaactattattttaatccctttttcagatgcctcttttagtttatcaaaaataagcgctcccctagtcgtactcagaggattacaacaaaaagatgctatgtatatatatttcttagctagagtgataatttcgttaaaacattcaaatgttgttaaatgatcggatctaaaatccatattttctggtagtgtttctaccagcctacattttgctcccgcaggtaccgatgcaaatggccacatttagttaacataaaaacttatacatcctgttctatcaacgattctagaatatcatcggctatatcgctaaaattttcatcaaagtcgacatcacaacctaactcagtcaatatattaagaagttccatgatgtcatcttcgtctatttctatatccgtatccattgtagattgttgaccgattatcgagtttaaatcattactaatactcaatccttcagaatacaatctgtgtttcattgtaaatttataggcggtgtatttaagttggtagattttcaattatgtattaatatagcaacagtagttcttgctcctccttgattctagcatcctcttcattattttcttctacgtacataaacatgtccaatacgttagacaacacaccgacgatggcggccgcagatctcgagttatgatctacttccttaccgtgcaataaattagaatatattttctacttttacgagaaattaattattgtatttattatttatgggtgaaaaacttactataaaaagcgggtgggtttggaattagtgaaagcttaaaaattgaaattttattttttttttttggaatataaataagctcgaagtcgacagatctaggcctggtaccaggaggaggaattcagcttaaagatgacttcgaaagtttatgatccagaacaaaggaaacggatgataactggtccgcagtggtgggccagatgtaaacaaatgaatgttcttgattcatttattaattattatgattcagaaaaacatgcagaaaatgctgttatttttttacatggtaacgcggcctcttcttatttatggcgacatgttgtgccacatattgagccagtagcgcggtgtattataccagatcttattggtatgggcaaatcaggcaaatctggtaatggttcttataggttacttgatcattacaaatatcttactgcatggtttgaacttcttaatttaccaaagaagatcatttttgtcggccatgattggggtgcttgtttggcatttcattatagctatgagcatcaagataagatcaaagcaatagttcacgctgaaagtgtagtagatgtgattgaatcatgggatgaatggcctgatattgaagaagatattgcgttgatcaaatctgaagaaggagaaaaaatggttttggagaataacttcttcgtggaaaccatgttgccatcaaaaatcatgagaaagttagaaccagaagaatttgcagcatatcttgaaccattcaaagagaaaggtgaagttcgtcgtccaacattatcatggcctcgtgaaatcccgttagtaaaaggtggtaaacctgacgttgtacaaattgttaggaattataatgcttatctacgtgcaagtgatgatttaccaaaaatgtttattgaatcggatccaggattcttttccaatgctattgttgaaggcgccaagaagtttcctaatactgaatttgtcaaagtaaaaggtcttcatttttcgcaagaagatgcacctgatgaaatgggaaaatatatcaaatcgttcgttgagcgagttctcaaaaatgaacaagcggccgccgccaccatgagcaagggcgaggaactgttcactggcgtggtcccaattctcgtggaactggatggcgatgtgaatgggcacaaattttctgtcagcggagagggtgaaggtgatgccacatacggaaagctcaccctgaaattcatctgcaccactggaaagctccctgtgccatggccaacactggtcactaccttcacctatggcgtgcagtgcttttccagatacccagaccatatgaagcagcatgactttttcaagagcgccatgcccgagggctatgtgcaggagagaaccatctttttcaaagatgacgggaactacaagacccgcgctgaagtcaagttcgaaggtgacaccctggtgaatagaatcgagctgaagggcattgactttaaggaggatggaaacattctcggccacaagctggaatacaactataactcccacaatgtgtacatcatggccgacaagcaaaagaatggcatcaaggtcaacttcaagatcagacacaacattgaggatggatccgtgcagctggccgaccattatcaacagaacactccaatcggcgacggccctgtgctcctcccagacaaccattacctgtccacccagtctgccctgtctaaagatcccaacgaaaagagagaccacatggtcctgctggagtttgtgaccgctgctgggatcacacatggcatggacgagctgtacaagtgagcggccgccctgctagcaagcttgctagcggccgctcgagatctgcggccgctacagacacgaatatgactaaaccgatgaccatttaaaaacccctctctagctttcacttaaactgtatcgatcattcttttagcacatgtataatataaaaacattattctatttcgaatttaggcttccaaaaatttttcatccgtaaaccgataataatatatatagacttgttaatagtcggaataaatagattaatgcttaaactatcatcatctccacgattagagatacaatatttacattctttttgctgtttcgaaactttatcaatacacgttaatacaaacccaggaaggagatattgaaactgaggctgttgaaaatgaaacggtgaatacaataattcagataatgtaaaatcatgattccgtattctgatgatattagaactgctaatggatgtcgatggtatgtatctaggagtatctattttaacaaagcatcgatttgctaatatacaattatccttttgattaattgttattttattcatattcttaaaaggtttcatatttatcaattcttctacattaaaaatttccatttttaatttatgtagccccgcaatactcctcattacgtttcattttttgtctataatatccattttgttcatctcggtacatagattatccaattgagaagcgcatttagtagttttgtacattttaagtttattgacgaatcgtcgaaaactagttatagttaacattttattatttgataccctgatattaatacccctgccgttactattatttataactgatgtaatccacgtaacattggaattaactatcgatagtaatgcatcgacgcttccaaaattgtctattataaactcaccgataatttttttattgcatgttttcatattcattaggattatcaaatctttaatcttattacgattgtatgcgttgatattacaagacgtcattctaaaagacggaggatctccatcaaatgccagacaatcacgtacaaagtacatggaaataggttttgttctattgcgcatcatagatttatatagaacacccgtagaaatactaatttgttttactctataaaatactaatgcatctatttcatcgttttgtataacgtctttccaagtgtcaaattccaaatttttttcattgatagtaccaaattcttctatctctttaactacttgcatagataggtaattacagtgatgcctacatgccgttttttgaaactgaatagatgcgtctagaagcgatgctacgctagtcacaatcaccactttcatatttagaatatatatatgtaaaaatatagtagaatttcattttgtttttttctatgctataaatgaattctcattttgcatctgctcatactccgttttatattaataccaaagaaggaagatatctggttctaaaagccgttaaagtatgcgatgttagaactgtagaatgcgaaggaagtaaagcttcctgcgtactcaaagtagataaaccctcatcgcccgcgtgtgagagaagaccttcgtccccgtccagatgcgagagaatgaataaccctggaaaacaagttccgtttatgaggacggacatgctacaaaatatgttcgcggctaatcgcgataatgtagcttctagacttttgtcctaaaatactattatatccttttcgatattaataaatccgtgtcgtccaggttttttatctctttcagtatgtgaatagataggtattttatctctattcatcatcgaatttaagagatccgataaacattgtttgtattctccagatgtcagcatctgatacaacaatatatgtgcacataaacctctggcacttatttcatgtaccttccccttatcactaaggagaatagtatttgagaaatatgtatacatgatattatcatgaattagatatacagaatttgtaacactctcgaaatcacacgatgtgtcggcgttaagatctaatatatcactcgataacacattttcatctagatacactagacattttttaaagctaaaatagtctttagtagtaacagtaactatgcgattattttcatcgatgatacatttcatcggcatattattacgcttaccatcaaagactataccatgtgtatatctaacgtattctagcatggttgccatacgcgcattaaacttttcaggatctttggatagatcttccaatctatctatttgagaaaacatttttatcatgttcaatagttgaaacgtcggatccactatatagatattatctataaagattttaggaactacgttcatggtatcctggcgaatattaaaactatcaatgatatgattatcgttttcatcttttatcaccatatagtttctaagatatgggattttacttaatataatattatttcccgtgataaattttattagaaaggccaaatctataagaaaagtcctagaattagtctgaagaatatctatatcgccgtatagtatatttggattaattagatatagagaatatgatccgtaacatatacaacttttattatggcgtctaagatattcttccatcaacttattaacatttttgactagggaagatacattatgacgtcccattacttttgccttgtctattactgcgacgttcatagaatttagcatatctcttgccaattcttccattgatgttacattataagaaattttagatgaaattacatttggagctttaatagtaagaactcctaatatgtccgtgtatgtggtcactaatacagattgtagttctataatcgtaaataatttacctatattatatgtttgagtctgtttagaaaagtagctaagtatacgatcttttatttctgatgcagatgtattaacatcggaaaaaaatctttttttattcttttttactaaagatacaaatatgtctttgttaaaaacagttattttctgaatatttctagcttgtaattttaacatatgatattcgttcacactaggtactctgcctaaataggtttctataatctttaatgtaatattaggaaaagtattctgatcaggattcctattcattttgaggatttaaaactctgattattgtctaatatggtctctacgcaaactttttcacagagcgatagagtttttgataactcgtttttcttaagaaatataaaactactgtctccagagctcgctctatcttttattttatctaattcgatacaaactcctgatactggttcagaaagtaattcattaattttcagtcctttatagaagatatttaatatagataatacaaaatcttcagtttttgatatcgatctgattgatcctagaactagatatattaataacgtgctcattaggcagtttatggcagcttgataattagatatagtatattccagttcatatttattagataccgcattgcccagattttgatattctatgaattcctctgaaaataaatccaaaataactagacattctattttttgtggattagtgtactctcttccctctatcatgttcactactggtgtccacgatgataaatatctagagggaatataatatagtccataggatgccaatctagcaatgtcgaataactgtaattttattcttcgctcttcattatgaattgattcttgaggtataaacctaacacaaattatattattagacttttcgtatgtaatgtctttcatgttataagtttttaatcctggaatagaatctattttaatgaggcttttaaacgcagagttctccaacgagtcaaagcataatactctgttgtttttcttatatacgatgttacgattttcttctttgaatggaataggtttttgaattagtttataattacaacataatagataaggaagtgtgcaaatagtacgcggaaaaaacataatagctcccctgttttcatccatggttttaagtaaatgatcactggcttctttagtcaatggatattcgaacattaaccgtttcatcatcattggacagaatccatatttcttaatgtaaagagtgatcaaatcattgtgtttattgtaccatcttgttgtaaatgtgtattcggttatcggatctgctcctttttctattaaagtatcgatgtcaatctcgtctaagaattcaactatatcgacatatttcatttgtatacacataaccattactaacgtagaatgtataggaagagatgtaacgggaacagggtttgttgattcgcaaactattctaatacataattcttctgttaatacgtcttgcacgtaatctattatagatgccaagatatctatataattattttgtaagatgatgttaactatgtgatctatataagtagtgtaataattcatgtattttgatatatgttccaactctgtctttgtgatgtctagtttcgtaatatctatagcatcctcaaaaaatatattcgcatatattcccaagtcttcagttctatcttctaaaaaatcttcaacgtatggaatataataatctattttacctcttctgatatcattaatgatatagtttttgacactatcttctgtcaattgattcttattcactatatctaagaaacggatagcgtccctaggacgaactactgccattaatatctctattatagcttctggacataattcatctattataccagaattaatgggaactattccgtatctatctaacatagttttaagaaagtcagaatctaagacttgatgttcatatattggttcatacatgaaatgatctctattgatgatagtgactatttcattctctgaaaattggtaactcattctatatatgctttccttgttgatgaaggatagaatatactcaatagaatttgtaccaacaaactgttctcttatgaatcgtatatcatcatctgaaataatcatgtaaggcatacatttaacaattagagacttgtctcctgttatcaatatactattcttgtgataatttatgtgtgaggcaaatttgtccacgttctttaattttgttatagtagatatcaaatccaatggagctacagttcttggcttaaacagatatagtttttctggaacaaattctacaacattattataaaggactttgggtagataagtgggatgaaatcctattttaattaatgcgatagccttgtcctcgtgcagatatccaaacgcttttgtgatagtatggcattcattgtctagaaacgctctacgaatatctgtgacagatatcatctttagagaatatactagtcgcgttaatagtactacaatttgtattttttaatctatctcaataaaaaaattaatatgtatgattcaatgtataactaaactactaactgttattgataactagaatcagaatctaatgatgacgtaaccaagaagtttatctactgccaatttagctgcattatttttagcatctcgtttagattttccatcggccttatcgaatactcttccgtcgatgtctacacaggcataaaatgtaggagagttactaggcccaactgattcaatacgaaaagaccaatctctcctagtaatttggcagtactcattaataacggtgacagggttagcatctttccaatcaataatttttttagccggaataacatcatcaaaagacttatgatcctctctcattgatttttcgcgggatacatcatctattatgacgtcagccatagcatcagcatccggcttatccgcctccgttgtcataaaccaacgaggaggaatatcgtcggagctgtacaccatagcactacgttgaagatcgtacagagctttattaacttctcgcttctccatattaagttgtctagttagttgtgcagcagtagctccttcgattccaatgtttttaatagccgcacacacaatctctgcgtcagaacgctcgtcaatatagatcttagacatttttagagagaactaacgcaaccagcaataaaactgaacctactttatcatttttttattcatcatcctctggtggttcgtcgttcctatcaaatgtagctctgattaacccgtcatctataggtgatgctggttctggagattctggaggagatggattattatctggaagaatctctgttatttccttgttttcatgtatcgattgcgttgtaacattaagattgcgaaatgctctaaatttgggaggcttaaagtgttgtttgcaatctctacacgcgtgtctaactagtggaggttcgtcagctgctctagtttgaatcatcatcggcgtagtattcctacttttacagttaggacacggtgtattgtatttctcgtcgagaacgttaaaataatcgttgtaactcacatcctttattttatctatattgtattctactcctttcttaatgcattttataccgaataagagatagcgaaggaattctttttcggtgccgctagtacccttaatcatatcacatagtgttttatattccaaatttgtggcaatagacggtttatttctatacgatagtttgtttctggaatcctttgagtattctataccaatattattctttgattcgaatttagtttcttcgatattagattttgtattacctatattcttgatgtagtactttgatgatttttccatggcccattctattaagtcttccaagttggcatcatccacatattgtgatagtaattctcggatatcagtagcggctaccgccattgatgtttgttcattggatgagtaactactaatgtatacattttccatttataacacttatgtattaactttgttcatttatattttttcattattatgttgatattaacaaaagtgaatatatatatgttaataattgtattgtggttatacggctacaattttataatgagtgaaagtcagtgtccgatgatcaatgacgatagctttactctgaaaagaaagtatcaaatcgatagtgcggagtcaacaataaaaatggataagaagaggataaagtttcagaatagagccaaaatggtaaaagaaataaatcagacaataagagcagcacaaactcattacgagacattgaaactaggatacataaaatttaagagaatgattatgactactactctagaagatatagcaccatctattccaaataatcagaaaacttataaactattctcggacatttcagccatcggcaaagcatcacagaatccgagtaagatggtatatgctctgctgctttacatgtttcccaatttgtttggagatgatcatagattcattcgttatagaatgcatccaatgagtaaaatcaaacacaagatcttctctcctttcaaacttaatcttattagaatattagtggaagaaagattctataataatgaatgcagatctaataaatggagaataattggaacacaagttgataaaatgttgatagctgaatctgataaatatacaatagatgcaaggtataacctaaaacccatgtatagaatcaagggagaatctgaagaagataccctctttatcaaacagatggtagaacaatgtgtgacatcccaggaattggtggaaaaagtgttgaagatactgtttagagatttgttcaagagtggagaatacaaagcgtacagatacgatgatgatgtagaaaatggatttattggattggatacactaaaattaaacattgttcatgatatagttgaaccatgtatgcctgttcgtaggccagtggctaagatactgtgtaaagaaatggtaaataaatactttgagaatccgctacatattattggtaaaaatcttcaagagtgcattgactttgttagtgaataggcatttcatctttctccaatactaattcaaattgttaaattaataatggatagtataaatagttattagttataagatagtaaaaataattattagaataagagtgtagtatcatagataactctcttctataaaaatggattttattcgtagaaagtatcttatatacacagtagaaaataatatagattttttaaaggatgatacattaagtaaagtaaacaattttaccctcaatcatgtactagctctcaagtatctagttagcaattttcctcaacacgttattactaaggatgtattagctaataccaatttttttgttttcatacatatggtacgatgttgtaaagtgtacgaagcggttttacgacacgcatttgatgcacccacgttgtacgttaaagcattgactaagaattatttatcgtttagtaacgcaatacaatcgtacaaggaaaccgtgcataaactaacacaagatgaaaaatttttagaggttgccgaatacatggacgaattaggagaacttataggcgtaaattatgacttagttcttaatccattatttcacggaggggaacccatcaaagatatggaaatcatttttttaaaactgtttaagaaaacagacttcaaagttgttaaaaaattaagtgttataagattacttatttgggcatacctaagcaagaaagatacaggcatagagtttgcggataatgatagacaaaatatatacactctatttcaacaaactggtagaatcgtccatagcaatctaacagaaacgtttagagattatatctttcccggagataagactagctattgggtgtggttaaacgaaagtatagctaatgatgcggatatcgttcttaatagacacgccattaccatgtatgataaaattcttagttatatatactctgagataaaacaaggacgcgttaataaaaacatgcttaagttagtttatatctttgagcctgaaaaagatatcagagaacttctgctagaaatcatatatgatattcctggagatatcctatctattattgatgcaaaaaacgacgattggaaaaaatattttattagtttttataaagctaattttattaacggtaatacatttattagtgatagaacgtttaacgaggacttattcagagttgttgttcaaatagatcccgaatatttcgataatgaacgaattatgtctttattctctacgagtgctgcggacattaaacgatttgatgagttagatattaataacagttatatatctaatataatttatgaggtgaacgatatcacattagatacaatggatgatatgaagaagtgtcaaatctttaacgaggatacgtcgtattatgttaaggaatacaatacatacctgtttttgcacgagtcggatcccatggtcatagagaacggaatactaaagaaactgtcatctataaaatccaagagtagacggctgaacttgtttagcaaaaacattttaaaatattatttagacggacaattggctcgtctaggtcttgtgttagatgattataaaggagacttgttagttaaaatgataaaccatcttaagtctgtggaggatgtatccgcattcgttcgattttctacagataaaaaccctagtattcttccatcgctaatcaaaactattttagctagttataatatttccatcatcgtcttatttcaaaggtttttgagagataatctatatcatgtagaagaattcttggataaaagcatccatctaaccaagacggataagaaatatatacttcaattgataagacacggtagatcatagaacagaccaaatatattattaataatttgtatatacatagatataattatcacacatttttgataaatgggaactgctgcaacaattcagactcccaccaaattaatgaataaagaaaatgcagaaatgattttggaaaaaattgttgatcatatagttatgtatattagtgacgaatcaagtgattcagaaaataatcctgaatatattgattttcgtaacagatacgaagactatagatctctcattataaaaagtgatcacgagtttgtaaagctatgtaaaaatcatgcggagaaaagttctccagaaacgcaacaaatgattatcaaacacatatacgaacaatatcttattccagtatctgaagtactattaaaacctataatgtccatgggtgacataattacatataacggatgtaaagacaatgaatggatgctagaacaactctctaccctaaactttaacaatctccgcacatggaactcatgtagcataggcaatgtaacgcgtctgttttatacattttttagttatctgatgaaagataaactaaatatataagtataatcccattctaatactttaacctgatgtattagcatcttattagaatattaacctaactaaaagacataacataaaaactcattacatagttgataaaaagcggtaggatataaatattatggctgccaccgttccgcgttttgacgacgtgtacaaaaatgcacaaagaagaattctagatcaagaaacattttttagtagaggtctaagtagaccgttaatgaaaaacacatatctatttgataattacgcgtatggatggataccagaaactgcaatttggagtagtagatacgcaaacctagatgctagtgactattatcccatttcgttgggattacttaaaaagttcgagtttctcatgtctctatataaaggtcctattcccgtatatgaagaaaaagtaaatactgaattcatagccaatggatcgttctctggtagatacgtatcatatcttcgaaagttttctgcccttccaacaaacgagtttattagttttttgttactgacttccattccaatctataatatcttgttctggtttaaaaacacacagtttgatattactaaacacacattattcagatacgtctatacagataatgccaaacacctggcgttggctaggtatatgcatcaaacaggagactataagcctttgtttagtcgtctcaaagagaattatatatttaccggtcccgttccaataagtatcaaagatatagatcaccctaatcttagtagagcaagaagtccatccgattatgagacattagctaatattagtactatattgtactttaccaagtatgatccggtattaatgtttttattgttttacgtacctgggtattcaattactacaaaaattactccagccgtagaatatctaatggataaactgaatctaacaaagagcgacgtacaactgttgtaaattattttatgcttcgtaaaatgtaggttttgaaccaaacattctttcaaagaatgagatgcataaaactttattatccaatagattgactatttcggacgtcaatcgtttaaagtaaacttcgtaaaatattctttgatcactgccgagtttaaaacttctatcgataattgtctcatatgttttaatatttacaagttttttggtccatggtacattagccggacaaatatatgcaaaataatatcgttctccaagttctatagtttctggattatttttattatattcagtaactaaatacatattagggttatctgcggatttataatttgagtgatgcattctactcaacataaataattctagaggagacgatctactatcaaattcggatcgtaaatctgtttctaaagaacggagaatatctatacatacctgattagaattcatccgtccttcagacaacatctcagacagtctggttttgtacatcttaatcatattcttatgaaacttggaaacatctcttctagtttcactagtacctttattaattctctcaggtacagattttgaattcgacgatgctgagtatttcatcgttgtatatttcttcttcgattgcataatcagattcttatataccgcctcaaactctattttaaaattattaaacaatactctattattaatcagtcgttctaactctttcgctatttctatagacttatctacatcttgactgtctatctctgtaaacacggagtcggtatctccatacacgctacgaaaacgaaatctgtaatctataggcaacgatgttttcacaatcggattaatatctctatcgtccatataaaatggattacttaatggattggcaaaccgtaacataccgttagataactctgctccatttagtaccgattctagatacaagatcattctacgtcctatggatgtgcaactcttagccgaagcgtatgagtatagagcactatttctaaatcccatcagaccatatactgagttggctactatcttgtacgtatattgcatggaatcatagatggccttttcagttgaactggtagcctgttttagcatctttttatatctggctctctctgccaaaaatgttcttaatagtctaggaatggttccttctatcgatctatcgaaaattgctatttcagagatgaggttcggtagtctaggttcacaatgaaccgtaatatatctaggaggtggatatttctgaagcaatagctgattatttatttcttcttccaatctattggtactaacaacgacaccgactaatgtttccggagatagatttccaaagatacacacattaggatacagactgttataatcaaagattaatacattattactaaacattttttgttttggagcaaataccttaccgccttcataaggaaacttttgttttgtttctgatctaactaagatagttttagtttccaacaatagctttaacagtggacccttgatgactgtactcgctctatattcgaataccatggattgaggaagcacatatgttgacgcacccgcgtctgtttttgtttctactccataatactcccacaaatactgacacaaacaagcatcatgaatacagtatctagccatatctaaagctatgtttagattataatccttatacatctgagctaaatcaacgtcatcctttccgaaagataatttatatgtatcattaggtaaagtaggacataatagtacgactttaaatccattttcccaaatatctttacgaattactttacatataatatcctcatcaacagtcacataattacctgtggttaaaacctttgcaaatgcagcggctttgcctttcgcgtctgtagtatcgtcaccgatgaacgtcatttctctaactcctctatttaatactttacccatgcaactgaacgcgttcttggatatagaatccaatttgtacgaatccaatttttcaaatttttgaatgaatgaatatagatcgaaaaatatagttccattattgttattaacgtgaaacgtagtattggccatgccgcctactcccttatgactagactgatttctctcataaatacagagatgtacagcttcctttttgtccggagatctaaagataattttctctcctgttaataactctagacgattagtaatatatctcagatcaaagttatgtccgttaaaggtaacgacgtagtcgaacgttagttccaacaattgtttagctattcgtaacaaaactatttcagaacatagaactagttctcgttcgtaatccatttccattagtgactgtatcctcaaacatcctctatcgacggcttcttgtatttcctgttccgttaacatctcttcattaatgagcgtaaacaataatcgtttaccacttaaatcgatataacagtaacttgtatgcgagattgggttaataaatacagaaggaaacttcttatcgaagtgacactctatatctagaaataagtacgatcttgggatatcgaatctaggtatttttttagcgaaacagttacgtggatcgtcacaatgataacatccattgttaatctttgtcaaatattgctcgtccaacgagtaacatccgtctggagatatcccgttagaaatataaaaccaactaatattgagaaattcatccatggtggcattttgtatgctgcgtttctttggctcttctatcaaccacatatctgcgacggagcattttctatctttaatatctagattataacttattgtctcgtcaatgtctatagttctcatctttcccaacggcctcgcattaaatggaggaggagacaatgactgatatatttcgtccgtcactacgtaataaaagtaatgaggaaatcgtataaatacggtctcgccatttcgacatctggatttcagatataaaaatctgttttcaccgtgactttcaaaccaattaatgcaccgaacatccatttatagaatttagaaatatattttcatttaaatgaatcccaaacattggggaagagccgtatggaccattatttttatagtactttcgcaagcgggtttagacggcaacatagaagcgtgtaaacgaaaactatatactatagttagcactcttccatgtcctgcatgtagacggcacgcgactatcgctatagaggacaataatgtcatgtctagcgatgatctgaattatatttattattttttcatcagattatttaacaatttggcatctgatcccaaatacgcgatcgatgtgacaaaggttaaccctttataaacttaacccattataaaacttatgattagtcacaactgaaataaccgcgtgattattttttggtataattctacacggcatggtttctgtgactatgaattcaacccccgttacattagtgaaatctttaacaaacagcaagggttcgtcaaagacataaaactcattgtttacaatcgaaatagaccccctatcacacttaaaataaaaaatatccttatcctttaccaccaaataaaattctgattggtcaatgtgaatgtattcacttaacagttccacaaatttatttattaactccgaggcacatacatcgtcggtattttttatggcaaactttactcttccagcatccgtttctaaaaaaatattaacgagttccatttatatcatccaatattattgaaatgacgttgatggacagatgatacaaataagaaggtacggtacctttgtccaccatctcctccaattcatgctctattttgtcattaactttaatgtatgaaaacagtacgccacatgcttccatgacagtgtgtaacactttggatacaaaatgtttgacattagtataattgtccaagactgtcaatctataatagatagtagctataatatattctatgatggtattgaagaagatgacaaccttggcatattgatcatttaacacagacatggtatcaacagatagcttgaatgaaagagaatcagtaattggaataagcgtcttctcgatagagtgtccgtataccaacatgtctgatattttgatgtattccattaaattatttagttttttctttttattctcgttaaacagcatttctgtcaacggaccccaacatcgttgaccgattaagttttgattgatttttccgtgtaaggcgtatctagtcagatcgtatagcctatccaataatccatcgtctgtgtgtagatcacatcgtacactttttaattctctatagaagagcgacagacatctggagcaattacagacagcaatttctttattctctacagatgtaagatacttgaagacattcctatgatgatgcagaattttggataacacggtattgatggtatctgttaccataattcctttgatggctgatagtgtcagagcacaagatttccaatctttgacaatttttagcaccattatctttgttttgatatctatatcagacagcatggtgcgtctgacaacacagggattaagacggaaagatgaaatgattctctcaacatcttcaatagataccttgctattttttctggcattatctatatgtgcgagaatatcctctagagaatcagtatcctttttgatgatagtggatctcaatgacatgggacgtttaaaccttcttattctatcaccagattgcatggtgatttgtcttctttcttttatcataatgtaatctctaaattcatcggcaaattgtctatatctaaaatcataatatgagatgtttacctctacaaatatctgttcgtccaatgttagagtatttacatcagttttgtattccaaattaaacatggcaacggatttaattttatattcctctattaagtcctcgtcgataataacagaatgtagataatcatttaatccgtcgtacatggttggaagatgcttgttgacaaaatctttaattgtcttgatgaaggtgggactatatctaacatcttgattaataaaatttataacattgtccataggatactttgtaactagttttatacacatctcttcatcggtaagtttagacagaatatcgtgaacaggtggtatattatattcatcagatatacgaagaacaatgtccaaatctatattgtttaatatattatatagatgtagcgtagctcctacaggaatatctttaactaagtcaatgatttcatcaaccgttagatctattttaaagttaatcatataggcattgatttttaaaaggtatgtagccttgactacattctcattaattaaccattccaagtcattgtgtgtaagaagattatattctatcataagcttgactacatttggtcccgataccattaaagaattcttatgatataaggaaacagattttaggtactcatctactctacaagaattttggagagccttaacgatatcagtgacgtttattatttcaggaggaaagaatctaacattgagaatatcggaattaatagcttccagatacagtgattttggcaatagtccgtgtaatccataatccagtaacacgagctggtgcttgctagacaccttttcaatgtttaatttttttgaaataagctttgataaagccttcctcgcaaattccggatacatgaacatgtcggcgacatgattaagtattgttttttcattatttttatattttctcaacaagttctcaataccccaatagatgatagaatatcacccaatgcgtccatgttgtctatttccaacaggtcgctatatccaccaatagaagtttttccaaaaaagattctaggaacagttctaccaccagtaatttgttcaaaataatcccgcaattcattttcgggtttaaattctttaatatcgacaatttcatacgctcctcttttgaaactaaacttatttagaatatccagtgcatttctacaaaaaggacatgtatacttgacaaaaattgtcactttgttattggccaacctttgttgtacaaattcctcggccattttaatatttaagtgatataaaactatctcgacttatttaactctttagtcgagatatatggacgcagatagctatatgatagccaactacagaaggcaaacgctataaaaaacataattacgacgagcatatttataaatatttttattcagcattacttgatatagtaatattaggcacagtcaaacattcaaccactctcgatacattaactctctcattttctttaacaaattctgcaatatcttcgtaaaaagattcttgaaactttttagaatatctatcgactctagatgaaatagcgttcgtcaacatactatgttttgtatacataaaggcgcccattttaacagtttctagtgacaaaatgctagcgatcctaggatcctttagaatcacatagattgacgattcgtctctcttagtaactctagtaaaataatcatacaatctagtacgcgaaataatattatccttgacttgaggagatctaaacaatctagttttgagaacatcgataagttcatcgggaatgacatacatactatctttaatagaactcttttcatccagttgaatggattcgtccttaaccaactgattaatgagatcttctattttatcattttccagatgatatgtatgtccattaaagttaaattgtgtagcgcttctttttagtctagcagccaatactttaacatcactaatatcgatatacaaaggagatgatttatctatggcattaagaattcgtttttcgacatccgtcaaaaccaattcctttttgcctgtatcatccagttttccatcctttgtaaagaaattattttctactagactattaataagactgataaggattcctccataattgcacaatccaaactttttaacaaaactagactttacgagatctacaggaatgcgtacttcaggttttttagcttgtgattttttcttttgcggacattttctagtaaccaactcatctaccatttcattgattttagcagtgaaataagctttcaatgcacgggcactgatactattgaaaacgagttgatcttcaaattccgccatttaagttcaccaaacaacttttaaatacaaatatatcaatagtagtagaataagaactataaaaaaaataataattaaccaaccccaacaaccggtattattagttgatgtggtagttttctcatcacttagaacagatttaacaatttctataaagtctgtcaaatcatcttccggagaccccataaatacaccaaatatagcggcgtacaacttatccatttatacattgaatattggcttttctttatcgctatcttcatcatattcatcatcaatatcaacaagtcccagattacgagccagatcttcttctacattttcagtcattgatacacgttcactatctccagagagtccgataacgttagccaccacttctctatcaatgattagtttcttgagcgcgaaagtaatttttgtttccgttccggatctatagaagacgataggtgtgataattgccttggccaattgtctttctcttttactgagtgattctagttcaccttctatagatctgagaatggatgattctccagtcgaaacatattctaccatggatccgtttaatttgttgatgaagatggattcatccttaaatgttttctctgtaatagtttccaccgaaagactatgcaaagaatttggaatgcgttccttgtgcttaatgtttccatagacggcttctagaagttgatacaacataggactagccgcggtaacttttatttttagaaagtatccatcgcttctatcttgtttagatttatttttataaagtttagtctctccttccaacataataaaagtggaagtcatttgactagataaactatcagtaagttttatagagatagacgaacaattagcgtattgagaagcatttagtgtaacgtattcgatacattttgcattagatttactaatcgattttgcatactctataacacccgcacaagtctgtagagaatcgctagatgcagtaggtcttggtgaagtttcaactctcttcttgattaccttactcatgattaaacctaaataattgtactttgtaatataatgatatatattttcactttatctcatttgagaataaaaatgtttttgtttaaccactgcatgatgtacagatttcggaatcgcaaaccaccagtggttttattttatccttgtccaatgtgaattgaatgggagcggatgcgggtttcgtacgtagatagtacattcccgtttttagaccgagactccatccgtaaaaatgcatactcgttagtttggaataactcggatctgctatatggatattcatagattgactttgatcgatgaaggctcccctgtctgcagccatttttatgatcgtcttttgtggaatttcccaaatagttttataaactcgcttaatatcttctggaaggtttgtattctgaatggatccaccatctgccataatcctattcttgatctcatcattccataattttctctcggttaaaactctaaggagatgcggattaactacttgaaattctccagacaatactctccgagtgtaaatattactggtatacggttccaccgactcattatttcccaaaatttgagcagttgatgcagtcggcataggtgccaccaataaactatttctaagaccgtatgttctgattttatcttttagaggttcccaattccaaagatccgacggtacaacattccaaagatcatattgtagaataccgttactggcgtacgatcctacatatgtatcgtatggtccttccttctcagctagttcacaactcgcctctaatgcaccgtaataaatggtttcgaagatcttcttatttagatcttgtgcttccaggctatcaaatggataatttaagagaataaacgcgtccgctaatccttgaacaccaataccgataggtctatgtctcttattagagatttcagcttctggaataggataataattaatatctataattttattgagatttctgacaattactttgaccacatccttcagtttgagaaaatcaaatcgcccatctattacaaacatgttcaaggcaacagatgccagattacaaacggctacctcattagcatccgcatattgtattatctcagtgcaaagattactacacttgatagttcctaaattttgttgattactctttttgttacacgcatccttataaagaatgaatggagtaccagtttcaatctgagattctataatcgctttccagacgactcgagcctttattatagatttgtatctcctttctctttcgtatagtgtatacaatcgttcgaactcgtctccccaaacattgtccaatccaggacattcatccggacacatcaacgaccactctccgtcatccttcactcgtttcataaagagatcaggaatccaaagagctataaatagatctctggttctatgttcctcgtttcctgtattctttttaagatcgaggaacgccataatatcagaatgccacggttccaagtatatggccataactccaggccgtttgtttcctccctgatctatgtatctagcggtgttattataaactctcaacattggaataataccgtttgatataccattggtaccggagatatagcttccactggcacgaatattactaattgatagacctattccccctgccattttagagattaatgcgcatcgttttaacgtgtcatagataccctctatgctatcatcgatcatgttaagtagaaaacagctagacatttggtgacgactagttcccgcattaaataaggtaggagaagcgtgcgtaaaccatttttcagaaagtagattgtacgtctcaatagctgagtctatatcccattgatgaattcctactgcgacacgcattaacatgtgctgaggtctttcaacgatcttgttgtttattttcaacaagtaggatttttccaaagttttaaaaccaaaatagttgtatgaaaagtctcgttcgtaaataataaccgagttgagtttatccttatatttgttaactatatccatggtgatacttgaaataatcggagaatgtttcccatttttaggattaacatagttgaataaatcctccatcacttcactaaatagtttttttgtttccttgtgtagatttgatacggctattctggcggctagaatggcataatccggatgttgtgtagtacaagtggctgctatttcggctgccagagtgtccaattctaccgttgttactccattatatattccttgaataaccttcatagctattttaataggatctatatgatccgtgtttaagccataacataattttctaatacgagacgtgattttatcaaacatgacattttccttgtatccatttcgtttaatgacaaacatttttgttggtgtaataaaaaaattatttaacttttcattaatagggatttgacgtatgtagcgtacaaaatgattgttcctggtatatagataaagagtcctatatatttgaaaatcgttacggctcgattaaactttaatgattgcatagtgaatatatcattaggatttaactccttgactatcatggcggcgccagaaattaccatcaaaagcattaatacagttataccgatcgcagttagaacggttatagcatccaccatttatatctaaaaattagatcaaagaatatgtgacaaagtcctagttgtatactgagaattgacgaaacaatgtttcttacatatttttttcttattagtaaccgacttaatagtaggaactggaaaactagacttgattattctataagtatagatacccttccaaataatattctctttgataaaagttccagaaaatgtagaattttttaaaaagttatcttttgctattaccaagattgtgtttagacgcttattattaatatgagtgatgaaatccacaccgcctctagatatcgcctttatttccacattagatggtaaatccaatagtgaaactatctttttaggaatgtatggactcgcgtttagaggagtaaacgtcttaggcgtcggaaaggatgattcatcaaacgaataaacaatttcacaaatggatgttaatgtattagtaggaaattttttgacgctattggaattgaagattctaatggatgatgttctacctatttcatccgataacatgttaatttccgacaccaacggttttaatatttcgatgatatacggtagtctctctttcggacttatatagcttattccacaatacgagtcattatatactccaaaaaacaaaataactagtataaaatctgtatcgaatgggaaaaacgaaattatcgacataggtatagaatccggaacattgaacgtattaatacttaattctttttctgtggtaagtaccgataggttattgacattgtatggttttaaatattctataacttgagacttgatagatattagtgatgaattgaaaattatttttatcaccacgtgtgtttcaggatcatcgtcgacgcccgtcaaccaaccgaacggagtaaaataaatatcattaatatatgctctagatattagtatttttatcaatcctttgattatcatcttctcgtaggcgaatgattccatgatcaagagtgatttaagaacatcctccggagtattaatgggcttagtaaacagtccatcgttgcaataataaaagttatccaagttaaaggatattatgcattcgtttaaagatatcacctcatctgacggagacaattttttggtaggttttagagactttgaagctacttgtttaacaaagttattcatcgtcgtctactattctatttaattttgtagttaatttatcacatatcacattaattgactttttggtccacttttccatacgtttatattcttttaatcctgcgttatccgtttccgttatatccagggatagatcttgcaagttaaatagaatgctcttaaataatgtcattttcttatccgctaaaaatttaaagaatgtataaacctttttcagagatttgaaactcttaggtggtgtcctagtacacaatatcataaacaaactaataaacattccacattcagattccaacagctgattaacttccacattaatacagcctattttcgctccaaatgtacattcgaaaaatctgaataaaacatcgatgtcacaatttgtattatccaatacagaatgtttgtgattcgtgttaaaaccatcggagaaggaatagaaataaaaattattatagtggtggaattcagttggaatattgcctccggagtcataaaaggatactaaacattgttttttatcataaattacacatttccaatgagacaaataacaaaatccaaacattacaaatctagaggtagaacttttaattttgtctttaagtatatacgataagatatgtttattcataaacgcgtcaaatttttcatgaatcgctaaggagtttaagaatctcatgtcaaattgtcctatataatccacttcggatccataagcaaactgagagactaagttcttaatacttcgattgctcatccaggctcctctctcaggctctattttcatcttgacgacctttggattttcaccagtatgtattcctttacgtgataaatcatcgattttcaaatccatttgtgagaagtctatcgccttagatactttttcccgtagtcgaggtttaaaaaaatacgctaacggtatactagtaggtaactcaaagacatcatatatagaatggtaacgcgtctttaactcgtcggttaactctttcttttgatcgagttcgtcgctactattgggtctgctcaggtgccccgactctactagttccaacatcataccgataggaatacaagacactttgccggcggttgtagatttatcatatttttccactacatatccgttacaatttgttaaaaatttagatacatctatattgctacataatccagctagtgaatatatatgacataataaattggtaaatcctagttctggtattttactaattactaaatctgtatatctttccatttatcatggaaaagaatttaccagatatcttcttttttccaaactgcgttaatgtattctcttacaaatattcacaagatgaattcagtaatatgagtaaaacggaacgtgatagtttctcattggccgtgtttccagttataaaacatagatggcataacgcacacgttgtaaaacataaaggaatatacaaagttagtacagaagcacgtggaaaaaaagtatctcctccatcactaggaaaacccgcacacataaacctaaccgcgaagcaatatatatacagtgaacacacaataagctttgaatgttatagttttctaaaatgtataacaaatacagaaatcaattcgttcgatgagtatatattaagaggactattagaagctggtaatagtttacagatattttccaattccgtaggtaaacgaacagatactataggtgtactagggaataagtatccatttagcaaaattccattggcctcattaactcctaaagcacaacgagagatattttcagcgtggatttctcatagacctgtagttttaactggaggaactggagtgggtaagacgtcacaggtacccaagttattgctttggtttaattatttatttggtggattctctactctagataaaatcactgactttcacgaaagaccagtcattctatctcttcctaggatagctttagttagattgcatagcaataccattttaaaatcattgggatttaaggtactagatggatctcctatttctttacggtacggatctataccggaagaattaataaacaaacaaccaaaaaaatatggaattgtattttctacccataagttatctctaacaaaactatttagttatggcactcttattatagacgaagttcatgagcatgatcaaataggagatattattatagcagtagcgagaaagcatcatacgaaaatagattctatgtttttaatgactgccacgttagaggatgacagggaacggctaaaagtatttttacctaatcccgcatttatacatattcctggagatacactgtttaaaattagcgaggtatttattcataataagataaatccatcttccagaatggcatacatagaagaagaaaagagaaatttagttactgctatacagatgtatactcctcctgatggatcatccggtatagtctttgtggcatccgttgcacagtgtcacgaatataaatcatatttagaaaaaagattaccgtatgatatgtatattattcatggtaaggtcttagatatagacgaaatattagaaaaagtgtattcatcacctaatgtatcgataattatttctactccttatttggaatccagcgttactatacgcaatgttacacacatttatgatatgggtagagtttttgtccccgctccttttggaggatcgcaacaatttatttctaaatctatgagagatcaacgaaaaggaagagtaggaagagttaatcctggtacatacgtctatttctatgatctgtcttatatgaagtctatacagcgaatagattcagaatttctacataattatatattgtacgctaataagtttaatctaacactccccgaagatttgtttataatccctacaaatttggatattctatggcgtacaaaggaatatatagactcgttcgatattagtacagaaacatggaataaattattatccaattattatatgaagatgatagagtatgctaaactttatgtactaagtcctattctcgctgaggagttggataactttgagaggacgggagaattaactagtattgtacgagaagccattttatctctaaatttacaaattaagattttaaattttaaacataaagatgatgatacgtatatacacttttgtaaaatattattcggtgtctataacggaacaaacgctactatatattatcatagacctctaacgggatatatgaatatgatttcagatactatatttgttcctgtagataataactaaaaatcaaactctaatgaccacatctttttttagagatgaaaaattttccacatctccttttgtagacacgactaaacattttgcagaaaaaagtttattagtgtttagataatcgtatacttcatcagtgtagatagtaaatgtgaacagataaaaggtattcttgctcaatagattggtaaattccatagaatatattaatcctttcttcttgagatcccacatcatttcaaccagagacgttttatccaatgatttacctcgtactataccacatacaaaactagattttgcagtgacgtcgtacctggtattcctaccaaacaaaattttacttttagttcttttagaaaattctaaggtagaatctctatttgccaatatgtcatctatggaattaccactagcaaaaaatgatagaaatatatattgatacatcgcagctggttttgatctactatactttaaaaacgaatcagattccataattgcctgtatatcatcagctgaaaaactatgttttacacgtattccttcggcatttctttttaatgatatatcttgtttagacaatgataaagttatcatgtccatgagagacgcgtctccgtatcgtataaatatttcattagatgttagacgcttcattaggggtatacttctataaggtttcttaatcagtccatcattggttgcgtcaagaactactatcggatgttgttgggtatctctagtgttacacatggccttactaaagtttgggtaaataactatgatatctctattaattatagatgcatatatttcattcgtcaaggatattagtatcgacttgctatcgtcattaatacgtgtaatgtaatcatataaatcatgcgatagccaaggaaaatttaaatagatgttcatcatataatcgtcgctataattcatattaatacgttgacattgactaatttgtaatatagcctcgccacgaagaaagctctcgtattcagtttcatcgataaaggataccgttaaatataactggttgccgatagtctcatagtctattaagtggtaagtttcgtacaaatacagaatccctaaaatattatctaatgttggattaatctttaccataactgtataaaatggagacggagtcataactattttaccgtttgtacttactggaatagatgaaggaataatctccggacatgctggtaaagacccaaatgtctgtttgaagaaatccaatgttccaggtcctaatctcttaacaaaaattacgatattcgatcccgatatcctttgcattctatttaccagcatatcacgaactatattaagattatctatcatgtctattctcccaccgttatataaatcgcctccgctaagaaacgttagtatatccatacaatggaatacttcatttctaaaatagtattcgttttctaattctttaatgtgaaatcgtatactagaaagggaaaaattatctttgagttttccgttagaaaagaaccacgaaactaatgttctgattgcgtccgattccgttgctgaattaatggatttacaccaaaaactcatataacttctagatgtagaagcattcgctaaaaaattagtagaatcaaaggatataagtagatgttccaacaagtgagcaattcccaagatttcatctatatcattctcgaatccgaaattagaaattcccaagtagatatcctttttcatccgatcgttgatgaaaatacgaactttattcggtaagacaatcatttactaaggagtaaaataggaagtaatgttcgtatgtcgttatcatcgtataaattaaaggtgtgttttttaccattaagtgacattataattttaccaatattggaattataatataggtgtatttgcgcactcgcgacggttgatgcatcggtaaatatagctgtatctaatgttctagtcggtatttcatcatttcgctgtctaataatagcgttttctctatctgtttccattacagctgcctgaagtttattggtcggataatatgtaaaataataagaaatacatacgaataacaaaaataaaataagatataataaagatgccatttagagatctaattttgtttaacttgtccaaattcctacttacagaagatgaggaatcgttggagatagtgtcttccttatgtagaggatttgaaatatcttataatgacttgataacttactttccagataggaaataccataaatatatttataaagtatttgaacatgtagatttatcggaggaattaagtatggaattccatgatacaactctgagagatttagtctatcttagattgtacaagtattccaagtgtatacggccgtgttataaattaggagataatctaaaaggcatagttgttataaaggacaggaatatttatattagggaagcaaatgatgacttgatagaatatctcctcaaggaatacactcctcagatttatacatattctaatgagcgcgtccccataactggttcaaaattaattctttgtggattttctcaagttacatttatggcgtatacaacgtcgcatataacaacaaataaaaaggtagatgttctcgtttccaaaaaatgtatagatgaactagtcgatccaataaattatcaaatacttcaaaatttatttgataaaggaagcggaacaataaacaaaatactcaggaagatattttattcggtaacaggtggccaaactccataggtagctttttctatttcggattttagaatttccaaattcaccagcgatttatcggttttggtgaaatccaaggatttattaatgtccacaaatgccatttgttttgtctgtggattgtatttgaaaatggaaacgatgtagttagatagatgcgctgcgaagtttcctattagggttccgcgcttcacgtcacccagcatacttgaatcaccatcctttaaaaaaaatgataagatatcaacatggagtatatcatactcgaattttaattcttctactgactcactgacattttcacaaatactacaatacggtttaccgaaaataatcagtacgttcttcatttatgggtatcaaaaacttaaaatcgttactgctggaaaataaatcactgacgatattagatgataatttatacaaagtatacaatggaatatttgtggatacaatgagtatttatatagccgtcgccaattgtgtcagaaacttagaagagttaactacggtattcataaaatacgtaaacggatgggtaaaaaagggagggcatgtaaccctttttatcgatagaggaagtataaaaattaaacaagacgttagagacaagagacgtaaatattctaaattaaccaaggacagaaaaatgttagaattagaaaagtgtacatccgaaatacaaaatgttaccggatttatggaagaagaaataaaggcagaaatgcaattaaaaatcgataaactcacatttcaaatatatttatctgattctgataacataaaaatatcattgaatgagatactaacacatttcaacaataatgagaatgttacattattttattgtgatgaacgagacgcagaattcgttatgtgtctcgaggctaaaacacatttctctaccacaggagaatggccgttgataataagtaccgatcaggatactatgctatttgcatctgctgataatcatcctaagatgataaaaaacttaactcaactgtttaaatttgttccctcggcagaggataactatttagcaaaattaacggcgttagtgaatggatgtgatttctttcctggactctatggggcatctataacacccaccaacttaaacaaaatacaattgtttagtgattttacaatcgataatatagtcactagtttggcaattaaaaattattatagaaagactaactctaccgtagacgtgcgtaatattgttacgtttataaacgattacgctaatttagacgatgtctactcgtatattcctccttgtcaatgcactgttcaagaatttatattttccgcattagatgaaaaatggaatgaatttaaatcatcttatttagaaagcgtgccgttaccctgccaattaatgtacgcgttagaaccacgcaaggagattgatgtttcagaagttaaaactttatcatcttatatagatttcgaaaatactaaatcagatatcgatgttataaaatctatatcctcgatcttcggatattctaacgaaaactgtaacacgatagtattcggcatctataaggataatttactactgagtataaataattcattttactttaacgatagtctgttaataaccaatactaaaagtgataatataataaatataggttactagattaaaaatggtgttccaactcgtgtgctctacatgcggtaaagatatttctcacgaacgatataaattgattatacgaaaaaaatcattaaaggatgtactcgtcagtgtaaagaacgaatgttgtaggttaaaattatctacacaaatagaacctcaacgtaacttaacagtgcaacctctattggatataaactaatatggatccggttaattttatcaagacatatgcgcctagaggttctattatttttattaattataccatgtcattaacaagtcatttgaatccatcgatagaaaaacatgtgggtatttattatggtacgttattatcggaacacttggtagttgaatctacctatagaaaaggagttcgaatagtcccattggatagtttttttgaaggatatcttagtgcaaaagtatacatgttagagaatattcaagttatgaaaatagcagctgatacgtcattaactttattgggtattccgtatggatttggtcatgatagaatgtattgttttaaattggtagctgactgttataaaaatgccggtattgatacatcgtctaaacgaatattgggcaaagatatttttctgagccaaaacttcacagacgataatagatggataaagatatatgattctaataatttaacattttggcaaattgattaccttaaagggtgagttaatatgcataactactcctccgttgttttttccctcgttctttttcttaacgttgtttgccatcactctcataatgtaaagatattctaaaatggtaaacttttgcatatcggacgcagaaattggtataaatgttgtaattgtattatttcccgtcaatggactagtcacagctccatcagttttatatcctttagagtatttctcactcgtgtctaacattctagagcattccatgatctgtttatcgttgatattggccggaaagatagattttttattttttattatattactattggcaattgtagatataacttctggtaaatatttttctaccttttcaatctcttctattttcaagccggctatatattctgctatattgttgctagtatcaataccttttctggctaagaagtcatatgtggtattcactatatcagttttaactggtagttccattagcctttccacttctgcagaataatcagaaattggttctttaccagaaaatccagctactataataggctcaccgatgatcattggcaaaatcctatattgtaccagattaatgagagcatatttcatttccaataattctgctagttcttgagacattgatttatttgatgaatctagttggttctctagatactctaccatttctgccgcatacaataacttgttagataaaatcagggttatcaaagtgtttagcgtggctagaatagtgggcttgcatgtattaaagaatgcggtagtatgagtaaaccgttttaacgaattatatagtctccagaaatctgtggcgttacatacatgagccgaatgacatcgaagattgtccaatatttttaatagctgctctttgtccattatttctatatttgactcgcaacaattgtagataccattaatcaccgattcctttttcgatgccggacaatagcacaattgtttagctttggactctatgtattcagaattaatagatatatctctcaatacagattgcactatacattttgaaactatgtcaaaaattgtagaacgacgctgttctgcagccatttaactttaaataatttacaaaaatttaaaatgagcatccgtataaaaatcgataaactgcgccaaattgtggcatatttttcagagttcagtgaagaagtgtctataaatgtagactcgacggatgagttaatgtatatttttgccgccttgggcggatctgtaaacatttgggcaattatacctctaagtgcatcagtgttttaccgaggagccgaaaatattgtgtttaatcttcctgtgtccaaggtaaaatcgtgtttgtgtagttttcacaatgatgccatcatagatatagaacctgatctggaaaataatctagtaaaactttctagttatcatgtagtaagtgtcgattgtaacaaggaactgatgcctattaggacagatactactatttgtctaagtatagatcaaaagaaatcttacgtgtttaattttcacaagtatgaagaaaaatgttgtggtagaaccgtcattcatctagaatggttgttgggctttatcaagtgtattagtcagcatcagcatctggctattatgtttaaagatgacaatattattatgaagactcctggtaatactgatgcgttttccagggaatattctatgactgaatgttctcaagaactacaaaagttttctttcaaaatagctatctcgtctctcaacaaactacgaggattcaaaaagagagtcaatgtttttgaaactagaatcgtaatggataatgacgataacattttaggaatgttgttttcggatagagttcaatcctttaagatcaacatctttatggcgtttttagattaatactttcaatgagataaatatgggtggcggagtaagtgttgagctccctaaacgggatccgcctccgggagtacccactgatgagatgttattaaacgtggataaaatgcatgacgtgatagctcccgctaagcttttagaatatgtgcatataggaccactagcaaaagataaagaggataaagtaaagaaaagatatccagagtttagattagtcaacacaggacccggtggtctttcggcattgttaagacaatcgtataatggaaccgcacccaattgctgtcgcacttttaatcgtactcattattggaagaaggatggaaagatatcagataagtatgaagagggtgcagtattagaatcgtgttggccagacgttcacgacactggaaaatgcgatgttgatttattcgactggtgtcagggggatacgttcgatagaaacatatgccatcagtggatcggttcagcctttaataggagtaatagaactgtagagggtcaacaatcgttaataaatctgtataataagatgcaaacattatgtagtaaagatgctagtgtaccaatatgcgaatcatttttgcattatttacgcgcacacaatacagaagatagcaaagagatgatcgattatattctaagacaacagtctgcggactttaaacagaaatatatgagatgtagttatcccactagagataagttagaagagtcattaaaatatgcggaacctcgagaatgttgggatccagagtgttcgaatgccaatgttaatttcttactaacacgtaattataataatttaggactttgcaatattgtacgatgtaataccagcgtgaacaacttacagatggataaaacttcctcattaagattgtcatgtggattaagcaatagtgatagattttctactgttcccgtcaatagagcaaaagtagttcaacataatattaaacactcgttcgacctaaaattgcatttgatcagtttattatctctcttggtaatatggatactaattgtagctatttaaatgggtgccgcggcaagcatacagacgacggtgaatacactcagcgaacgtatctcgtctaaattagaacaagaagcgaacgctagtgctcaaacaaaatgtgatatagaaatcggaaatttttatatccgacaaaaccatggatgtaacctcactgttaaaaatatgtgctctgcggacgcggatgctcagttggatgctgtgttatcagccgctacagaaacatatagtggattaacaccggaacaaaaagcatacgtgccagctatgtttactgctgcgttaaacattcagacgagtgtaaacactgttgttagagattttgaaaattatgtgaaacagacttgtaattctagcgcggtcgtcgataacaaattaaagatacaaaacgtaatcatagatgaatgttacggagccccaggatctccaacaaatttggaatttattaatacaggatctagcaaaggaaattgtgccattaaagcgttgatgcaattgacgactaaggccactactcaaatagcacctagacaagttgctggtacaggagttcagttttatatgattgttatcggtgttataatattggcagcgttgtttatgtactatgccaagcgtatgttgttcacatccaccaatgataaaatcaaacttattttagccaataaggaaaacgtccattggactacttacatggacacattctttagaacttctccgatggttattgctaccacggatatgcaaaactgaaaatatattgataatattttaatagattaacatggaagttatcgctgatcgtctagacgatatagtgaaacaaaatatagcggatgaaaaatttgtagattttgttatacacggtctagagcatcaatgtcctgctatacttcgaccattaattaggttgtttattgatatactattatttgttatagtaatttatatttttacggtacgtctagtaagtagaaattatcaaatgttgttggtggtgctagtcatcacattaactattttttattactttatactataatagtactagactgacttctaacaaacatctcacctgccataaataaatgcttgatattaaagtcttctatttctaacactattccatctgtggaaaataatactctgacattatcgctaattgacacatcggtgagtgatatgcctataaagtaataatcttctttgggcacatataccagtgtaccaggttctaacaacctatttactggtgctcctgtagcatactttttctttaccttgagaatatccatcgtttgcttggtcaatagcgatatgtgattttttatcaaccactcaaaaaagtaattggagtgttcatatcctctacgggctattgtctcatggccgtgtatgaaatttaagtaacacgactgtggtagatttgttctatagagccgattgccgcaaatagatagaactaccaatatgtctgtacaaatgttaaacattaattgattaacagaaaaaacaatgttcgttctgggaatagaaaccagatcaaaacaaaattcgttagaatatatgccacgtttatacatggaatataaaataactacagtttgaaaaataacagtatcatttaaacatttaacttgcggggttaatctcacaactttactgtttttgaactgttcaaaatatagcatcgatccgtgagaaatacgtttagccgcctttaatagaggaaatcccaccgcctttctggatctcaccaacgacgatagttctgaccagcaactcatttcttcatcatccacctgttttaacatataataggcaggagatagatatccgtcattgcaatattccttctcgtaggcacacaatctaatattgataaaatctccattctcttctctgcatttattatcttgtctcggtggctgattaggctgtggtcttggtttaggccttggtctatcgttgttgaatctattttggtcattaaatctttcatttcttcctggtatatttctatcacctcgtttggttggatttttgtctatattatcgtttgtaacatcggtacgggtattcatttatcacaaaaaaaacttctctaaatgagtctactgctagaaaacctcatcgaagaagataccatattttttgcaggaagtatatctgagtatgatgatttacaaatggttattgccggcgcaaaatccaaatttccaagatctatgctttctatttttaatatagtacctagaacgatgtcaaaatatgagttggagttgattcataacgaaaatatcacaggagcaatgtttaccacaatgtataatataagaaacaatttgggtctaggagatgataaactaactattgaagccattgaaaactatttcttggatcctaacaatgaagttatgcctcttattattaataatacggatatgactgccgtcattcctaaaaaaagtggtaggagaaagaataagaacatggttatcttccgtcaaggatcatcacctatcttgtgcattttcgaaactcgtaaaaagattaatatttataaagaaaatatggaatccgcgtcgactgagtatacacctatcggagacaacaaggctttgatatctaaatatgcgggaattaatgtcctgaatgtgtattctccttccacatccataagattgaatgccatttacggattcaccaataaaaataaactagagaaacttagtactaataaggaactagaatcgtatagttctagccctcttcaagaacccattaggttaaatgattttctgggactattggaatgtgttaaaaagaatattcctctaacagatattccgacaaaggattgattactataaatggagaatgttcctaatgtatactttaatcctgtgtttatagagcccacgtttaaacattctttattaagtgtttataaacacagattaatagttttatttgaagtattcgttgtattcattctaatatatgtattttttagatctgaattaaatatgttcttcatgcctaaacgaaaaatacccgatcctattgatagattacgacgtgctaatctagcgtgtgaagacgataaattaatgatctatggattaccatggatgacaactcaaacatctgcgttatcaataaatagtaaaccgatagtgtataaagattgtgcaaagcttttgcgatcaataaatggatcacaaccagtatctcttaacgatgttcttcgcagatgatgattcattttttaagtatttggctagtcaagatgatgaatcttcattatctgatatattgcaaatcactcaatatctagactttctgttattattattgatccaatcaaaaaataaattagaagctgtgggtcattgttatgaatctctttcagaggaatacagacaattgacaaaattcacagactttcaagattttaaaaaactgtttaacaaggtccctattgttacagatggaagggtcaaacttaataaaggatatttgttcgactttgtgattagtttgatgcgattcaaaaaagaatcctctctagctaccaccgcaatagatcctgttagatacatagatcctcgtcgcaatatcgcattttctaacgtgatggatatattaaagtcgaataaagtgaacaataattaattctttattgtcatcatgaacggcggacatattcagttgataatcggccccatgttttcaggtaaaagtacagaattaattagacgagttagacgttatcaaatagctcaatataaatgcgtgactataaaatattctaacgataatagatacggaacgggactatggacgcatgataagaataattttgaagcattggaagcaactaaactatgtgatgtcttggaatcaattacagatttctccgtgataggtatcgatgaaggacagttctttccagacattgttgaattagatcgataaaaattaattaattacccgggtaccaggcctagatctgtcgagatccggtggtggtgcaaatcaaagaactgctcctcagtggatgttgcctttacttctaggcctgtacggaagtgttacttctgctctaaaagctgctgcagggggggggggggggtgggggggccggttagggccgccatcccctcagagcgtcgggatatcgggtggcggctcgggacggaggacgcgctagtgttcttctgtgtggcagttcagaatgatggatcaagctagatcagcattctctaacttgtttggtggagaaccattgtcatatacccggttcagcctggctcggcaagtagatggcgataacagtcatgtggagatgaaacttgctgtagatgaagaagaaaatgctgacaataacacaaaggccaatgtcacaaaaccaaaaaggtgtagtggaagtatctgctatgggactattgctgtgatcgtctttttcttgattggatttatgattggctacttgggctattgtaaaggggtagaaccaaaaactgagtgtgagagactggcaggaaccgagtctccagtgagggaggagccaggagaggacttccctgcagcacgtcgcttatattgggatgacctgaagagaaagttgtcggagaaactggacagcacagacttcaccagcaccatcaagctgctgaatgaaaattcatatgtccctcgtgaggctggatctcaaaaagatgaaaatcttgcgttgtatgttgaaaatcaatttcgtgaatttaaactcagcaaagtctggcgtgatcaacattttgttaagattcaggtcaaagacagcgctcaaaactcggtgatcatagttgataagaacggtagacttgtttacctggtggagaatcctgggggttatgtggcgtatagtaaggctgcaacagttactggtaaactggtccatgctaattttggtactaaaaaagattttgaggatttatacactcctgtgaatggatctatagtgattgtcagagcagggaaaatcacctttgcagaaaaggttgcaaatgctgaaagcttaaatgcaattggtgtgttgatatacatggaccagactaaatttcccattgttaacgcagaactttcattctttggacatgctcatctggggacaggtgacccttacacacctggattcccttccttcaatcacactcagtttccaccatctcggtcatcaggattgcctaatatacctgtccagacaatctccagagctgctgcagaaaagctgtttgggaatatggaaggagactgtccctctgactggaaaacagactctacatgtaggatggtaacctcagaaagcaagaatgtgaagctcactgtgagcaatgtgctgaaagagataaaaattcttaacatctttggagttattaaaggctttgtagaaccagatcactatgttgtagttggggcccagagagatgcatggggccctggagctgcaaaatccggtgtaggcacagctctcctattgaaacttgcccagatgttctcagatatggtcttaaaagatgggtttcagcccagcagaagcattatctttgccagttggagtgctggagactttggatcggttggtgccactgaatggctagagggatacctttcgtccctgcatttaaaggctttcacttatattaatctggataaagcggttcttggtaccagcaacttcaaggtttctgccagcccactgttgtatacgcttattgagaaaacaatgcaaaatgtgaagcatccggttactgggcaatttctatatcaggacagcaactgggccagcaaagttgagaaactcactttagacaatgctgctttccctttccttgcatattctggaatcccagcagtttctttctgtttttgcgaggacacagattatccttatttgggtaccaccatggacacctataaggaactgattgagaggattcctgagttgaacaaagtggcacgagcagctgcagaggtcgctggtcagttcgtgattaaactaacccatgatgttgaattgaacctggactatgagaggtacaacagccaactgctttcatttgtgagggatctgaaccaatacagagcagacataaaggaaatgggcctgagtttacagtggctgtattctgctcgtggagacttcttccgtgctacttccagactaacaacagatttcgggaatgctgagaaaacagacagatttgtcatgaagaaactcaatgatcgtgtcatgagagtggagtatcacttcctctctccctacgtatctccaaaagagtctcctttccgacatgtcttctggggctccggctctcacacgctgccagctttactggagaacttgaaactgcgtaaacaaaataacggtgcttttaatgaaacgctgttcagaaaccagttggctctagctacttggactattcagggagctgcaaatgccctctctggtgacgtttgggacattgacaatgagttttaaatgtgatacccatagcttccatgagaacagcagggtagtctggtttctagacttgtgctgatcgtgctaaattttcagtagggctacaaaacctgatgttaaaattccatcccatcatcttggtactactagatgtctttaggcagcagcttttaatacagggtagataacctgtacttcaagttaaagtgaataaccacttaaaaaatgtccatgatggaatattcccctatctctagaattttaagtgctttgtaatgggaactgcctctttcctgttgttgttaatgaaaatgtcagaaaccagttatgtgaatgatctctctgaatcctaagggctggtctctgctgaaggttgtaagtggtcgcttactttgagtgatcctccaacttcatttgatgctaaataggagataccaggttgaaagaccttctccaaatgagatctaagcctttccataaggaatgtagctggtttcctcattcctgaaagaaacagttaactttcagaagagatgggcttgttttcttgccaatgaggtctgaaatggaggtccttctgctggataaaatgaggttcaactgttgattgcaggaataaggccttaatatgttaacctcagtgtcatttatgaaaagaggggaccagaagccaaagacttagtatattttcttttcctctgtcccttcccccataagcctccatttagttctttgttatttttgtttcttccaaagcacattgaaagagaaccagtttcaggtgtttagttgcagactcagtttgtcagactttaaagaataatatgctgccaaattttggccaaagtgttaatcttaggggagagctttctgtccttttggcactgagatatttattgtttatttatcagtgacagagttcactataaatggtgtttttttaatagaatataattatcggaagcagtgccttccataattatgacagttatactgtcggttttttttaaataaaagcagcatctgctaataaaacccaacagatactggaagttttgcatttatggtcaacacttaagggttttagaaaacagccgtcagccaaatgtaattgaataaagttgaagctaagatttagagatgaattaaatttaattaggggttgctaagaagcgagcactgaccagataagaatgctggttttcctaaatgcagtgaattgtgaccaagttataaatcaatgtcacttaaaggctgtggtagtactcctgcaaaattttatagctcagtttatccaaggtgtaactctaattcccattttgcaaaatttccagtacctttgtcacaatcctaacacattatcgggagcagtatcttccataatgtataaagaacaaggtagtttttacctaccacagtgtctgtatcggagacagtgatctccatatgttacactaagggtgtaagtaattatcgggaacagtgtttcccataattttcttcatgcaatgacatcttcaaagcttgaagatcgttagtatctaacatgtatcccaactcctataattccctatcttttagttttagttgcagaaacattttgtggtcattaagcattgggtgggtaaattcaaccactgtaaaatgaaattactacaaaatttgaaatttagcttgggtttttgttacctttatggtttctccaggtcctctacttaatgagatagtagcatacatttataatgtttgctattgacaagtcattttaactttatcacattatttgcatgttacctcctataaacttagtgcggacaagttttaatccagaattgaccttttgacttaaagcagagggactttgtatagaaggtttgggggctgtggggaaggagagtcccctgaaggtctgacacgtctgcctacccattcgtggtgatcaattaaatgtaggtatgaataagttcgaagctccgtgagtgaaccatcattataaacgtgatgatcagctgtttgtcatagggcagttggaaacggcctcctagggaaaagttcatagggtctcttcaggttcttagtgtcacttacctagatttacagcctcacttgaatgtgtcactactcacagtctctttaatcttcagttttatctttaatctcctcttttatcttggactgacatttagcgtagctaagtgaaaaggtcatagctgagattcctggttcgggtgttacgcacacgtacttaaatgaaagcatgtggcatgttcatcgtataacacaatatgaatacagggcatgcattttgcagcagtgagtctcttcagaaaacccttttctacagttagggttgagttacttcctatcaagccagtacgtgctaacaggctcaatattcctgaatgaaatatcagactagtgacaagctcctggtcttgagatgtcttctcgttaaggagatgggccttttggaggtaaaggataaaatgaatgagttctgtcatgattcactattctagaacttgcatgacctttactgtgttagctctttgaatgttcttgaaattttagactttctttgtaaacaaatgatatgtccttatcattgtataaaagctgttatgtgcaacagtgtggagattccttgtctgatttaataaaatacttaaacactgaaaaaaaaaaaaaaaaaaaaaaaaaaaaaaaaaaaaaaaaaaaaaaaaaaaaaaaaaaaaaaaaaaaaaaaaaaaaaaaaagtaccttctgaggcggaaagaaccagccggatctcgacttcgagcttatttatattccaaaaaaaaaaaataaaatttcaatttttaagctttcactaattccaaacccacccgctttttatagtaagtttttcacccataaataataaatacaataattaatttctcgtaaaagtagaaaatatattctaatttattgcacggtaaggaagtagatcataactcgagcatgggagatcccgtcgttttacaacgtcgtgactgggaaaaccctggcgttacccaacttaatcgccttgcagcacatccccctttcgccagctggcgtaatagcgaagaggcccgcaccgatcgcccttcccaacagttgcgcagcctgaatggcgaatggcgctttgcctggtttccggcaccagaagcggtgccggaaagctggctggagtgcgatcttcctgaggccgatactgtcgtcgtcccctcaaactggcagatgcacggttacgatgcgcccatctacaccaacgtgacctatcccattacggtcaatccgccgtttgttcccacggagaatccgacgggttgttactcgctcacatttaatgttgatgaaagctggctacaggaaggccagacgcgaattatttttgatggcgttaactcggcgtttcatctgtggtgcaacgggcgctgggtcggttacggccaggacagtcgtttgccgtctgaatttgacctgagcgcatttttacgcgccggagaaaaccgcctcgcggtgatggtgctgcgctggagtgacggcagttatctggaagatcaggatatgtggcggatgagcggcattttccgtgacgtctcgttgctgcataaaccgactacacaaatcagcgatttccatgttgccactcgctttaatgatgatttcagccgcgctgtactggaggctgaagttcagatgtgcggcgagttgcgtgactacctacgggtaacagtttctttatggcagggtgaaacgcaggtcgccagcggcaccgcgcctttcggcggtgaaattatcgatgagcgtggtggttatgccgatcgcgtcacactacgtctgaacgtcgaaaacccgaaactgtggagcgccgaaatcccgaatctctatcgtgcggtggttgaactgcacaccgccgacggcacgctgattgaagcagaagcctgcgatgtcggtttccgcgaggtgcggattgaaaatggtctgctgctgctgaacggcaagccgttgctgattcgaggcgttaaccgtcacgagcatcatcctctgcatggtcaggtcatggatgagcagacgatggtgcaggatatcctgctgatgaagcagaacaactttaacgccgtgcgctgttcgcattatccgaaccatccgctgtggtacacgctgtgcgaccgctacggcctgtatgtggtggatgaagccaatattgaaacccacggcatggtgccaatgaatcgtctgaccgatgatccgcgctggctaccggcgatgagcgaacgcgtaacgcgaatggtgcagcgcgatcgtaatcacccgagtgtgatcatctggtcgctggggaatgaatcaggccacggcgctaatcacgacgcgctgtatcgctggatcaaatctgtcgatccttcccgcccggtgcagtatgaaggcggcggagccgacaccacggccaccgatattatttgcccgatgtacgcgcgcgtggatgaagaccagcccttcccggctgtgccgaaatggtccatcaaaaaatggctttcgctacctggagagacgcgcccgctgatcctttgcgaatacgcccacgcgatgggtaacagtcttggcggtttcgctaaatactggcaggcgtttcgtcagtatccccgtttacagggcggcttcgtctgggactgggtggatcagtcgctgattaaatatgatgaaaacggcaacccgtggtcggcttacggcggtgattttggcgatacgccgaacgatcgccagttctgtatgaacggtctggtctttgccgaccgcacgccgcatccagcgctgacggaagcaaaacaccagcagcagtttttccagttccgtttatccgggcaaaccatcgaagtgaccagcgaatacctgttccgtcatagcgataacgagctcctgcactggatggtggcgctggatggtaagccgctggcaagcggtgaagtgcctctggatgtcgctccacaaggtaaacagttgattgaactgcctgaactaccgcagccggagagcgccgggcaactctggctcacagtacgcgtagtgcaaccgaacgcgaccgcatggtcagaagccgggcacatcagcgcctggcagcagtggcgtctggcggaaaacctcagtgtgacgctccccgccgcgtcccacgccatcccgcatctgaccaccagcgaaatggatttttgcatcgagctgggtaataagcgttggcaatttaaccgccagtcaggctttctttcacagatgtggattggcgataaaaaacaactgctgacgccgctgcgcgatcagttcacccgtgcaccgctggataacgacattggcgtaagtgaagcgacccgcattgaccctaacgcctgggtcgaacgctggaaggcggcgggccattaccaggccgaagcagcgttgttgcagtgcacggcagatacacttgctgatgcggtgctgattacgaccgctcacgcgtggcagcatcaggggaaaaccttatttatcagccggaaaacctaccggattgatggtagtggtcaaatggcgattaccgttgatgttgaagtggcgagcgatacaccgcatccggcgcggattggcctgaactgccagctggcgcaggtagcagagcgggtaaactggctcggattagggccgcaagaaaactatcccgaccgccttactgccgcctgttttgaccgctgggatctgccattgtcagacatgtataccccgtacgtcttcccgagcgaaaacggtctgcgctgcgggacgcgcgaattgaattatggcccacaccagtggcgcggcgacttccagttcaacatcagccgctacagtcaacagcaactgatggaaaccagccatcgccatctgctgcacgcggaagaaggcacatggctgaatatcgacggtttccatatggggattggtggcgacgactcctggagcccgtcagtatcggcggaattccagctgagcgccggtcgctaccattaccagttggtctggtgtcaaaaataataataaccgggcaggggggatccaattctgtgagcgtatggcaaacgaaggaaaaatagttatagtagccgcactcgatgggacatttcaacgtaaaccgtttaataatattttgaatcttattccattatctgaaatggtggtaaaactaactgctgtgtgtatgaaatgctttaaggaggcttccttttctaaacgattgggtgaggaaaccgagatagaaataataggaggtaatgatatgtatcaatcggtgtgtagaaagtgttacatcgactcataatattatattttttatctaaaaaactaaaaataaacattgattaaattttaatataatacttaaaaatggatgttgtgtcgttagataaaccgtttatgtattttgaggaaattgataatgagttagattacgaaccagaaagtgcaaatgaggtcgcaaaaaaactgccgtatcaaggacagttaaaactattactaggagaattattttttcttagtaagttacagcgacacggtatattagatggtgccaccgtagtgtatataggatctgctcccggtacacatatacgttatttgagagatcatttctataatttaggagtgatcatcaaatggatgctaattgacggccgccatcatgatcctattttaaatggattgcgtgatgtgactctagtgactcggttcgttgatgaggaatatctacgatccatcaaaaaacaactgcatccttctaagattattttaatttctgatgtgagatccaaacgaggaggaaatgaacctagtacggcggatttactaagtaattacgctctacaaaatgtcatgattagtattttaaaccccgtggcgtctagtcttaaatggagatgcccgtttccagatcaatggatcaaggacttttatatcccacacggtaataaaatgttacaaccttttgctccttcatattcagctgaaatgagattattaagtatttataccggtgagaacatgagactgactcgagttaccaaattagacgctgtaaattatgaaaaaaagatgtactaccttaataagatcgtccgtaacaaagtagttgttaactttgattatcctaatcaggaatatgactattttcacatgtactttatgctgaggaccgtgtactgcaataaaacatttcctactactaaagcaaaggtactatttctacaacaatctatatttcgtttcttaaatattccaacaacatcaactgaaaaagttagtcatgaaccaatacaacgtaaaatatctagcaaaaattctatgtctaaaaacagaaatagcaagagatccgtacgcggtaataaatagaaacgtactactgagatatactaccgatatagagtataatgatttagttactttaataaccgttagacataaaattgattctatgaaaactgtgtttcaggtatttaacgaatcatccataaattatactccggttgatgatgattatggagaaccaatcattataacatcgtatcttcaaaaaggtcataacaagtttcctgtaaattttctatacatagatgtggtaatatctgacttatttcctagctttgttagactagatactacagaaactaatatagttaatagtgtactacaaacaggcgatggtaaaaagactcttcgtcttcccaaaatgttagagacggaaatagttgtcaagattctctatcgccctaatataccattaaaaattgttagatttttccgcaataacatggtaactggagtagagatagccgatagatctgttatttcagtcgctgattaatcaattagtagagatgagataagaacattataataatcaataatatatcttatatcttatatcttatatcttatatcttgtttagaaaaatgctaatattaaaatagctaacgctagtaatccaatcggaagccatttgatatctataatagggtatctaatttcctgatttaaatagcggacagctatattctcggtagctactcgtttggaatcacaaacattatttacatctaatttactatctgtaatggaaacgtttcccaatgaaatggtacaatccgatacattgcattttgttatatttttttttaaagaggctggtaacaacgcatcgcttcgtttacatggctcgtaccaacaataatagggtaatcttgtatctattcctatccgtactatgcttttatcaggataaatacatttacatcgtatatcgtctttgttagcatcacagaatgcataaatttgttcgtccgtcatgataaaaatttaaagtgtaaatataactattatttttatagttgtaataaaaagggaaatttgattgtatactttcggttctttaaaagaaactgacttgataaaaatggctgtaatctctaaggttacgtatagtctatatgatcaaaaagagattaatgctacagatattatcattagtcatgttaaaaatgacgacgatatcggtaccgttaaagatggtagactaggtgctatggatggggcattatgtaagacttgtgggaaaacggaattggaatgtttcggtcactggggtaaagtaagtatttataaaactcatatagttaagcctgaatttatttcagaaattattcgtttactgaatcatatatgtattcactgcggattattgcgttcacgagaaccgtattccgacgatattaacctaaaagagttatcgggacacgctcttaggagattaaaggataaaatattatccaagaaaaagtcatgttggaacagtgaatgtatgcaaccgtatcaaaaaattactttttcaaagaaaaaggtttgtttcgtcaacaagttggatgatattaacgttcctaattctctcatctatcaaaagttaatttctattcatgaaaagttttggccattattagaaattcatcaatatccagctaacttattttatacagactactttcccatccctccgttgattattagaccggctattagtttttggatagatagtatacccaaagagaccaatgaattaacttacttattaggtatgatcgttaagaattgtaacttgaatgctgatgaacaggttatccagaaggcggtaatagaatacgatgatattaaaattatttctaataacactaccagtatcaatttatcatatattacatccggcaaaaataatatgattagaagttatatcgtcgcccgacgaaaagatcagaccgctagatctgtaattggtcccagtacatctatcaccgttaatgaggtaggaatgcccgcatatattagaaatacacttacagaaaagatatttgttaatgcctttacagtggataaagttaaacaactattagcgtcaaaccaagttaaattttactttaataaacgattaaaccaattaacaagaatacgccaaggaaagtttattaaaaataaaatacatttattgcctggtgattgggtagaagtagctgttcaagaatatacaagtattatttttggaagacagccgtctctacatagatacaacgtcatcgcttcatctatcagagctaccgaaggagatactatcaaaatatctcccggaattgccaactctcaaaatgctgatttcgacggggatgaggaatggatgatattagaacaaaatcctaaagctgtaattgaacaaagtattcttatgtatccgacgacgttactcaaacacgatattcatggagcccccgtttatggatctattcaagatgaaatcgtagcagcgtattcattgtttaggatacaagatctttgtttagatgaagtattgaacatcttggggaaatatggaagagagttcgatcctaaaggtaaatgtaaattcagcggtaaagatatctatacttacttgataggtgaaaagattaattatccgggtctcttaaaggatggtgaaattattgcaaacgacgtagatagtaattttgttgtggctatgaggcatctgtcattggctggactcttatccgatcataagtcgaacgtggaaggtatcaactttattatcaagtcatcttatgtttttaagagatatctatctatttacggttttggggtgacattcaaagatctgagaccaaattcgacgttcactaataaattggaggccatcaacgtagaaaaaatagaacttatcaaagaagcatacgccaaatatctcaacgatgtaagagacgggaaaatagttccattatctaaagctttagaggcggactatgtggaatccatgttatccaacttgacaaatcttaatatccgagagatagaagaacatatgagacaaacgctgatagatgatccagataataacctcctgaaaatggccaaagcgggttataaagtaaatcccacagaactaatgtatattctaggtacgtatggacaacaaaggattgatggtgaaccagcagagactcgagtattgggtagagttttaccttactatcttccagactctaaggatccagaaggaagaggttacattcttaattctttaacaaaaggattaacgggttctcaatattacttttcgatgctggttgccagatctcaatctactgatatcgtctgtgaaacatcacgtaccggaacactggctagaaaaatcattaaaaagatggaggatatggtggtcgacggatacggacaagtagttataggtaatacgctcatcaagtacgccgccaattataccaaaattctaggctcagtatgtaaacctgtagatcttatctatccagatgagtccatgacttggtatttggaaattagtgctctgtggaataaaataaaacagggattcgtttactctcagaaacagaaacttgcaaagaagacattggcgccgtttaatttcctagtattcgtcaaacccaccactgaggataatgctattaaggttaaggatctgtacgatatgattcataacgtcattgatgatgtgagagagaaatacttctttacggtatctaatatagattttatggagtatatattcttgacgcatcttaatccttctagaattagaattacaaaagaaacggctatcactatctttgaaaagttctatgaaaaactcaattatactctaggtggtggaactcctattggaattatttctgcacaggtattgtctgagaagtttacacaacaagccctgtccagttttcacactactgaaaaaagtggtgccgtcaaacaaaaacttggtttcaacgagtttaataacttgactaatttgagtaagaataagaccgaaattatcactctggtatccgatgatatctctaaacttcaatctgttaagattaatttcgaatttgtatgtttgggagaattaaatccaaacatcactcttcgaaaagaaacagataaatatgtagtagatataatagtcaatagattatacatcaagagagcagaaataaccgaattagtcgtcgaatatatgattgaacgatttatctcctttagcgtcattgtaaaggaatggggtatggagacattcattgaggacgaggataatattagatttactgtctacctaaatttcgttgaaccggaagaattgaatcttagtaagtttatgatggttcttccgggggcagccaacaagggaaagattagtaaattcaagattcctatctctgattatacgggatatgacgacttcaatcaaacaaaaaagctcaataagatgactgtagaactcatgaatctaaaagaattgggttctttcgatttggaaaacgtcaacgtgtatcctggagtatggaatacatacgatatcttcggtatcgaggccgctcgtgaatacttgtgcgaagccatgttaaacacctatggagaagggttcgattatctgtatcagccttgtgatcttctcgctagtttactatgtgctagttacgaaccagaatcagtgaataaattcaagttcggcgcagctagtactcttaagagagctacgttcggagacaataaagcattgttaaacgcggctcttcataaaaagtcagaacctattaacgataatagtagctgccacttttttagcaaggtccctaatataggaactggatattacaaatactttatcgacttgggtcttctcatgagaatggaaaggaaactatctgataagatatcttctcaaaagatcaaggaaatggaagaaacagaagacttttaattcttatcaataacatatttttctatgatctgtcttttaaacgatggattttccacaaatgcgcctctcaagtccctcatagaatgatacacgtataaaaaatatagcataggcaatgactccttatttttagacattagatatgccaaaatcatagccccgcttctatttactcccgcagcacaatgaaccaacacgggctcgtttcgttgatcacatttagataaaaaggcggttacgtcgtcaaaatatttactaatatcggtagttgtatcatctaccaacggtatatgaataatattaatattagagttaggtaatgtatatttatccatcgtcaaatttaaaacatatttgaacttaacttcagatgatggtgcatccatagcatttttataatttcccaaatacacattattggttacccttgtcattatagtgggagatttggctttgtgcatatctccagttgaacgtagtagtaagtatttatacaaacttttcttatccatttataacgtacaaatggataaaactactttatcggtaaacgcgtgtaatttagaatacgttagagaaaaggctatagtaggcgtacaagcagccaaaacatcaacacttatattctttgttattatattggcaattagtgcgctattactctggtttcagacgtctgataatccagtctttaatgaattaacgagatatatgcgaattaaaaatacggttaacgattggaaatcattaacggatagcaaaacaaaattagaaagtgatagaggtagacttctagccgctggtaaggatgatatatttgaattcaaatgtgtggatttcggcgcctattttatagctatgcgattggataagaaaacatatctgccgcaagctattaggcgaggtactggagacgcgtggatggttaaaaaggcggcaaaggtcgatccatctgctcaacaattttgtcagtatttgataaaacacaagtctaataatgttattacttgtggtaatgagatgttaaatgaattaggttatagcggttattttatgtcaccgcattggtgttccgattttagtaatatggaatagtgttagataaatgcggtaacgaatgttcctgtaaggaaccataacagcttagatttaacgttaaagatgagcataaacataataaacaaaattacaatcaaacttataacattaatatcaaacaatccaaaaaatgaaatcagtggagtagtaaacgcgtacataactcctggataacgtttagcagctgccgttcctattctagaccaaaaattcggtttcatgttttcgaaacggtattctgcaacaagtcgaggatcgtgttctacatatttggcggcattatccagtatctgcctattgatcttcatttcgttttcgattctggctatttcaaaataaaatcccgatgatagacctccagactttataatttcatctacgatgttcagcgccgtagtaactctaataatataggctgataagctaacatcataccctcctgtatatgtgaatatggcatgatttttgtccattacaagctcggttttaactttattgcctgtaataatttctctcatctgtaggatatctatttttttgtcatgcattgccttcaagacgggacgaagaaacgtaatatcctcaataacgttatcgttttctacaataactacatattctacctttttattttctaactcggtaaaaaaattagaatcccatagggctaaatgtctagcgatatttcttttcgtttcctctgtacacatagtgttacaaaaccctgaaaagaagtgagtatacttgtcatcatttctaatgtttcctccagtccactgtataaacgcataatccttgtaatgatctggatcatccttgactaccacaacatttcttttttctggcataacttcgttgtcctttacatcatcgaacttctgatcattaatatgctcatgaacattaggaaatgtttctgatggaggtctatcaataactggcacaacaataacaggagttttcaccgccgccatttagttattgaaattaatcatatacaactctttaatacgagttatattttcgtctatccattgtttcacattgacatatttcgacaaaaagatataaaatgcgtattccaatgcttctctgtttaatgaattactaaaatatacaaacacgtcactgtctggcaataaatgatatcttagaatattgtaacaatttattttgtattgcacatgttcgtgatctatgagttcttcttcgaatggcataggatctccgaatctgaaaacgtataaataggagttagaataataatatttgagagtattggtaatatataaactctttagcggtataattagtttttttctctcaatttctatttttagatgtgatggaaaaatgactaattttgtagcattagtatcatgaactctaatcaaaatcttaatatcttcgtcacacgttagctctttgaagtttttaagagatgcatcagttggttctacagatggagtaggtgcaacaattttttgttctacacatgtatgtactggagccattgttttaactataatggtgcttgtatcgaaaaactttaatgcagatagcggaagctcttcgccgcgactttctacgtcgtaattgggttctaacgccgatctctgaatggatactagttttctaagttctaatgtgattctctgaaaatgtaaatccaattcctccggcattatagatgtgtatacatcggtaaataaaactatagtatccaacgatcccttctcgcaaattctagtcttaaccaaaaaatcgtatataaccacggagatggcgtatttaagagtggattcttctaccgttttgttcttggatgtcatataggaaactataaagtccgcactactgttaagaatgattactaacgcaactatatagtttaaattaagcattttggaaacataaaataactctgtagacgatacttgactttcgaataagtttgcagacaaacgaagaaagaacagacctctcttaatttcagaagaaaactttttttcgtattcctgacgtctagagtttatatcaataagaaagttaagaattagtcggttaatgttgtatttcattacccaagtttgagatttcataatattatcaaaagacatgataatattaaagataaagcgctgactatgaacgaaatagctatatggttcgctcaagaatatagtcttgttaaacgtggaaacgataactgtatttttaatcacgtcagcggcatctaaattaaatataggtatatttattccacacactctacaatatgccacaccatcttcataataaataaattcgttagcaaaattattaattttagtgaaatagttagcgtcaactttcatagcttccttcaatctaatttgatgctcacacggtgcgaattccactctaacatcccttttccatgcctcaggttcatcgatctctataatatctagttttttgcgtttcacaaacacaggctcgtctctcgcgatgagatctgtatagtaactatgtaaatgataactagatagaaagatgtagctatatagatgacgatcctttaagagaggtataataactttaccccaatcagatagactgttgttatggtcttcggaaaaagaatttttataaatttttccagtattttccaaatatacgtacttaacatctaaaaaatccttaatgataataggaatggataatccgtctattttataaagaaatacatatcgcacattatacttttttttggaaatgggaataccgatgtgtctacataaatatgcaaagtctaaatattttttagagaatcttagttggtccaaattcttttccaagtacggtaatagatttttcatattgaacggtatcttcttaatctctggttctagttccgcattaaatgatgaaactaagtcactatttttataactaacgattacatcacctctaacatcatcatttaccagaatactgatcttcttttgtcgtaaatacatgtctaatgtgttaaaaaaaagatcatacaagttatacgtcatttcatctgtggtattcttgtcattgaaggataaactcgtactaatctcttctttaacagcctgttcaaatttatatcctatatacgaaaaaatagcaaccagtgtttgatcatccgcgtcaatattctgttctatcgtagtgtataacaatcgtatatcttcttctgtgatagtcgatacgttataaaggttgataacgaaaatatttttatttcgtgaaataaagtcatcgtaggattttggacttatattcgcgtctagtagatatgcttttatttttggaatgatctcaattagaatagtctctttagagtccatttaaagttacaaacaactaggaaattggtttatgatgtataatttttttagtttttatagattctttattctatacttaaaaaatgaaaataaatacaaaggttcttgagggttgtgttaaattgaaagcgagaaataatcataaattatttcattatcgcgatatccgttaagtttgtatcgtaatggcgtggtcaattacgaataaagcggatactagtagcttcacaaagatggctgaaatcagagctcatctaaaaaatagcgctgaaaataaagataaaaacgaggatattttcccggaagatgtaataattccatctactaagcccaaaaccaaacgagccactactcctcgtaaaccagcggctactaaaagatcaaccaaaaaggaggaagtggaagaagaagtagttatagaggaatatcatcaaacaactgaaaaaaattctccatctcctggagtcagcgacattgtagaaagcgtggccgctgtagagctcgatgatagcgacggggatgatgaacctatggtacaagttgaagctggtaaagtaaatcatagtgctagaagcgatctctctgacctaaaggtggctaccgacaatatcgttaaagatcttaagaaaattattactagaatctctgcagtatcgacggttctagaggatgttcaagcagctggtatctctagacaatttacttctatgactaaagctattacaacactatctgatctagtcaccgagggaaaatctaaagttgttcgtaaaaaagttaaaacttgtaagaagtaaatgcgtgcacttttttataaagatggtaaactctttaccgataataattttttaaatcctgtatcagacgataatccagcgtatgaggttttgcaacatgttaaaattcctactcatttaacagatgtagtagtatatgaacaaacgtgggaggaggcgttaactagattaatttttgtgggaagtgattcaaaaggacgtagacaatacttttacggaaaaatgcatgtacagaatcgcaacgctaaaagagatcgtatttttgttagagtatataacgttatgaaacgaattaattgttttataaacaaaaatataaagaaatcgtccacagattccaattatcagttggcggtttttatgttaatggaaactatgttttttattagatttggtaaaatgaaatatcttaaggagaatgaaacagtagggttattaacactaaaaaataaacacatagaaataagtcccgatgaaatagttatcaagtttgtaggaaaggacaaagtttcacatgaatttgttgttcataagtctaatagactatataaaccgctattgaaactgacggatgattctagtcccgaagaatttctgttcaacaaactaagtgaacgaaaggtatacgaatgtatcaaacagtttggtattagaatcaaggatctccgaacgtatggagtcaattatacgtttttatataatttttggacaaatgtaaagtccatatctcctcttccgtcaccaaaaaagttaatagcattaactatcaaacaaactgctgaagtggtaggtcatactccatcaatttcaaaaagagcttatatggcaacgactattttagaaatggtaaaggataaaaattttttagatgtagtatctaaaactacgttcgatgaattcctatctatagtcgtagatcacgttaaatcatctacggatggatgatatagatctttacacaaataattacaagaccgataaatggaaatggataagcgtatgaaatctctcgcaatgacagctttcttcggagagctaagcacattagatattatggcattgataatgtctatatttaaacgccatccaaacaataccattttttcagtggataaggatggtcagtttatgattgatttcgaatacgataattataaggcttctcaatatttggatctgaccctcactccgatatctggagatgaatgcaagactcacgcatcgagtatagccgaacaattggcgtgtgcggatattattaaagaggatattagcgaatatatcaaaactactccccgtcttaaacgatttataaaaaaataccgcaatagatcagatactcgtatcagtcgagatacagaaaagcttaaaatagctctagctaaaggcatagattacgaatatataaaagacgcttgttaataagtaaatgaaaaaaaactagtcgtttataataaaacacgatatggatgccaacgtagtatcattttctactattgcgacgtatatagacgctttagcgaagaatgcttcggaattagaacagaggtctaccgcatacgaaataaataatgaattggaactagtatttattaagccgccattgattactttgacaaatgtagtgaatatctctacgattcaggaatcgtttattcgatttaccgttactaataaggaaggtgttaaaattagaactaagattccattatctaaggtacatggtctagatgtaaaaaatgtacagttagtagatgctatagataacatagtttgggaaaagaaatcattagtgacggaaaatcgtcttcacaaagaatgcttgttgagactatcgacagaggaacgtcatatatttttggattacaagaaatatggatcctctatccgactagaattagtcaatcttattcaagcaaaaacaaaaaactttacgatagactttaagctaaaatattttctaggatccggtgcccagtctaaaagttctttgttgcacgctattaatcatccaaagtcaaggcctaatacatctctggaaatagaattcacacctagagacaatgaaacagttccatatgatgaactaataaaggaattgacgactctctcgcgtcatatatttatggcttctccagagaatgtaattctttctccgcctattaacgcgcctataaaaacctttatgttgcctaaacaagatatagtaggtttggatctggaaaatctatatgccgtaactaagactgacggcattcctataactatcagagttacatcaaacgggttgtattgttattttacacatcttggttatattattagatatcctgttaagagaataatagattccgaagtagtagtctttggtgaggcagttaaggataagaactggaccgtatatctcattaagctaatagagcctgtgaatgcaatcaatgatagactagaagaaagtaagtatgttgaatctaaactagtggatatttgtgatcggatagtattcaagtcaaagaaatacgaaggtccgtttactacaactagtgaagtcgtcgatatgttatctacatatttaccaaagcaaccagaaggtgttattctgttctattcaaagggacctaaatctaacattgattttaaaattaaaaaggaaaatactatagaccaaactgcaaatgtagtatttaggtacatgtccagtgaaccaattatctttggagaatcgtctatctttgtagagtataagaaatttagcaacgataaaggctttcctaaagaatatggttctggtaagattgtgttatataacggcgttaattatctaaataatatctattgtttggaatatattaatacacataatgaagtgggtattaagtccgtggttgtacctattaagtttatagcagaattcttagttaatggagaaatacttaaacctagaattgataaaaccatgaaatatattaactcagaagattattatggaaatcaacataatatcatagtcgaacatttaagagatcaaagcatcaaaataggagatatctttaacgaggataaactatcggatgtgggacatcaatacgccaataatgataaatttagattaaatccagaagttagttattttacgaataaacgaactagaggaccgttgggaattttatcaaactacgtcaagactcttcttatttctatgtattgttccaaaacatttttagacgattccaacaaacgaaaggtattggcgattgattttggaaacggtgctgacctggaaaaatacttttatggagagattgcgttattggtagcgacggatccggatgctgatgctatagctagaggaaatgaaagatacaacaaattaaactctggaattaaaaccaagtactacaaatttgactacattcaggaaactattcgatccgatacatttgtctctagtgtcagagaagtattctattttggaaagtttaatatcatcgactggcagtttgctatccattattcttttcatccgagacattatgctaccgtcatgaataacttatccgaactaactgcttctggaggcaaggtattaatcactaccatggacggagacaaattatcaaaattaacagataaaaagacttttataattcataagaatttacctagtagcgaaaactatatgtctgtagaaaaaatagctgatgatagaatagtggtatataatccatcaacaatgtctactccaatgactgaatacattatcaaaaagaacgatatagtcagagtgtttaacgaatacggatttgttcttgtagataacgttgatttcgctacaattatagaacgaagtaaaaagtttattaatggcgcatctacaatggaagatagaccgtctacaaaaaactttttcgaactaaatagaggagccattaaatgtgaaggtttagatgtcgaagacttacttagttactatgttgtttatgtcttttctaagcggtaaataataatatggtatgggttctgatctcccagttctaaatgcattaaataattccaatagagcgatttttgttcctataggaccttccaactgtggatactctgtattgttaatagatatattaatacttttgtcgggtaacagaggttctacgtcttctaaaaataaaagttttataacatctggcctgttcataaataaaaacttggcgattctatatatactcttattatcaaatctagccattgtcttatagatgtgagctactgtaggtgtaccatttgattttctttctaatactatatatttctctcgaagaagttcttgcacatcatctgggaataaaatactactgttgagtaaatcagttattttttttatatcgatattgatggacatttttatagttaaggataataagtatcccaaagtcgataacgacgataacgaagtatttatacttttaggaaatcacaatgactttatcagattaaaattaacaaaattaaaggagcatgtatttttttctgaatatattgtgactccagatacatatggatctttatgcgtcgaattaaatgggtctagttttcagcacggcggtagatatatagaggtggaggaatttatagatgctggaagacaagttagatggtgttctacatccaatcatatatctaaagatatacccgaagatatgcacactgataaatttgtcatttatgatatttatacgtttgattcgttcaagaataaacgattggtattcgtacaggtacctccgtcgttaggagatgatagtcatttgactaatccgttattgtcaccgtattatcgtaattcagtagccagacaaatggtcaatgatatgatttttaatcaagattcatttttaaaatatttattagaacatctgattagaagccactatagagtttctaaacatataacaatagttagatacaaggataccgaagaattaaatctaacgagaatatgttataatagagataagtttaaggcgtttgtattcgcttggtttaacggcgtttcggaaaatgaaaaggtactagatacgtataaaaaggtatctaatttgatataatgaattcagtgactgtatcacacgcgccatatactattacttatcacgatgattgggaaccagtaatgagtcaattggtagagttttataacgaagtagccagttggctgctacgagacgagacgtcgcctattcctgataagttctttatacagttgaaacaaccgcttagaaataaacgagtatgtgtgtgtggtatagatccgtatccgaaagatggaactggtgtaccgttcgaatcaccaaattttacaaaaaaatcaattaaggagatagcttcatctatatctagattaaccggagtaattgattataaaggttataaccttaatataatagacggggttataccctggaattattacttaagttgtaaattaggagaaacaaaaagtcacgcgatttactgggataagatttccaagttactgctgcagcatataactaaacacgttagtgttctttattgtttgggtaaaacagatttctcgaatatacgggccaagttagaatccccggtaactaccatagtcggatatcatccagcggctagagaccgccaattcgagaaagatagatcatttgaaattatcaacgttttactggaattagacaacaaggcacctataaattgggctcaagggtttatttattaatgctttagtgaaattttaacttgtgttctaaatggatgcggctattagaggtaatgatgttatctttgttcttaagactataggtgtcccgtcagcgtgcagacaaaatgaagatccaagatttgtagaagcatttaaatgcgacgagttagaaagatatattgagaataatccagaatgtacactattcgaaagtcttagggatgaggaagcatactctatagtcagaattttcatggatgtagatttagacgcgtgtctagacgaaatagattatttaacggccattcaagattttattatcgaggtgtcaaactgtgtagctagattcgcgtttacagaatgcggcgccattcatgaaaatgtaataaaatccatgagatctaatttttcattgactaagtctacaaatagagataaaacaagttttcatattatctttttagatacgtataccactatggatacattgatagctatgaaacgaacactattagaattaagtagatcatctgaaaatccactaaccagatcgatagacactgccgtatataggagaaaaacaactcttcgggttgtaggtactaggaaaaatccaaattgcgacactattcatgtaatgcaaccaccgcatgataatatagaagattacctattcacttacgtggatatgaacaacaatagttattacttttctctacaacaacgattggaggatttagttcctgataagttatgggaaccagggtttatttcattcgaagacgctataaaaagagtttcaaaaatattcattaattctataataaactttaatgatctcgatgaaaataattttacaacggtaccactggtcatagattacgtaacaccttgtgcattatgtaaaaaacgatcgcataaacatccgcatcaactatcgttggaaaatggtgctattagaatttacaaaactggtaatccacatagttgtaaagttaaaattgttccgttggatggtaataaactgtttaatattgcacaaagaattttagacactaactctgttttattaaccgaacgaggagaccatatagtttggattaataattcatggaaatttaacagcgaagaacccttgataacaaaactaattttgtcaataagacatcaactacctaaggaatattcaagcgaattactctgtccaagaaaacgaaagactgtagaagctaacatacgagacatgttagtagattcagtggagaccgatacctatccggataaacttccgtttaaaaatggtgtattggacctggtagacggaatgttttactctggagatgatgctaaaaaatatacgtgtactgtatcaaccggatttaaatttgacgatacaaagttcgtcgaagacagtccagaaatggaagagttaatgaatatcattaacgatatccaaccattaacggatgaaaataagaaaaatagagagctatatgaaaaaacattatctagttgtttatgcggtgctaccaaaggatgtttaacattcttttttggagaaactgcaactggaaagtcgacaaccaaacgtttgttaaagtctgctatcggtgacctgtttgttgagacgggtcaaacaattttaacagatgtattggataaaggacctaatccatttatcgctaacatgcatttgaaaagatctgtattctgtagcgaactacctgattttgcctgtagtggatcaaagaaaattagatctgacaatattaaaaagttgacagaaccttgtgtcattggaagaccgtgtttctccaataaaattaataatagaaaccatgcgacaatcattatcgatactaattacaaacctgtttttgataggatagataacgcattaatgagaagaattgccgtcgtgcgattcagaacacacttttctcaaccttctggtagagaggctgctgaaaataatgacgcgtacgataaagtcaaactattagacgaggggttagatggtaaaatacaaaataatatatatagatttgcatttctatacttgttggtgaaatggtacaaaaaatatcatgttcctattatgaaactatatcctacacccgaagagattcctgactttgcattctatctcaaaataggtactctgttggtatctagctctgtaaagcatattccattaatgacggacctctccaaaaagggatatatattgtacgataatgtggtcactcttccgttgactactttccaacagaaaatatccaagtattttaattctagactatttggacacgatatagagagcttcatcaatagacataagaaatttgccaatgttagtgatgaatatctgcaatatatattcatagaggatatttcatctccgtaaatatatgctcatatatttatagaagatatcacatatctaaatgaataccggaatcatagatttatttgataatcatgttgatagtataccaactatattacctcatcagttagctactctagattatctagttagaactatcatagatgagaacagaagcgtgttattgttccatattatgggatcaggtaaaacaataatcgctttgttgttcgccttggtagcttccagatttaaaaaggtttacattctagtgccgaacatcaacatcttaaaaattttcaattataatatgggtgtagctatgaacttgtttaatgacgaattcatagctgagaatatctttattcattccacaacaagtttttattctcttaattataacgataacgtcattaattataacggattatctcgctacaataactctatttttatcgttgatgaggcacataatatctttgggaataatactggagaacttatgaccgtgataaaaaataaaaacaagattccttttttactattgtctggatctcccattactaacacacctaatactctgggtcatattatagatttaatgtccgaagagacgatagattttggtgaaattattagtcgtggtaagaaagtaattcagacacttcttaacgaacgcggtgtgaatgtacttaaggatttgcttaaaggaagaatatcatattacgaaatgcctgataaagatctaccaacgataagatatcacggacgtaagtttctagatactagagtagtatattgtcacatgtctaaacttcaagagagagattatatgattactagacgacagctatgttatcatgaaatgtttgataaaaatatgtataacgtgtcaatggcagtattgggacaacttaatctgatgaataatttagatactttatttcaggaacaggataaggaattgtacccaaatctgaaaataaataatggcgtgttatacggagaagaattggtaacgttaaacattagttccaaatttaaatactttattaatcggatacagacactcaacggaaaacattttatatacttttctaattctacatatggcggattggtaattaaatatatcatgctcagtaatggatattctgaatataatggttctcagggaactaatccacatatgataaacggcaaaccaaaaacatttgctatcgttactagtaaaatgaaatcgtctttagaggatctattagatgtgtataattctcctgaaaacgatgatggtagtcaattgatgtttttgttttcatcaaacattatgtccgaatcctatactctaaaagaggtaaggcatatttggtttatgactatcccagatactttttctcaatacaaccaaattcttggacgatctattagaaaattctcttacgccgatatttctgaaccagttaatgtatatcttttagccgccgtatattccgatttcaatgacgaagtgacgtcattaaacgattacacacaggatgaattaattaatgttttaccatttgacatcaaaaagctgttgtatctaaaatttaagacgaaagaaacgaatagaatatactctattcttcaagagatgtctgaaacgtattctcttccaccacatccatcaattgtaaaagttttattgggagaattggtcagacaatttttttataataattctcgtattaagtataacgataccaagttacttaaaatggttacatcagttataaaaaataaagaagacgctaggaattacatagatgatattgtaaacggtcacttctttgtatcgaataaagtatttgataaatctcttttatacaaatacgaaaacgatattattacagtaccgtttagactttcctacgaaccatttgtttggggagttaactttcgtaaagaatataacgtggtatcttctccataaaactgatgagatatataaagaaataaatgtcgagctttgttaccaatggatacctttccgttacattggaaccacacgagctgacgttagacataaaaactaatattaggaatgccgtatataagacgtatctccatagagaaattagtggtaaaatggccaagaaaatagaaattcgtgaagacgtggaattacctctcggcgaaatagttaataattctgtagttataaacgttccgtgtgtaataacctacgcgtattatcacgttggggatatagtcagaggaacattaaacatcgaagatgaatcaaatgtaactattcaatgtggagatttaatctgtaaactaagtagagattcgggtactgtatcatttagcgattcaaagtactgcttttttcgaaatggtaatgcgtatgacaatggcagcgaagtcactgccgttctaatggaggctcaacaaggtatcgaatctagttttgtttttctcgcgaatatcgtcgactcataaaaaagagaatagcggtaagtataaacacgaatactatggcaataattgcgaatgttttattctcttcgatatatttttgataatatgaaaaacatgtctctctcaaatcggacaaccatctcataaaatagttctcgcgcgctggagaggtagttgccgctcgtataatctctccagaataatatacttgcgtgtcgtcgttcaatttatacggatttctatagttctctgttatataatgcggtttgccctcatgattagacgacgacaatagtgttctaaatttagatagttgatcagaatgaatgtttattggcgttggaaaaattatccatacagcgtctgcagagtggttgatagttgttcctagatatgtaaaataatccaacttactaggcagcaaattgtctagataaaatactgaatcaaacggtgcagacgtattggcggatctaatggaatccaattgattaactatcttttgaaaatatacatttttatgatccaatacttgtaagaatatagaaataatgataagtccatcatcgtgtttttttgcctcttcataagaactatattttttcttattccaatgaacaagattaatctctccagagtatttgtacacatctatcaagtgattggatccataatcgtcttcctttccccaatatatatgtagtgatgataacacatattcattggggagaaaccctccacttatatatcctcctttaaaattaatccttactagttttccagtgttctggatagtggttggtttcgactcattataatgtatgtctaacggcttcaatcgcgcgttagaaattgcttttttagtttctatattaataggagatagttgttgcggcatagtaaaaatgaaatgataactgtttaaaaatagctcttagtatgggaattacaatggatgaggaagtgatatttgaaactcctagagaattaatatctattaaacgaataaaagatattccaagatcaaaagacacgcatgtgtttgctgcgtgtataacaagtgacggatatccgttaataggagctagaagaacttcattcgcgttccaggcgatattatctcaacaaaattcagattctatctttagagtatccactaaactattacggtttatgtactacaatgaactaagagaaatctttagacggttgagaaaaggttctatcaacaatatcgatcctcactttgaagagttaatattattgggtggtaaactagataaaaaggaatctattaaagattgtttaagaagagaattaaaagaggaaagtgatgaacgtataacagtaaaagaatttggaaatgtaattctaaaacttacaacacgggataaattatttaataaagtatatataagttattgcatggcgtgttttattaatcaatcgttggaggatttatcgcatactagtatttacaatgtagaaattagaaagattaaatcattaaatgattgtattaacgacgataaatacgaatatctgtcttatatttataatatgctagttaatagtaaatgaacttttacagatctagtataattagtcagattattaagtataatagacgactagctaagtctattatttgcgaggatgactctcaaattattacactcacggcattcgttaaccaatgcctatggtgtcataaacgagtatccgtgtccgctattttattaactactgataacaaaatattagtatgtaacagacgagatagttttctctattctgaaataattagaactagaaacatgtttagaaagaaacgattatttctgaattattccaattatttgaacaaacaggaaagaagtatactatcgtcatttttttctctagatccagctactactgataatgatagaatagacgctatttatccgggtggcatacccaaaaggggtgagaatgttccagagtgtttatccagggaaattaaagaagaagttaatatagacaattcttttgtattcatagacactcggttttttattcatggcatcatagaagataccattattaataaattttttgaggtaatcttctttgtcggaagaatatctctaacgagtgatcaaatcattgatacatttaaaagtaatcatgaaatcaaggatctaatatttttagatccgaattcaggtaatggactccaatacgaaattgcaaaatatgctctagatactgcaaaacttaaatgttacggccatagaggatgttattatgaatcattaaaaaaattaactgaggatgattgattaaaaaatataaattaatttaccatcgtgtatttttataacgggattgtccggcatatcatgtagatagttaccgtctacatcgtatactcgaccatctacgcctttaaatcctctatttattgacattaatctattagaattggaataccaaatattagtaccctcaattagtttattggtaatattttttttagacgatagatcgatggctcttgaaaccaaggttttccaaccggactcattgtcgatcggtgagaagtctttttcattagcatgaatccattctaatgatgtatgtttaaacactctaaacaattggacaaattcttttgatttgctttgaatgatttcaaataggtcttcgtctacagtaggcataccattagataatctagccattataaagtgcacgtttacatatctacgttctggaggagtaagaacgtgactattgagacgaatggctcttcctactatctgacgaagagacgcctcgttccatgtcatatctaaaatgaagatatcattaattgagaaaaaactaataccctcgcctccactagaagagaatacgcatgttttaatgcattctccgttagtgtttgattcttggttaaactcagccaccgccttgattctagtatcttttgttctagatgagaactctatattagagataccaaagactttgaaatatagtaataagatttctattcctgactgattaacaaatggttcaaagactagacatttaccatgggatgctaatattcccaaacatacatctataaatttgacgcttttctcttttaattcagtaaatagagagatatcagccgcactagcatcccctttcaatagttctccctttttaaaggtatctaatgcggatttagaaaactctctatctcttaatgaatttttaaaatcattatatagtgttgctatctcttgcgcgtattcgcccggatcacgattttgtctttcaggaaagctatcgaacgtaaacgtagtagccatacgtctcagaattctaaatgatgatatacctgtttttatttcagcgagtttagccttttgataaatttcttcttgctttttcgacatattaacgtatcgcattaatactgttttcttagcgaatgatgcagacccttctacgtcatcaaaaatagaaaactcgttattaactatatacgaacatagtcctcctagtttggagactaattctttttcatcgactagacgtttattctcaaatagcgattggtgttgtaaggatcctggtcgtagtaagttaaccaacatggtgaattcttgcacactattgacgataggtgtagccgataaacaaatcatcttatggttttttaacgcaatggtcttagataaaaaattatatactgaacgagtaggacggatcttaccatcttctttgattaatgatttagaaatgaagttatgacattcatcaataatgacgcatattctactcttggaattaatagttttgatattagtaaaaaatttatttctaaaattttgatcatcgtaattaataaaaatacaatccttcgttatctctggagcgtatctgagtatagtgttcatccaaggatcttctatcaaagcctttttcaccaataagataatagcccaattcgtataaatatccttaagatgtttgagaatatatacagtagtcattgttttaccgacacccgtttcatggaacaataaaagagaatgcatactgtctaatcctaagaaaactcttgctacaaaatgttgataatccttgaggcgtactacgtccgaccccatcatttcaacgggcatattagtagttctgcgtaaggcataatcgatataggccgcgtgtgatttactcatttatgagtgataagtaataactatgttttaaaaatcacagcagtagtttaactagtcttctctgatgtttgttttcgatactttttgaatcagaagtcatactagaataaagcaacgagtgaacgtaatagagagcttcgtatactctattcgaaaactctaagaacttattaatgaattccgtatccactggattgtttaaaatactaaattgaacactgttcacatccttccaagaagaagacttagtgacggacttaacatgagacataaataaatccaaattttttttacaaacatcactagccaccataatggcgctatctttcaaccagctatcgcttacgcattttagcagtctaacatttttaaagagactacaatatattctcatagtatcgattacacctctaccgaataaagttggaagtttaataatacaatatttttcgtttacaaaatcaaataatggtcgaaacacgtcgaaggttaacatcttataatcgctaatgtatagattgttttcagtgagatgattattagatttaatagcatctcgttcacgtttgaacagtttattgcgtgcgctgaggtcggcaactacggcgtccgctttagtactcctcccataatactttacgctattaatctttaaaatttcatagactttatctagatcgctttctggtaacatgatatcatgtgtaaaaagttttaacatgtcggtcggcattctatttagatcattaactctagaaatctgaagaaagtaattagctccgtattccagactaggtaatgggcttttacctagagacagattaagttctggcaatgtttcataaaatggaagaaggacatgcgttccctcccggatattttttacaatttcatccatttacaactctatagtttgttttcattattattagttattatctcccataatcttggtaatacttaccccttgatcgtaagataccttatacaggtcattacatacaactaccaattgtttttgtacataatagattggatggttgacatccatggtggaataaactactcgaacagatagtttatctttccccctagatacattagccgtaatagttgtcggcctaaagaatatctttggtgtaaagttaaaagttagggttcttgttccattattgctttttgtcagtagttcattataaattctcgagatgggtccgttctctgaatatagaacatcatttccaaatctaacttctagtctagaaataatatcggtcttattcttaaaatctattcccttgatgaagggatcgttaatgaacaaatccttggcctttgattcggctgatctattatctccgttatagacgttacgttgactagtccaaagacttacaggaatagatgtatcgatgatgttgatactatgtgatatgtgagcaaagattgttctcttagtggcatcactatatgttccagtaatggcggaaaactttttagaaatgttatatataaaagaattttttcgtgttccaaacattagcagattagtatgaagataaacactcatattatcaggaacattatcaatttttacatacacatcagcatcttgaatagaaacgataccatcttctggaacctctacgatctcggcagactccggataaccagtcggtgggccatcgctaacaataactagatcatccaacaatctactcacatatgcatctatataatctttttcatcttgtgagtaccctggatacgaaataaatttattatccgtatttccataataaggtttagtataaacagagagagatgttgccgcatgaacttcagttacagtcgccgttggttggtttatttgacctattactctcctaggtttctctataaacgatggtttaatttgtacattcttaaccatatatccaataaagctcaattcaggaacataaacaaattctttgttgaacgtttcaaagtcgaacgaagagtcacgaataacgatatcggatactggattgaaggttaccgttacggtaatttttgaatcggatagtttaagactgctgaatgtatcttccacatcaaacggagttttaatataaacgtatactgtagatggttctttaatagtgtcattaggagttaggccaatagaaatatcattaagttcactagaatatccagagtgtttcaaagcaattgtattattgatacaattattatataattcttcgccctcaatttcccaaataacaccgttacacgaagagatagatacgtgattaatacatttatatccaacatatggtacgtaactgaatcttcccatacctttaacttctggaagttccaaactcagaaccaaatgattaagcgcagtaatatactgatccctaatttcgaagctagcgatagcctgattgtctggaccatcgtttgtcataactccggatagagaaatatattgcggcatatacaaagttggaatttgactatcgactgcgaagacattagaccgtttaatagagtcatccccaccgatcaaagaattaatgatagtattattcattttctatttaaaatggaaaaagcttacaataaactccgtagagaaatatctataatttgtgagttttccttaaagtaacagcttccgtaaacgccgtctttatctcttagtaggtttattgtatttatgaccttttccttatcttcatagaatactaaaggcaacaaagaaatttttggttcttctctaagagctacgtgagacttaaccatagaagccaacgaatccctacatattttagaacagaaataccctacttcaccacccttgtatgtctcaatactaataggtctaaaaaccaaatcttgattacaaaaccaacacttatcaattacactatttgtcttaatagacacatctgccatagatttataatactttggtagtatacaagcgagtgcttcttctttagcgggcttaaagactgctttaggtgctgaaataaccacatctggaaggcttactcgcttagccatttaattacggaactatttttttatacttctaatgagcaagtagaaaacctctcatctacaaaaacgtactcgtgtccataatcctctaccatagttacacgttttttagatctcatatgtgctaaaaagttttcccatactaattggttactattatttttcgtataatttttaacagtttgaggttttagatttttagttacagaagtgatatcgaatattttatccaaaaagaatgaataattaattgtcttagaaggagtgttttcttggcaaaagaataccaagtgcttaaatatttctactacttcattaatcttttctgtactcagattcagtttctcatcttttacttgattgattatttcaaagactaacttataatcctttttatttattctctcgttagccttaagaaaactagatacaaaatttgcatctacatcatccgtggatatttgatttttttccatgatatccaagagttccgagataatttctccagaacattgatgagacaataatctccgcaatacatttctcaaatgaataagtttattagacacgtggaagtttgactttttttgtacctttgtacatttttgaaataccgactcgcaaaaaatacaatattcatatccttgttcagatactataccgttatgtctacaaccgctacataatcgtagattcatgttaacactctacgtatctcgtcgtccaatattttatataaaaacattttatttctagacgttgccagaaaatcctgtaatatttttagttttttgggctgtgaataaagtatcgccctaatattgttaccgtcttccgccaatatagtagttaaattatccgcacatgcagaagaacaccgcttaggcggattcagtacaatgttatatttttcgtaccaactcatttaaatatcataatctaaaatagttctgtaatatgtctagcgctaatatattgatcataatcctgtgcataaattaagatacaacaatgtctcgaaatcatcgacatggcttcttccatagttagaagatcgtcgtcaaagttagcaacgtgattcatcaacatttgctgttttgaggcagcaaatactgaaccgtcgccattcaaccattcataaaaaccatcgtctgaatccattgataatttcttgtactggtttttgagagctcgcatcaatctagcatttctagctcccggattgaaaacagaaagaggatcgtacatccagggtccattttctgtaaatagaatcgtataatgtcccttcaagaagatatcagacgatccacaatcaaagaattggtctccgagtttgtaacaaactgcggactttaacctatacatgataccgtttagcataatttctggtgatacgtcaatcggagtatcatctattagagatctaaagccggtgtaacattctccaccaaacatattcttattctgacgtcgttctacataaaacatcattgctccattaacgataacaggggaatgaacagcactacccatcacattagttcccaatggatcaatgtgtgtaactccagaacatcttccatagcctatgttaggaggagcgaacaccactcttccactattgccatcgaatgccatagaataaatatccttggaattgatagaaatcggactgtcggatgttgtgatcatcttcataggattaacaactatgtatggtgccgcctgaagtttcatatcgtaactgatgccgtttataggtctagccacagaaaccaacgtaggtctaaatccaactatagacaaaatagaagccaatatctgttcctcatctgtcataacttgagagcatccagtatgaataatcttcattagatggggatctaccgcatcatcatcgttacaataaaaaattcccattctaatgttcataattgcttttctaatcatggtatgcatgtttgctctctgaatctctgtggaaattagatctgatacacctgtaatcactatcggattatcctccgtaagacgattaaccaacaacatataattataagactttacttttctaaattcataaagttgctggattaggctataggtgtctccatgtacatacgcgttctcgagcgcaggaagtttaataccgaatagtgccatcagaataggatgaatatagtaattagtttctggttttctataaataaaagacaaatcttgtgaactagacatatcggtaaaatgcatggattggaatcgtgtagtcgacagaagaatatgatgattagatggagagtatattttatctaactctttgagttggtcaccgattctaggactagctcgagaatgaataagtactaaaggatgagtacatttcacagaaacactagcattgttcaatgtgctctttacatgggtaaggagttgaaatagctcgtttctatttgttctgacaatatttagtttattcataatgttaagcatatcctgaatagtaaagttagatgtgtcatacttgttagtagttagatatttagcaattgcattcccatcatttctcaatctcgtactccaatcatgcgtggatgctacttcgtcgatggaaaccatacaatcctttttgataggctgttgagattgatcatttcctgcacgtttaggtttggtacgttgatttctagcccctgcggatataaagtcatcgtctacaatttgggacaatgaattgcatacactacaagacaaagatttatcagaagtgtgaatatgatcttcatctaccaaagaaagagtttgattagtataactagattttagtcctgcgttagatgttaaaaaaacatcgctattgaccacggcttccattatttatattcgtagtttttactcgaaagcgtgattttaatatccaatcttattacttttggaatcgttcaaaacctttgactagttgtagaatttgatctattgccctacgcgtatactcccttgcatcatatacgttcgtcaccagatcgtttgtttcggcctgaagttggtgcatatctctttcaacattcgacatgagatccttaagggccatatcgtctagattttgttgagatgctgctcctggatttggattttgttgtgctgttgtacatactgtaccaccagtaggtgtaggagtacatacagtggccacaataggaggttgagaaagtgtaaccgttggagtagtacaagaaatacttccatccgattgttgtgtacatgtagttgttggtaacgtctgagaaggttgggtagatggcggcgtcgtcgttttttgatctttattaaatttagagataatatcctgaacagcattgctcggcgtcaacgctggaaggagtgaactcgccggcgcatcagtatcttcagacagccaatcaaaaagattagacatatcagatgatgtattagtttgttgtcgtggttttggtgtaggagcagtactactaggtagaagaataggagccgatgtagctgttggaaccggctgtggagttatatgaatagttggttgtagcggttggataggctgtctgctggcggccatcatattatctctagctagttgttctcgcaactgtctttgataatacgactcttgagactttagtcctatttcaatcgcttcatcctttttcgtatccggatccttttcttcagaataatagattgacgactttggtgtagaggattctgccagcctctgtgagaacttgttaaagaagtccatttaaggctttaaaattgaattgcgattataagattaaatggcagacacagacgatattatcgactatgaatccgatgatctcaccgaatacgaggatgatgaagaagaggaagaagatggagagtcactagaaactagtgatatagatcccaaatcttcttataagattgtagaatcagcatccactcatatagaagatgcgcattccaatcttaaacatatagggaatcatatatctgctcttaaacgacgctatactagacgtataagtctatttgaaatagcgggtataatagcagaaagctataacttgcttcaacgaggaagattacctctagtttcagaattttctgacgaaacgatgaagcaaaatatgctacatgtaattatacaagagatagaggagggttcttgtcctatagtcatcgaaaagaacggagaattgttgtcggtaaacgattttgacaaagatggtctaaaattccatctagactatattatcaaaatttggaaacttcaaaaacgatattagaatttatacgaatatcgttctctaaatgtcacaatcaagtctcgcatgttcagcaatttattgtcgtactttatatcgtgttcattaacgatatcttgcaaaatagtaatgattctatcttccttcgatagatattcttcagagattattgtcttatattctttcttgttatcagatatgaatttgataagactttgaacattattgatacccgtctgtttaattttttctacagatattttagttttggcagattctatcgtatctgtcaatagacatccaacatcgacattcgacgtcaattgtctataaatcaacgtataaattttagaaataacattagcgaattgttgtgcgttgatgtcgttattctgaaacagtatgattttaggtagcattttcttaacaaagagaacgtatttattgttactcagttgaacagatgatatatccagattactaacgcatctgattccgtataccaaactttcagaagaaatggtatacaattgtttgtattcattcaatgtctctttttcagaaattagtttagagtcgaatactgcaataattttcaagagatagttttcatcagataagattttatttagtgtagatatgataaaactattgttttgttggagaacttgatacgccgcgttctctgtagtcgacgctctcaaatgggaaacaatctccattatttttttggaatcggatactatatcttcggtatcttgacgcagtctagtatacatagagttaagagagattagagtttgtacattaagcaacatgtctctaaatgtggctacaaacttttcctttttcacatcatctagtttattatataccgatttcacaacggcaccagatttaaggaaccagaatgaaaaactctgataactacaatatttcatcatagttacgattttatcatcttctatagttggtgtaatagcgcatacctttttctccaagactggaaccaacgtcataaaaatgtttaaatcaaaatccatatcaacatctgatgcgctaagaccagtctcgcgttcaagattatctttactaatggtgacgaactcatcgtataaaactctaagtttgtccattatttatttacagatttagttgtttaatttatttgtgctcttccagagttgggatagtatttttctaacgtcggtattatattattaggatctacgttcatatgtatcataatattaatcatccacgttttgataaatctatctttagcttctgaaataacgtatttaaacaaaggagaaaaatatttagctacggcatcagacgcaataacattttttgtaaatgtaacgtatttagacgacagatcttcgttaaaaagttttccatctatgtagaatccatcggttgttaacaccattcccgcgtcagattgaataggagtttgaatagtttgttttggaaatagatccttcaataacttatagttgggtgggaaaaaatcgattttatcactagactctttcttttttactatcattacctcatgaactatttcttgaatgagtatatgtattttctttcctatatcggacgcgttcattggaaaatataccatgtcgttaactataagaatatttttatcctcgtttacaaactgaataatatcagatgtagttcgtaaacgaactatatcatcaccagcacaacatctaactatatgatatccactagtttcctttagccgtttattatcttgttccatattagcagtcattccatcatttaagaaggcgtcaaaaataatagggagaaatgacattttggattctgttacaactttaccaaaattaaggatatacggacttactatctttttctcaacgtcaatttgatgaacacacgatgaaaatgtgcttctatgagattgatcatgtagaaaacaacaagggatacaatatttccgcatatcatgaaatatattaagaaatcccaccttattatatttccccaaaggatccatgcacgtaaacattatgccgttatcattaataaagacttctttctcatcggatctgtaaaagttgttactgatttttttcattccaggatctagataattaataatgatgggttttctattcttattctttgtattttggcatatcctagaccagtaaacagtttccactttggtaaaatcagcagacttttgaacgctattaaacatggcattaatggcaataactaaaaatgtaaaatatttttctatgttaggaatatggtttttcactttaatagatatatggtttttggccaaaatgatagatatttttttatccgaggatagtaaaatattattagtcgccgtctctataaaaatgaagctagtctcgatatccaattttattctagaattgataggagtcgccaaatgtaccttatacgttatatctcccttgatgcgttccatttgtgtatctatatcggacacaagatctgtaaatagttttacgttattaatcatcacggtatcgccgtcgctagataacgctaatgtaccatccaagtcccaaatggagagatttaactgttcatcgtttagaataaaatgattaccggtcatattaataaagtgttcatcgtatctagataacaacgacttataattaatgtccaagtcttgaactcgctgaatgatcttttttaacccagttagttttagattggtacgaaatatattgttaaactttgattctacagtaatgtccaaatctagttgtggaaatacttccatcaacattgtttcaaacttgataatattattatctacatcttcgtacgatccaaattccggaatagatgtatcgcacgctctggccacccagataaccaaaaagtcacacgctccaggatatacattgtataaaaagctatcgttttttagtagggtttttttctgcgtgtatacgaagggattaaaaatagtattatcaacgtaactatattccaaattattcttatgagaatagataataatatcgtccttaatatctaacaaatttcctaaatatccctttaattgagtcattcgaagcgtcaatagaatatgtctcttaactatttccggctgttgtatatttaaatgacttcgtaaaaaataatatatgggcgacttctcatctatgtaatcatatggagtgagatatagggctcgttctacctcctgccccttacccacctgtaataccaattgcggacttactatatatcgcatatttatatcgtggggtaaagtgaaaatctactaccgatgatgtaagtcttacaatgttcgaaccagtaccagatcttaatttggaggcctccgtagaactaggggaggtaaatatagatcaaacaacacctatgataaaggagaatagcggttttatatcccgcagtagacgtctattcgcccatagatctaaggatgatgagagaaaactagcactacgattctttttacaaagactttattttttagatcatagagagattcattatttgttcagatgcgttgacgctgtaaaagacgtcactattaccaaaaaaaataacattatcgtggcgccttatatagcacttttaactatcgcatcaaaaggatgcaaacttacagaaacaatgattgaagcattctttccagaactatataatgaacatagtaagaaatttaaattcaactctcaagtatccatcatccaagaaaaactcggataccagtttggaaactatcacgtttatgattttgaaccgtattactctacagtagctctggctattcgagatgaacattcatctggcatttttaatatccgtcaagagagttatctggtaagttcattatctgaaataacatatagattttatctaattaatctaaaatctgatcttgttcaatggagtgctagtacgggcgctgtaattaatcaaatggtaaatactgtattgattacagtgtatgaaaagttacaactggtcatagaaaatgattcacaatttacatgttcattggctgtggaatcaaaacttccaataaaattacttaaagatagaaatgaattatttacaaaattcattaacgagttaaaaaagaccagttcattcaagataagcaaacgcgataaggatacgctactaaaatattttacttaggactggagttagaatttatagacgactcatttcgtttatcattgttactattattactattactatcattattagtgttggcattattagtattcttcttgtcatcttgttcagaaatatacagcaatgctatacctaatactaaatacattatcatgctcgcaatggctctaacaacaacgaaccaaaatgaatttggtcgtagcttttgttcacaaaaatacataaagaaatgtctacataaatctatggcgccattggctacttgaaatagcgccagtcctcctacagattttaatatagctgtataacatgacatttattcatcatcaaaagagacagagtcaccatctgtcatatttagattttttttcatgtgttcaaagtatcctctactcatttcattataatagtttatcatacttagaattttaggacggatcaatgagtaagacttgactagatcgtcagtagtaatttgtgcatcgtctattctgcatccgcttcgtcgaataatgtatagcatcgctttgagattctccatagctatcaagtctttatacaatgacatggaaatatctgtgaatactttatacttctccaacatcgatgccttaacatcatcgcctactttagcattgaaaatacgttctattgtgtagatggatgtagcaagatttttaaacaacaatgccatcttacacgatgattgcctcaagtctccaatcgtttgtttagaacgattagctacagagtccaatgcttggctgactagcatattattatctttagaaattgtattcttcaatgaggcgtttatcatatctgtgatttcgttagtcatattacagtctgactgggttgtaatgttatccaacatatcacctatggatacggtacacgtaccagcatttgtaataatcctatctaagatgttgtatggcattgcgcagaaaatatcttctcctgtaatatctccactctcgataaatctactcagattattcttaaatgccttattctctggagaaaagatatcagtgtccatcatttcattaatagtatacgcagaaaagataccacgagtatcaattctatccaagatacttatcggttccgagtcacagataatggtttcctctccttcgggagatcctgcatagaaatatctaggacaatagtttctatactgtctgtaactctgataatctctaaagtcactaactgataccatgaaattgagaagatcaaacgctgaagtaattaatttttctgcctcgtttttactacaactagttttcatcaatgtagtgacgatgtattgtttagttacttttggtctaatactgatgatagagatattattgcttcccataatggatcttctagtagtcaccttaaagcccattgatgcgaatagcagatagataaagtcttggtatgactcctttctaatatagtacggactacctttgtcacccaactttatacccacataagccataacaacctctttaatagccgtttcatgaggtttatcagccatgagcctgagtagttggaagaatctcatgaatcccgtctcagaaagtcctatatgcatgatagatttatctttcctgggaaactctcgtatagtcatagatgaaatactctttaaagtttctgaaataagattagtaacagtcttacctccgactactctaggtaacaaacaaactctaataggtgttttctctgcggagataatatcagaaaggatagagcaataagtagtattattgtgattataaagaccgaatacataacaggtagaatttataaacatcatgtcctgaaggtttttagacttgtattcctcgtaatccataccgtcccaaaacatggatttggtaactttgatagccgtagatctttgttccttcgccaacaggttaaagaaattaataaagaatttgttgtttctatttatgtccacaaattgcacgtttggaagcgccacggttacattcactgcagcattttgaggatcgcgagtatgaagtacgatgttattgtttactggtatatctggaaagaaatctaccagtctaggaataagagattgatatcgcatagaaatagtaaagtttataatctcatcatcgaagagcattttgttaccattgtaataaatatccactctgtcatatgtataaatgaagtactgttcaaacatgatgagatgtttatatgttggcatagtagtgagatcgacgtttggtaatggcaatgtattaagattaactccataatgtctagcagcatctgcgatgttataagcgtcgtcaaagcggggtcgatcttgtattgttatatattgtctaacacctataagattatcaaaatcttgtctgcttaatacaccgttaacaatttttgccttgaattcttttattggtgcattaataacatccttatagaggatgttaaacaaataagtgttatcaaagttaagatctggatatttcttttctgctagaacatccattgagtcggagccatctggtttaatataaccaccgataaatctagctctgtattctgtatccgtcaatctaatattaagaaggtgttgagtgaaaggtggaagatcgtaaaagctgtgagtattaatgataggattagtttccgaactaatgttaattggggtattaataatatctatatttccagcgttaagtgtaacattaaacagttttaattcacgtgacgtggtatcaattaaataattaatgcccaatttggatatagcagcctgaagctcatcttgtttagttacggatcctaatgagttattaagcaatatatcgaacggatgaacgaaggttgttttaagttggtcacatactttgtaatctagacatagatgcggaagaacggtagaaactatacgaaataaatattcagagtcctctaattgatcaagagtaactattgacttaataggcatcatttatttagtattaaatgacgaccgtaccagtgacggatatacaaaacgatttaattacagagttttcagaagataattatccatctaacaaaaattatgaaataactcttcgtcaaatgtctattctaactcacgttaacaacgtggtagatagagaacataatgccgccgtagtgtcatctccagaggaaatatcctcacaacttaatgaagatctatttccagatgatgattcaccggccactattatcgaacgagtacaacctcatactactattattgacgatactccacctcctacgtttcgtagagagttattaatatcggaacaacgtcaacaacgagaaaaaagatttaatattacagtatcgaaaaatgctgaagcaataatggaatctagatctatgataacttctatgccaacacaaacaccatccttgggagtagtttatgataaagataaaagaattcagatgttagaggatgaagtggttaatcttagaaatcaacgatctaatacaaaatcatctgataatttagataattttaccaaaatactatttggtaagactccgtacaaatcaacagaagttaataagcgtatagccatcgttaattatgcaaatttgaacgggtcccccttatcagtcgaggacttggatgtttgttcggaggatgaaatagatagaatctataaaacgattaaacaatatcacgaaagtagaaaacgaaaaattatcgtcactaacgtgattattattgtcataaacattatcgagcaggcattgctaaaactcggatttgaagaaatcaaaggactgagtaccgatatcacttcagaaattatcgatgtggagatcggagatgactgcgatgctgtagcatctaaactaggaatcggtaacagtccggttcttaatattgtattgtttatactcaagatattcgttaaacgaattaaaattatttaatttaatacattcccatatccagacaacaatcgtctggattaatctgttcctgtcgtctcataccggacgacatattaatctttttattagtgggcatctttttagatggtttctttttcccagcattaactgagtcgatacctagaagatcgtgattgatctctccgaccattccacgaacttctaattggccgtctctgacggtaccataaactattttaccagcattagtaacagcttggacaatctgaccatccatcgcattgtacgatgtagtagtaactgttgttctacgtctaggagcaccagaagtatttttggagcccttggatgttgatgtagaagaagacgaggattttgattttggtttacatgtaatacattttgaactctttgattttgtatcacatgcgccggcagtcacatctgtttgagaattaagattattgttgcctcctttgacggctgcatctccaccgatttgcgctagtagatttttaagctgtggtgtaatcttattaactgtttcgatataatcatcgtaactgcttctaacggctaaattttttttatccgccatttagaagctaaaaatatttttatttatgcagaagatttaactagattatacaatgaactaatatgatccttttccagattatttacaaacttggtattttttggttctggaggaggcgaatttaaattcggacttggattcggattttgtaagttcttgatcttattatacatcgagtataggatggcgacagtaactgctacacaaataccgatcaaaagaagaataccaatcatttattgacaataacttcactattgatcaagtatgcaatatatcatcttttcactaaataagtagtaataatgattcaacaatgtcgagatatatggacgataataatttagttcatggaaatatcgctatgattggtgtgaatgactccgctaactctgtggggtgcgcagtgctttccccacatagaataaattagcattccgactgtgataataataccaagtataaacgccataatactcaatactttccatgtacgagtgggactggtagacttactaaagtcaataaaggcgaagatacacgaaagaatcaaaagaatgattccagcgattagcacgccggaaaaataatttccaatcataagcatcatgtccatttaactaataaaaattttaaatcgccgaatgaacaaagtggaatataaaccatataaaaacaatagtttgtactgcaaaaataatatctatttttgttttcgaagatatggtaaaattaaatagtagtacacagcatgttataactaacagcagcaacggctcgtaattacttatcatttactagacgaaaaggtggtgggatattttcttgctcaaataatacgaatatatcacccatccattttatgcgatgtttatatactctaatctttaatagatctatagacgacgggtttaccaacaatatagattttatcgattcatctaatttaaacccttccttaaacgtgaatgatctattatctggcataacgatgaccctacctgatgaatcggacaatgtactgggccatgtagaataaattatcaacgaattatcgtctacgaacatttatatcatttgttttaattttaggacgcgaataaatggatataaaatagaaaataacagatattacaaccagtgttatggccgcgcccaaccaggtaggcagttttattttatcttttactacaggttctcctggatgtacgtcaccaacggcggacgtagttctagtacaattagacgtaagttccgcttgggaattttttaacgctaaagagttaacgttaatcgtgcacccaacgtatttacatctagttcgttgaacatcttgattataatataaccattttctatctctagattcgtcagtgcactcatgtaaccaacataccctaggtcctaaatatttatctccggaattagattttggataattcgcgcaccaacaatttctatttcctttatgatcgttacaaaagacgtataatgccgtatccccaaaagtaaaataatcaggacgaataattctaataaactcagaacaatatctcgcatccatatgtttggagcaaatatcggaataagtagacatagccggtttccgttttgcacgtaaccattctaaacaattggggtttccaggatcgtttctacaaaatccagtcatgaaatcgtcacaatgttctgtcttgtaattattattaaatatttttggacagtgtttggtatttgtcttagaacaacattttgccacgctatcactatcgcccaggagataatccttttttataaaatgacatcgttgcccggatgctatataatcagtagcgtgttttaaatccttaatatattcaggagttacctcgttctgataatagattaatgatccaggacgaaatttgaaagaactacatggttctccatgaattaatacatattgtttagcaaattcaggaactataaaactactacaatgatctatcgacataccatctatcaaacaaaacttgggtttaatttctcccggagatgtttcataatagtacgtataactttcttctgcaaacttaacagctctattatattcaggataattaaaacctaattccatatatttgtctcgtatatctgctattcctggtgctattttgattctattaagagtaacagctgcccccattcttaataatcgtcagtatttaaactgttaaatgttggtatatcaacatctaccttatttcccgcagtataaggtttgttgcaggtatactgttcaggaatggttacatttatacttcttctatagtcctgtctttcgatgttcatcacatatgcaaagaacagaataaacaaaataatgtaagaaataatattaaatatctgtgaattcgtaaatacattgattgccataataattacagcagctacaatacacacaatagacattcccacagtgttgccattacctccacgatacatttgagttactaagcaataggtaataactaagctagtaagaggcaatagaaaagatgagataaatatcatcaatatagagattagaggagggctatatagagccaagacgaacaaaatcaaaccgagtaacgttctaacatcattatttttgaagattcccaaataatcattcattcctccataatcgttttgcatcatacctccatctttaggcataaacgattgctgctgttcctctgtaaataaatctttatcaagcactccagcacccgcagagaagtcgtcaagcatattgtaatatcttaaataactcatttatatattaaaaaatgtcactattaaagatggagtataatctttatgccgaactaaaaaaaatgacttgtggtcaacccctaagtctttttaacgaagacggggatttcgtagaagttgaaccgggatcatcctttaagtttctgatacctaagggattttacgcctctccttccgtaaagacgagtctagtattcgagacattaacaacgaccgataataaaatcactagtatcaatccaacaaatgcgccaaagttatatcctcttcaacgcaaagtcgtatctgaagtagtttctaatatgaggaaaatgatcgaatcaaaacgtcctctatacatcactcttcacttggcgtgtggatttggtaagactattaccacgtgttatcttatggctacacacggtagaaaaaccgtcatttgcgtacccaataaaatgttaatacatcaatggaagacacaggtagaggcagtcggattggaacataagatatccatagatggagtaagtagtctattaaaggaactaaagactcaaagtccggatgtattaatagtagtcagtagacatctgacaaacgatgccttttgtaaatatatcaataagcattatgatttgttcatcttggatgaatcacatacgtataatctgatgaacaatacagcagttacaagatttttagcgtattatcctccgatgatgtgttattttttaactgctacacctagaccatctaaccgaatttattgtaacagtattattaatattgccaagttatccaatctaaaaaaaactatctatgcagtagatagtttttttgagccatattccacagataatattagacatatggtaaaacgactagatggaccatctaataaatatcatatatataccgagaagttattatctgtagacgagcctagaaatcaacttattcttgataccctggtagaagaattcaagtcaggaactattaatcgcattttagttattactaaactacgtgaacatatggtattattctacaaacgattattagattttttcggaccagaggttgtatttataggagacgcccaaaatagacgtactccagatatggtcaaatcaatcaaggaactaaatagatttatattcgtatccaccttattttattccggtactggtttagatattcctagtttggattcgttgttcatttgctcggcagtaatcaacaatatgcaaatagagcaattactagggagggtatgtcgagaaacagaactattagataggacggtatatgtatttcctaacacatccatcaaagaaataaagtacatgataggaaatttcatgcaacgaattattagtctgtctgtagataaactaggatttaaacaaaaaagttatcggaaacatcaagaatccgatcccacttctgcatgtacaacatcatccagagaagaacgtgtattaaatagaatatttaactcgcaaaatcgttaagaagtttaagcgacgatccgcatgctgcgcaggccagtgtattacccctcatagtattaatataatccaatgatacttttgtgatgtcggaaatcttaaccaatttagactgacaggcagaacacgtcatgcaatcatcatcgtcatcgataactgtagtcttgggcttctttttgcgactcttcattccggaacgcacattggtgctatccatttaggtagtaaaaaataagtcagaatatgccctataacacgatcgtgcaaaacctggtatatcgtctctatctttatcacaatatagtgtatcgacatttttattattattgacctcgtttatcttggaacatggaatgggaacatttttgttatcaacggccatctttgccttaattccagatgttgtaaaattataactaaacagtctatcatcgacacaaatgaaattcttgtttagacgtttgtagtttacgtatgcggctcgttcgcgtctcattttttcagatattgcaggtactataatattaaaaataagaatgaaataacataggattaaaaataaagttatcatgacttctagcgctgatttaactaacttaaaagaattacttagtctgtacaaaagtttgagattttcagattctgcggctatagaaaagtataattctttggtagaatggggaacatctacttactggaaaataggcgtgcaaaaggtagctaatgtcgagacgtcaatatctgattattatgatgaggtaaaaaataaaccgtttaatattgatccgggctattacattttcttaccggtatattttgggagcgtctttatttattcgaagggtaaaaatatggtagaacttggatctggaaactcttttcaaataccagatgatatgcgaagtgcgtgtaacaaagtattagacagcgataacggaatagactttctgagatttgttttgttaaacaatagatggataatggaagatgctatatcaaaatatcagtctccagttaatatatttaaactagctagtgagtacggattaaacatacccaaatatttagaaattgaaatagaggaagacacattatttgacgacgagttatactctattatagaacgctctttcgatgataaatttccaaaaatatccatatcgtatattaagttgggagaacttagacggcaagttgtagactttttcaaattctcattcatgtatattgagtccatcaaggtagatcgtataggagataatatttttattcctagcgttataacaaaatcaggaaaaaagatattagtaaaagatgtagaccatttaatacgatccaaggttagagaacatacatttgtaaaagtaaaaaagaaaaacacattttccattttatacgactatgatggaaacggaacagaaactagaggagaagtaataaaacgaattatagacactataggacgagactattatgttaacggaaagtatttctctaaggttggtagtgcaggcttaaagcaattgactaataaattagatattaatgagtgcgcaactgtcgatgagttagttgatgagattaataaatccggaactgtaaaacgaaaaataaaaaaccaatcagcatttgatttaagcagagaatgtttgggatatccagaagcggattttataacgttagttaataacatgcggttcaaaatagaaaattgtaaggttgtaaatttcaatattgaaaatactaattgtttaaataacccgagtattgaaactatatatggaaactttaaccagttcgtctcaatctttaatgtcgtcaccgatgtcaaaaaaagattattcgagtgaaataatatgcgcctttgatataggtgcaaaaaatcctgccagaactgttttagaagtcaaggataactccgttagggtattggatatatcaaaattagactggagttctgattgggaaaggcgcatagctaaagatttgtcacaatatgaatacactacagttcttctagaacgtcagcctagaaggtcgccgtatgttaaatttatctattttattaaaggctttttatatcatacatcggctgccaaagttatttgcgtctcgcctgtcatgtctggtaattcatatagagatcgaaaaaagagatcggtcgaagcatttcttgattggatggacacattcggattgcgagactccgttccggatagacgcaaattagacgatgtagcggatagtttcaatttggctatgagatacgtattagataaatggaatactaattatacaccttataataggtgtaaatctagaaattacataaaaaaaatgtaataacgttagtaacgccattatggataatctatttacctttctacatgaaatagaagatagatatgccagaactatttttaactttcatctaataagttgcgatgaaataggagatatatatggtcttatgaaagaacgcatttcctcagaggatatgtttgataatatagtgtataataaagatatacatcctgccattaagaaactagtgtattgcgacatccaacttactaaacacattattaatcagaatacgtatccggtatttaacgattcttcacaagtgaaatgttgtcattatttcgacataaactcagataatagcaatattagctctcgtacagtagagatatttgagagggaaaagtcatctcttgtatcatatattaaaactaccaataagaagagaaaggtcaattacggcgaaataaagaaaactgttcatggaggcactaatgcaaattacttttccggtaaaaagtctgacgagtatctgagtactacagttagatccaacattaatcaaccttggatcaaaaccatctctaagaggatgagagttgatatcattaatcactctatagtaacgcgtggaaaaagctctatattacaaactatagaaattatttttactaatagaacatgtgtgaaaatattcaaggattctactatgcacattattctatccaaggacaaggatgaaaaggggtgtatacacatgattgacaaattattctatgtctattataatttatttctgttgttcgaagatatcatccaaaacgagtactttaaagaagtagctaatgttgtaaaccacgtactcacggctacggcattagatgagaaattattcctaattaagaaaatggctgaacacgatgtttatggagttagcaatttcaaaatagggatgtttaacctgacatttattaagtcgttggatcataccgttttcccctctctgttagatgaggatagcaaaataaagttttttaaggggaaaaagctcaatattgtagcattacgatctctggaggattgtataaattacgtgactaaatccgagaatatgatagaaatgatgaaggaaagatcgactattttaaatagcatagatatagaaacggaatcggtagatcgtctaaaagaattgcttctaaaatgaaaaaaaacactaattcagaaatggatcaacgactagggtataagtttttggtgcctgatcctaaagccggagttttttatagaccgttacatttccaatatgtatcgtattctaattttatattgcatcgattgcatgaaatcttgaccgtcaagcggccactcttatcgtttaagaataatacagaacgaattatgatagaaattagcaatgttaaagtgactcctccagattactcacctataatcgcgagtattaaaggtaagagttatgacgcattagccacgttcactgtaaatatctttaaagaggtaatgaccaaagagggtatatccatcactaaaataagtagttatgagggaaaagattctcatttgataaaaattccgctactaataggatacgggaataaaaatccacttgatacagccaagtatcttgttcctaatgtcataggtggagtctttatcaataaacaatctgtcgaaaaagtaggaattaatctagtagaaaagattacaacatggccaaaatttagggttgttaagccaaactcattcactttctcgttttcctccgtatcccctcctaatgtattaccgacaagatatcgccattacaagatatctctggatatatcacaattggaagcgttgaatatatcatcgacaaagacatttataacggtcaatattgttttgctgtctcaatatttatctagagtgagtctagaattcattagacgtagtttatcatacgatatgcctccagaagttgtctatctagtaaacgcgataatagatagtgctaaacgaattactgaatctattactgactttaatattgatacatacattaatgacctggtggaagctgaacacattaaacaaaaatctcagttaacgatcaacgagttcaaatatgaaatgctgcataactttttacctcatatgaactatacacccgatcaactaaagggattttatatgatatctttactaagaaagtttctctactgtatcttccacacttctagatatccagatagagattcgatggtttgtcatcgcatcctaacgtacggcaaatattttgagacgttggcacatgatgaattagagaattacataggcaacatccgaaacgatatcatgaacaatcacaagaacagaggcacttacgcggtaaacattcatgtactaacaactcccggacttaatcacgcgttttctagcttattgagtggaaagttcaaaaagtcagacggtagttatcgaacacatcctcactattcatggatgcagaatatttctattcctaggagtgttggattttatccggatcaagtaaagatttcaaagatgttttctgtcagaaaataccatccaagtcaatatctttacttttgttcatcagacgttccggaaagaggtcctcaggtaggtttagtatctcaattgtctgtcttgagttccattacaaatatactaacgtctgagtatttggatttggaaaagaaaatttgtgagtatatcagatcatattataaagatgatataagttactttgaaacaggatttccaatcactatagaaaatgctctagtcgcatctcttaatccaaatatgatatgtgattttgtaactgactttagacgtagaaaacggatgggattcttcggtaacttggaggtaggtattactttagttagggatcacatgaatgaaattcgcattaatattggagcgggaagattagtcagaccattcttggttgtggataacggagagctcatgatggatgtgtgtccggagttagaaagcagattagacgacatgacattctctgacattcagaaagagtttccgcatgtcatcgaaatggtagatatagaacaatttacttttagtaacgtatgtgaatcggttcaaaaatttagaatgatgtcaaaggatgaaagaaagcaatacgatttatgtgactttcctgccgaatttagagatggatatgtagcatcttcattagtgggaatcaatcacaattctggacccagagctattcttggatgtgctcaagctaaacaagctatctcttgtctgagctcggatatacgaaataaaatagacaatggaattcatttgatgtatccagagaggccaatcgtgattagtaaggctttagaaacttcaaagattgcggctaattgcttcggccaacatgttactatagcattaatgtcgtacaaaggtatcaatcaagaggatggaattatcatcaaaaaacaatttattcagagaggcggtctcgatattgttacagccaagaaacatcaagtagaaattccattggaaaactttaataacaaagaaagagataggtctaacgcctattcaaaattagaaagtaatggattagttagactgaatgctttcttggaatccggagacgctatggcacgaaatatctcatcaagaactcttgaagatgattttgctagagataatcagattagcttcgatgtttccgagaaatataccgatatgtacaaatctcgcgttgaacgagtacaagtagaacttactgacaaagttaaggtacgagtattaaccatgaaagaaagaagacccattctaggagacaaatttaccactagaacgagtcaaaagggaacagtcgcgtatgtcgcggatgaaacggaacttccatacgacgaaaatggtatcacaccagatgtcattattaattctacatccatcttctctagaaaaactatatctatgttgatagaagttattttaacagccgcatattctgctaagccgtacaacaataagggagaaaaccgacctgtctgttttcctagtagtaacgaaacatccatcgatacatatatgcaattcgctaaacaatgttatgagcattcaaatccgaaattgtccgatgaagaattatcggataaaatcttttgtgaaaagattctctatgatcctgaaacggataagccttatgcatccaaagtattttttggaccaatttattacttgcgtctgaggcatttaactcaggacaaggcaaccgttagatgtagaggtaaaaagacgaagctcattagacaggcgaatgagggacgaaaacgtggaggaggtatcaagttcggagaaatggagagagactgtttaatagcgcatggtgcagccaatactattacagaagttttgaaagattcggaagaagattatcaagatgtgtatgtttgtgaaaattgtggagacatagcagcacaaatcaagggtattaatacatgtcttagatgttcaaaacttaatctctctcctctcttaacaaaaattgataccacgcacgtatctaaagtatttcttactcaaatgaacgccagaggcgtaaaagtcaaattagatttcgaacgaaggcctccttcgttttataaaccattagataaagttgatctcaagccgtcttttctggtgtaatattctagtttggtagtagatacatatcaatatcatcaaattcgagatccgaattataaaatgggcgtggattgttaactatagaatcggacgtctgatattcgaaaatctgtggagtttcaggttttggtggaggtgtaactgctacttgggatactgaagtctgatattcagaaagctgtggatgttctggttcggcatccaccgatggtgtcacatcactaatcggttcggtaacgtctgtggatggaggtgctacttctacagaacctgtagcctcagttgtcaacggagatacatttttaatgcgagaaaatgtataatttggtaatggtttcttatgtggatctgaagaagaggtaagatatctactagaaagataccgatcacgttctagttctcttttgtagaacttaactttttctttctccgcatctagttgatattccaacctcttcacgttactacgttcagattccaattcacgttcgcatgggttacctccgcagtttttacgagcgatttcacgttcagccttcatgcgtctctccctctctctatcgagtttatcagagcagtctttctgaaggcgatcgaactccataaatttctccaacgctttgattgtttccatagatttccgaagttcagcttttaggactgtgattctttttctttcgaattcacagctggatgtacaaccgtttccattaccgccatctctaagtttcttttctagatcggcaacatttcatccccatgccttttacattcctcgagtctactgtcgtcgaaatatcgttccagctccttttcgacatcaataactttagcacgttgtctctcaagctctcttttgtagttatctgattccctggcacgtttaagatcttcatgcaattgagtcagctcttaacttcctctcttgcttcttcgtcatagtacgcgcaatcactgtgagatccattgttaccacgtctacactcggcgagctcgcgtttaagagattcaatttcccgtttgtattggtccatgtttccattgctaccaccattagatttacaggctgctagttgtcgttcgagatcagaaatacgggttttcttggaattgatttcgtcgatgtacttggcatcgaaacacttattaagttctttttccaattctacgattttatttctttcgcgagtcaattccctcctgtagtaactatctgttttgtcagattcacgctctctacgtagactttcttgcaagttactaatttgttccctagcacgtccgagtttagttttatatgctgaatagagttctgattcatcctttgagcagatctctagcgatcgtttaagattcctaattctagtctttagcctatttacctcctcagaagatgttccgttaccgttgcgtttacactcgttaagctgtctatcaagatccatgattctatctctaagacgttgcatctctctttccatatcagcattgctttcattattacgtctgcagtcactcaactgtctttcaatatctgagattctatctctaagacgtcgcatctctctctgtttcggcattggtttcattattacgtttacagtcgttcaactgtctttcaagatctgatattctagattggagtctgctaatctctgtagcattttcacggcattcactcagttgtctttcaagatctgaaattttagattggagtctgctaatctctgtaagatttcctcctccgctctcgatgcagtcggtcaacttattctctagttctctaatacgcgaacgcagtgcatcaacttcttgcgtgtcttcctggttgcgtgtacattcatcgagatctctaacgcgtcgtcgttcttcctcaagttctctgcgtactacagaaagcgtgtccctatcttgttgatatttagcaatttctgattctagagtactgattttgcttacgtagttactaatagttgtcttggccttatcaagatcctccttgtatttgtcgcattccttgatatccctacgaagtctggacagttcccattcgacattacgacgtttatcgatttcagctcggagatcgtcatcgcgttgttttagccacatacgactgagttcaagttctcgttgacaagatccatctacttttccattcctaatagtatccagttccttttctagttctgaacgcatttctcgttccctatcaagcgattctctcaattctcggatagtcttcttatcaatttctaataaatctgaaccatcatctgtcccattttgaatatccctgtgttctttgatctcttttgtaagtcggtcgattctttcggttttataaacagaatccctttccaaagtcctaatcttactgagtttatcactaagttctgcattcaattcggtgagttttctcttggcttcttccaactctgttttaaactctccactatttccgcattcttcctcgcatttatctaaccattcaattagtttattaataactagttggtaatcagcgattcctatagccgttcttgtaattgtgggaacataattaggatcttctaatggattgtatggcttgatagcatcatctttatcattattagggggatggacaaccttaattggttggtcctcatctcctccagtagcgtgtggttcttcaataccagtgttagtaataggcttaggcaaatgcttgtcgtacgcgggcacttcctcatccatcaagtatttataatcgggttctacttcagaatattcttttctaagagacgcgacttcgggagttagtagaagaactctgtttctgtatctatcaacgctggaatcaatactcaagttaaggatagcgaatacctcatcgtcatcatccgtatcttctgaaacaccatcatatgacatttcatgaagtctaacgtattgataaatagaatcagatttagtattaaacagatccttaacctttttagtaaacgcatatgtatattttagatctccagatttcataatatgatcacatgccttaaatgtcagtgcttccatgatataatctggaacactaatgggtgacgaaaaagatacagcaccatatgctacgttgataaataaatctgaaccactaagtagataatgattaatgttaagaaagaggaaatattcagtgtataggtatgtcttggcgtcatatcttgtactaaacacgctaaacagtttgttaatgtgatcaatttccaatagattaattagagcagcgggaataccaacaaacatattaccacatccgtattttctatgaatatcacatatcatgttaaaaaatcttgatagaagagcgaatatctcgtctgacttaatgagtcgtagttcagcagcaacataagtcataactgtaaatagaacatactttcctgtagtgttgattctagactccacatcaacaccattattaaaaatagttttatatacatctttaatctgctctccgttaatcgtcgaacgttctagtatacggaaacactttgatttcttatctgtagttaatgacttagtgatatcacgaagaatattacgaattacatttcttgtttttcttgagagacctgattcagaactcaactcatcgttccatagtttttctacctcagtggcgaaatctttggagtgcttggtacatttttcaataaggttcgtgacctccatttattataaaaaatttattcaaaacttaactacaatcgggtaattataagatcgtagatctcccatgtggcggaatactaccatctatcgcatgtggatggacagtaggtaatggccatgggaacagtaatgtttgcatatttatctttcttgctagtattactgcatattgtcccaatgtttcgatgtgatgttctaacctatcaactgccgctgtatcacaacaatagtgtccgatgaaattaagattatgatccaatgtgtttaatatatgattatcaagtcttatacgatccgcgtcttttttgacaggatcaggttcttctacaggaagaagtttcggcctcttatgatattcatgtctgggaaacggtggtctagggtgaggctccggtatcggagtgggttttggattataatcatcatcgtctatgacatcatcttcgacttcgatatttattttgctatcttgatgatgtcctgtatcagttgcattttcagcactcgactgaatattagcgcattcattgtctattattaccatatttctaaacccaaaatgtatgtgttgaacatcagtactatcgttgatgagtcttatagcatgaattcgcttatcgttatcgggtttatcttctgtcaccttagcaattccttttttattaaactctacataatcatatccatttctattgtttgttctaatataaacgagtatagcatcattgctaaatttttcaatagtatcaaaaacagaatatcctaaaccatataatatatattcaggaacactcaaactaaatgtccaggattctcctaaatacgtaaactttaatagtgcgaaatcattcaaaaatctaccacttatagatagatagtacataaatgcgtatagtagtctacctatctctttattatgaaaaccggcattacgatcatatatgtcgtgatatacctgtgatccgtttacgttaaaccataaatacatgggtgatcctataaacatgaatttatttctaattctcagagctatagttaattgaccgtgtaatatttgcttacatgcatacttgatacgcttattaataagatttttatcattgctcgttatttcagaatcgtatatataaggagtaccatcgtgattcttaccagatattatacaaaatactatatataaaatatattgacccacgttagtaatcatataaatgtttaacgttttaaattttgtattcaatgatccattatcatacgctatcatggtcttgtaatattcattctttaaaatataatattgtgttagccattgcattggagctcctaatggagattttctattctcatccattttaggataggctttcataaagtccctaataacttcgtgaataatgtttctatgttttctactgatgcatgtatttgcttcgatttttttatcccatgtttcatctatcatagatttaaacgcagtaatgctcgcaacattaacatcttgaaccgttggtacaattccgttccataaatttataatgttcgccatttatataactcattttttgaatatacttttaattaacaaaagagttaagttactcatatggacgccgtccagtctgaacatcaatctttttagccagagatatcatagccgctcttagagtttcagcgtgattttccaacctaaatagaacttcatcgttgcgtttacaacacttttctatttgttcaaactttgttgttacattagtaatctttttttccaaattagttagccgttgtttgagagtttcctcattgtcgtcttcatcggctttaacaattgcttcgcgtttagcctctggctttttagcagcctttgtagaaaaaaattcagttgctggaattgcaagatcgtcatctccggggaaaagagttccgtccatttaaagtacagattttagaaactgacactctgcgttatttatatttggtacaacacatggattataaatattgatgttaataacatcagaaaatgtaaagtctatacattgttgcatcgtgttaaattttctaatggatctagtattattgggtccaacttctgcctgaaatccaaatatggaagcggatacaaaaccgtttcctggataaaccacacatctccacttttgctttacatcagaaattgtgtcgttgacatcttgaactctcctatctaatgccggtgttccacctatagattttgaatattcgaatgctgcatgagtagcattaaattccttaatattgccataattttcatatattgagtaaccctggataaaaagtaaacacaccgcagccgtcgctaccacaataaaaaaaattgatagagagttcatttataatctattagaagctgacaaaatttttttacacgcatcagacaatgctttaataaatagttcaacatctacttttgtcatatcgaaccgatggtatgattctaacctagaattacatccgaaaaagttgactatgttcatagtcattaagtcattaacaaacaacattccagactctggattataagacgatactgtttcgtcacaattacctaccttaatcatgtgattatgaatattggctattagagcaccttctaagaaatctataatatctttgaaacacgatttaaaatcaaaccacgaatatacttctacgaagaaagttagtttacccataggagaaataactataaatggagatctaaatacaaaatccggatctatgatagttttaacattattatattctctattaaatacctccacatctaaaaatgttaattttgaaactatgtcttcgtttattaccgtacctgaactaaacgctataagctctattgtttgagaactctttaaacgatattcttgaaatacatgtaacaaagtttcctttaactcggtcggtttatctaccatagttacagaatttgtatccttatctataatataataatcaaaatcgtataaagttatataattatcgcgttcagattgtgatcttttcaaatagactaaaaaccccatttctctagtaagtatcttatgtatatgtttgtaaaatatcttcatggtgggaatatgctctaccgcagttagccattcctcattgacagcggtagatgtattagacaaaactattccaatgtttaacaagggccattttacgagattattaaatccttgtttgataaatgtagccaatgagggttcgagttcaacgacgattgaattctcttcccgcggatgctgcatgatgaacgacgggatgttgttcgattgatttggaattctttttcgactttttgtttatattaaatattttaaaatttatagcggatagcaattcatgtaccacggataatgtagacgcgtattgcgcatcgatatctttattattagataaatttatcaataaatgtgagaagtttgcctcgttaaggtcttccatttaaatattatataaacatttgtgtttgtatcttattcgtcttttatggaatagttttttactagtaaagctgcaattacacactttgtccgtaaaacataaatataaacaccagcttttatcaatcgttccaaaaagtcgacggcggacatttttaacatggcatctattttaaatacacttaggtttttggaaaaaacatcattttataattgtaacgattcaataactaaagaaaagattaagattaaacataagggaatgtcatttgtattttataagccaaagcattctaccgttgttaaatacttgtctggaggaggtatatatcatgatgatttggttgtattggggaaggtaacaattaataatctaaagatgatgctattttacatggatttatcatatcatggagtgacaagtagtggagcaatttacaaattgggatcgtctatcgatagactttctctaaataggactattgttacaaaagttaataattatgatgatacattttttgacgacgatgattgatcgctattgcacaattttgtttttgtactttctaatatagtgtttaggttctttttcatatgagaatattgatttactaaaatatctatgtttaacttttgttctatgacgtccttatcggcggtatcggtacatatacgtaattcaccttcacaaaatacggagtcttcgataataatagccaatcgattattggatctagctgtctgtatcatattcaacatgtttaatatatcctttcgtttcccctttacaggcatcgatcgtagcatattttccgcgtctgatatggaaatgttaaaactacaaaaatgcgtaatgttagcccgtcctaatattggtacgtgtctataagtttggcatagtagaataatagacgtgtttaaatgccttccaaagtttaagaattctattagagtattgcattttgatagtttatcgcctacatcatcaaaaataagtaaaaagtgtgctgattttttatgattttgtgcgacagcaatacatttttctatgttacttttagttcgtatcagattatattctagagattcctgactactaacgaaattaatatgatttggccaaatgtatccatcataatctgggttataaacgggtgtaaacaagaatatatgtttatattttttaactagtgtagaaaacagagatagtaaatagatagtttttccagatccagatcctcctgttaaaaccattctaaacggcatttttaataaattttctcttgaaaattgtttttcttggaaacaattcataattatatttacagttactaaattaatttgataataaatcaaaatatggaaaactaaggttgttagtagggaggagaacaaagaaggcacatcgtgatataaataacatttattatcatgatgacaccagaaaacgacgaagagcagacatctgtgttctccgctactgtttacggagacaaaattcagggaaagaataaacgcaaacgcgtgattggtctatgtattagaatatctatggttatttcactactatctatgattaccatgtccgcgtttctcatagtgcgcctaaatcaatgcatgtctgctaacgaggctgctattactgacgccgctgttgccgttgctgctgcatcatctactcatagaaaggttgcgtctagcactacacaatatgatcacaaagaaagctgtaatggtttatattaccagggttcttgttatatattacattcagactaccagttattctcggatgctaaagcaaattgcactgcggaatcatcaacactacccaataaatccgatgtcttgactacctggctcattgattatgttgaggatacatggggatctgatggtaatccaattacaaaaactacatccgattatcaagattctgatgtatcacaagaagttagaaagtatttttgtgttaaaacaatgaactaatatttatttttgtacattaataaatgaaatcgcttaatagacaaactgtaagtaggtttaagaagttgtcggtgccggccgctataatgatgatactctcaaccattattagtggcataggaacatttctgcattacaaagaagaactgatgcctagtgcttgcgccaatggatggatacaatacgataaacattgttatttagatactaacattaaaatgtctacagataatgcggtttatcagtgtcgtaaattacgagctagattgcctagacctgatactagacatctgagagtattgtttagtattttttataaagattattgggtaagtttaaaaaagaccaatgataaatggttagatattaataatgataaagatatagatattagtaaattaacaaattttaaacaactaaacagtacgacggatgctgaagcgtgttatatatacaagtctggaaaactggttaaaacagtatgtaaaagtactcaatctgtactatgtgttaaaaaattctacaagtgacaacaaaaaatgaattaataataagtcgttaacgtacgccgccatggacgccgcgtttgttattactccaatgggtgtgttgactataacagatacattgtatgatgatctcgatatctcaatcatggactttataggaccatacattataggtaacataaaaactgtccaaatagatgtacgggatataaaatattccgacatgcaaaaatgctactttagctataagggtaaaatagttcctcaggattctaatgatttggctagattcaacatttatagcatttgtgccgcatacagatcaaaaaataccatcatcatagcatgcgactatgatatcatgttagatatagaagataaacatcagccattttatctattcccatctattgatgtttttaacgctacaatcatagaagcgtataacctgtatacagctggagattatcatctaatcatcaatccttcagataatctgaaaatgaaattgtcgtttaattcttcattctgcatatcagacggcaatggatggatcataattgatgggaaatgcaatagtaattttttatcataaaagttgtaaagtaaataataaaacaataaatattgaactagtagtacgtatattgagcaatcagaaatgatgctggtacctcttatcacggtgaccgtagttgcgggaacaatattagtatgttatatattatatatttgtaggaaaaagatacgtactgtctataatgacaataaaattatcatgacaaaattaaaaaagataaagagttctaattccagcaaatctagtaaatcaactgatagcgaatcagactgggaggatcactgtagtgctatggaacaaaacaatgacgtagataatatttctaggaatgagatattggacgatgatagcttcgctggtagtttaatatgggataacgaatccaatgttatggcgcctagcacagaacacatttacgatagtgttgctggaagcacgctgctaataaataatgatcgtaatgaacagactatttatcagaacactacagtagtaattaatgaaacggagactgttgaagtacttaatgaagataccaaacagaatcctaactattcatccaatcctttcgtaaattataataaaaccagtatttgtagcaagtcaaatccgtttattacagaacttaacaataaatttagtgagaataatccgtttagacgagcacatagcgatgattatcttaataagcaagaacaagatcatgaacacgatgatatagaatcatcggtcgtatcattggtgtgattagtttcctttttataaaattgaagtaatatttagtattattgctgccgtcacgttgtacaaatggagatattccctgtattcggcatttctaaaattagcaattttattgctaataatgactgtagatattatatagatacagaacatcaaaaaattatatctgatgagatcaatagacagatggatgaaacggtacttcttaccaacatcttaagcgtagaagttgtaaatgacaatgagatgtaccatcttattcctcatagattatcgacgattatactctgtattagttctgtcggaggatgtgttatctctatagataatgacatcaatggcaaaaatattctaacctttcccattgatcatgctgtaatcatatccccactgagtaaatgtgtcgtagttagcaagggtcctacaaccatattggttgttaaagcggatatacctagcaaacgattggtaacatcgtttacaaacgacatactatatgtaaacaatctgtcactgattaattatttgccgttgtctgtattcattattagacgagtcaccgactatttggatagacacatatgcgatcagatatttgctaataataagtggtattcccttataaccatcgacgataagcaatatcctattccatcaaactgtataggtatgtcctctgccaagtacataaattctagcatcgagcaagatactttaatccatgtttgtaacctcgagcatccgttcgactcagtatacaaaaaaatgcagtcgtacaattctctacctatcaaggaacaaatattgtacggtagaattgataatataaatatgagcattagtatttctgtggattaatagatttctagtatggggatcattaatcatctctaatctctaaatacctcataaaacgaaaaaaaagctattatcaaatactgtacggaatggattcattctcttctctttttatgaaactctgttgtatatctactgataaaactggaagcaaaaaatctgatagaaagaataagaataagatcaaggattatatggaacacgattattataaaataacaatagttcctggttcctcttccacgtctactagctcgtggtattatacacatgcctagtaatagtctctttgcgttgacggaaagcagactagaaataacaggctaaaatgttcagacaccataatagttcccaacccagataataacagagttccatcaacacattcctttaaactcaatcccaaacccaaaaccgttaaaatgtatccggccaattgatagtagataatgaggtgtacagcgcatgataatttacacagtaaccaaaatgaaaatactttagtaattataagaaatatagacggtaatgtcatcatcaacaatccgataatatgcctgagagtaaacattgacggataaaacaaaaatgctccgcataactctatcatggcaataacacaaccaaatacttgtaagattcctaaattagtagaaaatacaacgaatatcgatgtataagtgatctcgagaaataataagaataaagtaatgcccgtaaagataaacatcaacattgtttggtaatcattaaaccaattagtatgaagttgaactaatttcacagtagattttattccagtgttatcctcgcatgtataagtacctggtaagatatctttatattccataatcaatgagacatcactatctgataacgaatgaagtctagcactagtatgccatttacttaatattgtcgtcttggaagttttattataagttaaaatatcatggttatccaatttccatctaatatactttgtcggattatctatagtacacggaataatgatggtatcattacatgctgtatactctatggtctttgtagttgttataacaaccaacgtatagaggtatatcaacgatattctaactcttgacattttttatttatttaaaatgatacctttgttatttattttattctattttgctaacggtattgaatggcataagtttgaaacgagtgaagaaataatttctacttacttattagacgacgtattatacacgggtgttaatggggcggtatacacattttcaaataataaactaaacaaaactggtttaactaataataattatataacaacatctataaaagtagaggatgcggataaggatacattagtatgcggaaccaataacggaaatcccaaatgttggaaaatagacggttcagacgacccaaaacatagaggtagaggatacgctccttatcaaaatagcaaagtaacgataatcagtcacaacggatgtgtactatctgacataaacatatcaaaagaaggaattaaacgatggagaagatttgacggaccatgtggttatgatttattcacggcggataacgtaattccaaaagatggtttacgaggagcattcgtcgataaagacggtacttatgacaaagtttacattcttttcactgatactatcggctcaaagagaattgtcaaaattccgtatatagcacaaatgtgcctaaacgacgaaggtggtccatcatcattgtctagtcatagatggtcgacgtttctcaaagtcgaattagaatgtgatatcgacggaagaagttatagacaaattattcattctagaactataaaaacagataatgatacgatactatatgtattcttcgatagtccttattccaagtccgcattatgtacctattctatgaataccattaaacaatctttttctacgtcaaaattggaaggatatacaaagcaattgccgtctccagctcctggtatatgtttaccagctggaaaagttgttccacataccacgtttgaagtcatagaacaatataatgtactagatgatattataaagcctttatctaaccaacctatcttcgaaggaccgtctggtgttaaatggttcgatataaaggagaaggaaaatgaacatcgggaatatagaatatacttcataaaagaaaattctatatattcgttcgatacaaaatctaaacaaactcgtagctcgcaagtcgatgcgcgactattttcagtaatggtaactgcgaaaccgttatttatagcagatatagggataggagtaggaatgccacaaatgaaaaaaatacttaaaatgtaatcttaatcgagtacaccacacgacaatgaacaaacataagacagattatgctggttatgcttgctgcgtaatatgcggtctaattgtcggaattatttttacagcgacactattaaaagttgtagaacgtaaattagttcatacaccattaatagataaaacgataaaagatgcatatattagagaagattgtcctactgactggataagctataataataaatgtatccatttatctactgatcgaaaaacctgggaggaaggacgtaatgcatgcaaagctctaaattcaaattcggatctaattaagatagagactccaaacgagttaagttttttaagaagccttagacgaggctattgggtaggagaatccgaaatattaaaccagacaaccccatataattttatagctaagaatgccacgaagaatggaactaaaaaacggaaatatatttgtagcacaacgaatactcccaaactgcattcgtgttacactatataacaattacactacatttttatcataccactacttcggttagatgttttagaaaaaaataaatatcgccgtaccgttcttgtttttataaaaataacaattaacaattatcaaattttttctttaatattttacgtggttgaccattcttggtggtaaaataatctcttagtgttggaatggaatgctgtttaatgtttccacactcatcgtatattttgacgtatgtagtcacatcgtttacgcaatagtcagactgtagttctatcatgcttcctacatcagaaggaggaacagttttaaagtctcttggttttaatctattaccgttagttttcatgaaatcctttgttttatccacttcacattttaaataaatgtccactatacattcttttgttaattttactagatcgtcatgggtcatagaatttataggttccgtagtccatggatccaaactagcaaacttcgcgtatacggtatcgcgattagtgtatacaccaactgtatgaaaattaagaaaacagtttaataaatcaacagaaatatttaatcctccgtttgatacagatgcgccatatttatggatttcggattcacacgttgtttgtctgaggtgttcgtctagtgttgcttctacgtaaacttcgattcccatatattctttattgtcagaatcgcataccgatttatcatcatacactgtttgaaaactaaatggtatacacatcaaaataataaataataacgagtacattctgcaatattgttatcgtaattggaaaaatagtgttcgagtgagttggattatgtgagtattggattgtatattttattttatattttgtaataagaataaaatgctaatgtcaagtttattccaatagatgtcttattaaaaacatatataataaataacaatggctgaatggcataaaattatcgaggatatctcaaaaaataataagttcgaggatgccgccatcgttgattacaagactacaaagaatgttctagctgctattcctaacagaacatttgccaagattaatccgggtgaaattattcctctcatcactaatcgtaatattctaaaacctcttattggtcagaaatattgtattgtatatactaactctctaatggatgagaacacgtatgctatggagttgcttactgggtacgcccctgtatctccgatcgttatagcgagaactcataccgcacttatatttttgatgggtaagccaacaacatccagacgtgacgtgtatagaacgtgtagagatcacgctacccgtgtacgtgcaactggtaattaaaataaaaagtaatattcatatgtagtgtcaattttaaatgatgatgatgaaatggataatatccatattgacgatgtcaataatgccggtattggcatacagttcatcgatttttagatttcattcagaggatgtggaattatgttatgggcatttgtattttgataggatctataatgtagtaaatataaaatataatccgcatattccatatagatataattttattaatcgcacgttaaccgtagatgaactagacgataatgtcttttttacacatggttattttttaaaacacaaatatggttcacttaatcctagtttgattgtctcattatcaggaaacttaaaatataatgatatacaatgctcagtaaatgtatcgtgtctcattaaaaatttggcaacgagtacatctactatattaacatctaaacataagacttattctctacatcggtccacgtgtattactataataggatacgattctattatatggtataaagatataaatgacaagtataatgacatctatgattttactgcaatatgtatgctaatagcgtctacattgatagtgaccatatacgtgtttaaaaaaataaaaatgaactcttaattatgctatgctattagaaatggataaaatcaaaattacggttgattcaaaaattggtaatgttgttaccatatcgtataacttggaaaagataactattgatgtcacacctaaaaagaaaaaagaaaaggatgtattattagcgcaatcagttgctgtcgaagaggcaaaagatgtcaaggtagaagaaaaaaatattatcgatattgaagatgacgatgatatggatgtagaaagcgcgtaatacgatctataaaaataagtatataaatactttttatttactgtactcttactgtgtagtggtgataccctactcgattatttttttaaaaaaaaaatacttattctgattcttctagccatttccgtgttcgtttgaatgccacatcgacgtcaaagataggggagtagttgaaatctagttctgcattgttggtacgcacctcaaatgtagtgttggatatcttcaacgtatagttgttgagtagtgatggttttctaaatagaattctcttcatatcattcttgcacgcgtacatttttagcatccatcttggaatcctagatccttgttctattcccaatggtttcatcaatagaagattaaacatatcgtacgaacacgatggagagtaatcgtagcaaaagtaagcatttcctttaatcttagatcccggatactggatatattttgcagccaacacgtgcatccatgcagcatttcctacatatacccggctatgcaccgcgtcatcatcgactgtacgatacataatgttaccgtgttgcttacattgctcgtaaaagactttcatcaatttgtctccttctccgtaaattccagtgggtcttaggcaacaagtatacaattttgctccattcatgattacggaattattggctttcataaccagttgctcggccatacgtttactttttgcgtatacatgtcctggtgatatatcataaagggtatgctcatggccgatgaatggatcaccgtgtttattgggtcctattgcttccatgctactagtatagatcaaatacttgattcctaggtccacacaagctgccaaaatagtctgtgttccataatagtttactttcatgatttcattatcggtgtattttccaaatacatccactagagcagccgtatgaataatcagatttaccccatctagcgcttctctcaccttatcaaagtcgtttatatcacattgtatatagtttataaccttaactttcgaggttattggttgtggatcttctacaatatctatgactctgatttcttgaacatcatctgcactaattaacagttttactatatacctgcctagaaatccggcaccaccagtaaccgcgtacacggccattgctgccactcataatatcagactacttattctattttactaaataatggctgtttgtataatagaccacgataatatcagaggagttatttactttgaaccagtccatggaaaagataaagttttaggatcagttattggattaaaatccggaacgtatagtttgataattcatcgttacggagatattagtcaaggatgtgattccataggcagtccagaaatatttatcggtaacatctttgtaaacagatatggtgtagcatatgtttatttagatacagatgtaaatatatttacaattattggaaaggcgttatctatttcaaaaaatgatcagagattagcgtgtggagttattggtatttcttacataaatgaaaagataatacattttcttacaattaacgagaatggcgtttgatatatcagttaatgcgtctaaaacaataaatgcattagtttacttttctactcagcaaaataaattagtcatacgtaatgaagttaatgatacacactacactgtcgaatttgatagggacaaagtagttgacacgtttatttcatataatagacataatgacaccatagagataagaggggtgcttccagaggaaactaatattggttgcgcggttagtatgacttacttgtataataagtatagttttaaactgattttagcagaatatataagacacagaaatactatatccggcaatatttattcggcattgatgacactagatgatttggctattaaacagtatggagacattgatctattatttaatgagaaacttaaagtagactccgattcgggactatttgactttgtcaactttgtaaaggatatgatatgttgtgattctagaatagtagtagctctatctagtctagtatctaaacattgggaattgacaaataaaaaatataggtgtatggcattagccgaacatatatctgatagtattccaatatctgagctatctagactacgatacaatctatgtaagtatctacgcggacacactgagagcatagaggataaatttgattattttgaagacgatgattcgtctacatgttctgccgtaaccgacagggaaacggatgtataattttttttatagcgtgaaggatatgataaaaaatataattgttgtatttatcccattccaatcaccttatatgattctgtaacacaataaaggagtcttatagatgtatagaggtcagatactggtttgataaactgtttattccacataagtatgtttgactttatggttagacccgcatactttaacaaatcactgaaaattggagttaggtattgacctctcagaatcagttgccgttctggaacattaaatgtattttttatgatatactccaacgcatttatgtgggcatacaacaagtcattactaatggaatattccaagagttttagttgtctagtatttaacaagagaagagatttcaacagactgtttatgaactcgaatgccgcctcattgtcgcttatattgatgatgtcgaattctcccaatatcatcaccgatgagtagctcatcttgttatcgggatccaagttttctaaagatgtcattaaaccctcgatcatgaatggatttatcatcatcgtttttatgttggacatgagcttagtccgtttgtccacatctatagaagatgatttctgaattatttcatatatctctctctttaactccaggaacttgtcaggatggtctactttaatatgttctcgtctaagagatgaaaatctttggatggttgcacgcgacttttctctaaaggatgacgttgcccaagatcctctcttaaatgaatccatcttatccttggacaagatggacagtctattttccttagatggtttaatatttttgttacccatgatctataaaggtagacctaatcgtctcggatgaccatatatttattttcagttttattatacgcataaattgtaaaaaatatgttaggtttacgaaaatgtctcgtggggcattaatcgtttttgaaggattggacaaatctggaaaaacaacacaatgtatgaacatcatggaatcaataccttcaaacacaataaaataccttaactttcctcagagatccactgtcactggaaagatgatagatgactatctaactcgtaaaaaaacctataatgatcatatagttaatctattattttgtgcaaatagatgggagtttgcatcttttatacaagaacaactagaacagggaattactttaatagttgatagatacgcattttctggagtagcgtatgccgccgctaaaggcgcgtcaatgactctcagtaagagttatgaatctggattgcctaaacccgacttagttatattcttggaatctggtagcaaagaaattaatagaaacgtcggtgaggaaatttatgaagatgttacattccaacaaaaggtattacaagaatataaaaaaatgattgaagaaggagatattcattggcaaattatttcttctgaattcgaggaagatgtaaagaaggagttgattaagaatatagttatagaggctatacacacggttactggaccagtggggcaactgtggatgtaatagtgaaattacattttttataaatagatgttagtacagtgttataaatggatgaagcatattactctggcaacttggaatcagtactcggatacgtgtccgatatgcataccgaactcgcatcaatatctcaattagttattgccaagatagaaactatagataatgatatattaaacaaggacattgtaaattttatcatgtgtagatcaaacttggataatccatttatctctttcctagatactgtatatactattatagatcaagagaactatcagactgagttgattaattcattagacgacaatgaaattatcgattgtatagttaataagtttatgagcttttataaggataacctagaaaatatagtagatgctatcattactctaaaatatataatgaataatccagattttaaaactacgtatgccgaagtactcggttccagaatagccgatatagatattaaacaagtgatacgtaagaatatactacaattgtctaataatatccgcgaacgatatttgtgaaaatattaaaaaaaaatactttttttattaaatgacgtcttttcgtgaatttagaaaattatgctgtgctatatatcacgcatcaggatataaagaaaaatctaaattaattagagactttataacagatagggatgataaatatttgatcattaagctattgcttcccggattagacgatagaatttataacatgaacgataaacaaattataaaattatatagtataatatttaaacaatctcaggaagatatgctacaagatttaggatacggatatataggagacactattaggactttcttcaaagagaacacagaaatccgtccacgagataaaagcattttaactttagaagaagtggatagttttttaactacgttatcatccgtaactaaagaatcgcatcaaataaaattattgactgatgtagcatctgtttgtacatgtaatgatttaaaatgtgtagtcatgcttattgataaagatctaaaaattaaagcgggtcctcggtacgtacttaacgctattagtcctaatgcctatgatgtgtttagaaaatctaataacttgaaagagataatagaaaattcatctaaacaaaatctagactctatatctatttctgttatgactccaattaatcccatgttagcggaatcgtgtgattctgtcaataaggcgtttaaaaaatttccatcaggaatgtttgcggaagtcaaatacgatggtgaaagagtacaagttcataaaaataataacgagtttgccttctttagtagaaacatgaaaccagtactctctcataaagtggattatctcaaagaatacataccgaaagcatttaaaaaagctacgtctatcgtattggattctgaaattgttcttgtagacgaacataatgtaccgctcccgtttggaagtttaggtatacacaaaaagaaagaatataaaaactctaacatgtgtttgttcgtgtttgactgtttgtactttgatggattcgatatgacggacattccattgtacgaacgaagatcttttctcaaagatgttatggttgaaatacccaatagaatagtattctcagagttgacgaatattagtaacgagtctcagttaactgacgtattggatgatgcactaacgagaaaattagaaggattggtcttaaaagatattaatggagtatacgaaccgggaaagagaagatggttaaaaataaagcgagactatttgaacgagggttccatggcagattctgccgatttagtagtactaggtgcctactatggtaaaggagcaaagggtggtatcatggcagtctttctaatgggttgttacgacgatgaatccggtaaatggaagacggttaccaagtgttcaggacacgatgataatacgttaagggagttgcaagaccaattaaagatgattaaaattaacaaggatcccaaaaaaattccagagtggttagtagttaataaaatctatattcccgattttgtagtagaggatccgaaacaatctcagatatgggaaatttcaggagcagagtttacatcttccaagtcccataccgcaaatggaatatccattagatttcctagatttactaggataagagaggataaaacgtggaaagaatctactcatctaaacgatttagtaaacttgactaaatcttaatagttacatacaaactgaaaattaaaataacactatttagttggtggtcgccatggatggtgttattgtatactgtctaaacgcgctagtaaaacatggcgaggaaataaatcatataaaaaatgatttcatgattaaaccatgttgtgaaagagtttgtgaaaaagtcaagaacgttcacattggcggacaatctaaaaacaatacagtgattgcagatttgccatatatggataatgcggtatccgatgtatgcaattcactgtataaaaagaatgtatcaagaatatccagatttgctaatttgataaagatagatgacgatgacaagactcctactggtgtatataattattttaaacctaaagatgccattcctgttatcatatctataggaaaggataaagatgtctgtgaactattaatctcatcagacatatcgtgtgcatgcgtggagttaaattcatatcacgtagccattcttcccatggatgtttccttttttaccaaaggaaatgcatcattgattattctcctgtttgatttctctatcgatgcggcacctctcttaagaagtgtaaccgataataatgttattatatctagacaccagcgtctacatgacgagcttccgagttccaattggttcaagttttacataagtataaagtccgactattgttctatattatatatggttgttgatggatctgtgatgcatgcgatagctgataatagaactcacgcaattattagcaaaaatatattagacaatactacgattaacgatgagtgtagatgctgttattttgaaccacagattaggattcttgatagagatgagatgctcaatggatcatcgtgtgatatgaacagacattgtattatgatgaatttacctgatgtaggcgaatttggatctagtatgttggggaaatatgaacctgacatgattaagattgctctttcggtggctggtaatttaataagaaatcgagactacattcccgggagacgaggatatagctactacgtttacggtatagcctctagataatttttttaagcacgaaataaaaaacataattttaaaccaatctatttcatactattttgtgtgatcaccatggacataaagatagatattagtatttctggtgataaatttacggtgactactaggagggaaaatgaagaaagaaaaaaatatctacctctccaaaaagaaaaaactactgatgttatcaaacctgattatcttgagtacgatgacttgttagatagagatgagatgtttactattctagaggaatattttatgtacagaggtctattaggcctcagaataaaatatggacgactctttaacgaaattaaaaaattcgacaatgatgcggaagaacaattcggtactatagaagaactcaagcagaaacttagattaaattctgaagagggagcagataactttatagattatataaaggtacaaaaacaggatatcgtcaaacttactgtatacgattgcatatctatgataggattgtgtgcatgcgtggtagatgtttggagaaatgagaaactgttttctagatggaaatattgtttacgagcgattaaactgtttattgatgatcacatgcttgataagataaaatctatactgcagaatagactagtatatgtggaaatgtcatagaaagttaaaagttaatgagagcaaaaatatataaggttgtattccatatttgttatttttttctgtaatagttagaaaaatacattcgatggtctatctatcagattattatgtgttataaggtactttttctcataataaactagagtatgagtaagatagtgtttttcaaaacatataaatctaaaattgatggatgagatatacagctattaatttcgaaaatatattttaatctgataactttaaacatggatttttaatggtggtttaacgttttaaaaaaagattttgttattgtagtatatgataatattaaaagatggatataaagaatttgctgactgcatgtactattttttacattactacattggctacggcagatatacctacttcgtcactgccacacgctccggtaaacggggcatgtgacgagggagaatatcttgataagaggcataatcaatgttgtaatcagtgtccacctggagaatttgccaaggttagatgtaatggtaacgataacacaaaatgtgaacgctgcccacctcatacatataccgcaatccccaattactctaatggatgtcatcaatgtagaaaatgcccaacaggatcatttgataaggtaaagtgtaccggaacacagaacagtaaatgttcgtgtcttcctggttggtattgcgctactgattcttcacagactgaagattgtcgagattgtataccaaaaaggagatgtccatgcggatactttggtggaatagatgaacaaggaaatcctatttgtaaatcgtgttgtgttggtgaatattgcgactacctacgtaattatagacttgatccatttcctccatgcaaactatctaaatgtaattaattatgattttgatgataatgttaccatacattatatcgctacttggttagtgtattattcagtatgaagacctattaataattacttatcttttgacgatcttgttataattataatataaaaatacttatggcatagtaactcataattgctgacgcgataaattcgtaataatctgttttgttcaaatttttataaggaatctacaggcataaaaataaaaatataatttataatatactcttacagcgcgccatcatgaataacagcagtgaattgattgctgttattaatggatttagaaatagtggacgattttgtgatattaatatagttattaatgatgaaaggataaacgctcacagactcatcctatctggagcctccgaatatttttccattctgttttccaataattttatcgattctaatgaatacgaagttaatctaagtcatttagattatcaaagtgttaacgatttgatcgattacatttatgggatacctttgagcctaactaacgataacgtgaaatatattctttcaaccgctgattttttacaaattggatctgctattacggagtgtgaaaattacatacttaaaaatctttgttctagaaactgtatcgatttctacatatacgctgataaatataataacaagaaaatagaatcagcgtcgtttaacacaatattacaaaatattttgagactcatcaacgatgaaaactttaaatacttaacagaggaatcaatgataaaaattttaagcgatgatatgttaaatataaaaaatgaggatttcgccccactaattctcattaaatggttagagagtactcaacaaccatgcaccgtcgagttacttaaatgcctcagaatatcattgctttccccacaagttataaaatcactttatagtcatcgactggttagttcaatctacgaatgtataacattcttaaacaatatagcattcttggatgaatcatttcctagataccatagcatcgagttgatatctatcggtataagtaattcgcatgataagatttccataaactgctacaatcataaaaaaaatacatgggaaatgatatcttcacgtagatataggtgtagtttcgcagtggccgtcctggataatattatctatatgatgggtggatatgatcagtccccgtatagaagttcaaaggttatagcgtacaatacatgtacaaattcttggatatatgatataccagagctaaaatatcctcgttctaattgtgggggactggctgatgacgaatacatttattgtataggcggcatacgcgatcaggattcatcgttgacatctagtattgatagatggaagccatcaaaaccatattggcagaagtatgctaaaatgcgcgaaccaaaatgtgatatgggggttgcgatgttaaacggattaatatatgttataggtggaatcgttaaaggtgacacgtgtaccgacgcactagagagtttatcagaagatggatggatgaagcatcaacgtcttccaataaaaatgtccaatatgtcgacgattgttcatgatggcaagatttatatatctggaggttacaacaatagtagtgtagttaatgtaatatcgaatctagtccttagctataattcgatatatgatgaatggaccaaattatcatcattaaacattcctagaattaatcccgctctatggtcagcgcataataaattatatgtaggaggaggaatatctgatgatgttcgaactaatacatctgagacatacgacaaagaaaaagattgttggacattggataatggtcacgtgttaccacgcaattatataatgtataaatgcgaaccgattaaacataaatatccattggaaaaaacacagtacacgaatgattttctaaagtatttggaaagttttataggtagttgatagaacaaaatacataattttgtaaaaataaatcactttttatactaatatgacacgattaccaatacttttgttactaatatcattagtatacgctacaccttttcctcagacatctaaaaaaataggtgatgatgcaactctatcatgtaatcgaaataatacaaatgactacgttgttatgagtgcttggtataaggagcccaattccattattcttttagctgctaaaagcgacgtcttgtattttgataattataccaaggataaaatatcttacgactctccatacgatgatctagttacaactatcacaattaaatcattgactgctagagatgccggtacttatgtatgtgcattctttatgacatcaactacaaatgacactgataaagtagattatgaagaatactccacagagttgattgtaaatacagatagtgaatcgactatagacataatactatctggatctacacattcaccggaaactagttctaagaaacctgattatatagataattctaattgctcgtcggtattcgaaatcggtacccggggatcagcttgcatgcctgcagcaattcccgaggctgtagccgacgatggtgcgccaggagagttgttgattcattgtttgcctccctgctgcggtttttcaccgaagttcatgccagtccagcgtttttgcagcagaaaagccgccgacttcggtttgcggtcgcgagtgaagatccctttcttgttaccgccaacgcgcaatatgccttgcgaggtcgcaaaatcggcgaaattccatacctgttcaccgacgacggcgctgacgcgatcaaagacgcggtgatacatatccagccatgcacactgatactcttcactccacatgtcggtgtacattgagtgcagcccggctaacgtatccacgccgtattcggtgatgataatcggctgatgcagtttctcctgccaggccagaagttctttttccagtaccttctctgccgtttccaaatcgccgctttggacataccatccgtaataacggttcaggcacagcacatcaaagagatcgctgatggtatcggtgtgagcgtcgcagaacattacattgacgcaggtgatcggacgcgtcgggtcgagtttacgcgttgcttccgccagtggcgcgaaatattcccgtgcaccttgcggacgggtatccggttcgttggcaatactccacatcaccacgcttgggtggtttttgtcacgcgctatcagctctttaatcgcctgtaagtgcgcttgctgagtttccccgttgactgcctcttcgctgtacagttctttcggcttgttgcccgcttcgaaaccaatgcctaaagagaggttaaagccgacagcagcagtttcatcaatcaccacgatgccatgttcatctgcccagtcgagcatctcttcagcgtaagggtaatgcgaggtacggtaggagttggccccaatccagtccattaatgcgtggtcgtgcaccatcagcacgttatcgaatcctttgccacgcaagtccgcatcttcatgacgaccaaagccagtaaagtagaacggtttgtggttaatcaggaactgttcgcccttcactgccactgaccggatgccgacgcgaagcgggtagatatcacactctgtctggcttttggctgtgacgcacagttcatagagataaccttcacccggttgccagaggtgcggattcaccacttgcaaagtcccgctagtgccttgtccagttgcaaccacctgttgatccgcatcacgcagttcaacgctgacatcaccattggccaccacctgccagtcaacagacgcgtggttacagtcttgcgcgacatgcgtcaccacggtgatatcgtccacccaggtgttcggcgtggtgtagagcattacgctgcgatggattccggcatagttaaagaaatcatggaagtaagactgctttttcttgccgttttcgtcggtaatcaccattcccggcgggatagtctgccagttcagttcgttgttcacacaaacggtgatacgtacacttttcccggcaataacatacggcgtgacatcggcttcaaatggcgtatagccgccctgatgctccatcacttcctgattattgacccacactttgccgtaatgagtgaccgcatcgaaacgcagcacgatacgctggcctgcccaacctttcggtataaagacttcgcgctgataccagacgttgcccgcataattacgaatatctgcatcggcgaactgatcgttaaaactgcctggcacagcaattgcccggctttcttgtaacgcgctttcccaccaacgctgatcaattccacagttttcgcgatccagactgaatgcccacaggccgtcgagttttttgatttcacgggttggggtttctacaggacgtaacattctagtcgaggaattcatttatagcatagaaaaaaacaaaatgaaattctactatatttttacatacatatattctaaatatgaaagtggtgattgtgactagcgtagcatcgcttctagacatctatatactatatagtaataccaatactcaagactacgaaactgatacaatctcttatcatgtgggtaatgttctcgatgtcgatagccatatgcccggtagttgcgatatacataaactgatcactaattccaaacccacccgctttttatagtaagtttttcacccataaataataaatacaataattaatttctcgtaaaagtagaaaatatattctaatttattgcacggtaaggaagtagaatcataaagaacagtgacggatccccgatccccgacctgcaggcatgcaagctcgactccggaaccaattactgataatgtagaagatcatacagacaccgtcacatacactagtgatagcattaatacagtaagtgcatcatctggagaatccacaacagacgagactccggaaccaattactgataaagaagatcatacagttacagacactgtctcatacactacagtaagtacatcatctggaattgtcactactaaatcaaccaccgatgatgcggatctttatgatacgtacaatgataatgatacagtaccaccaactactgtaggcggtagtacaacctctattagcaattataaaaccaaggactttgtagaaatatttggtattaccgcattaattatattgtcggccgtggcaattttctgtattacatattatatatataataaacgttcacgtaaatacaaaacagagaacaaagtctagatttttgacttacataaatgtctgggatagtaaaatctatcatattgagcggaccatctggtttaggaaagacagccatagccaaaagactatgggaatatatttggatttgtggtgtcccataccactagatttcctcgtcctatggaacgagaaggtgttgattaccattacgttaacagagaggccatctggaagggaatagccgccggaaactttctagaacatactgagtttttaggaaatatttacggaacttctaaaacagctgtgaatacagcggctattaataatcgtatttgtgtgatggatctaaacatcgacggtgttagaagtcttaaaaatacgtacctaatgccttactcggtgtatataagacctacctctcttaaaatggttgagaccaagcttcgtcgtagaaacactgaagctaacgatgagattcatcgtcgtgtgatgttggcaaaaactgacatggatgaggcaggtgaagccggtctattcgacactattatcattgaagatgatgtgaatttagcatatagtaagttaattcagatactacaggaccgtattagaatgtattttaacactaattagagacttaagacttaaaacttgataattaataatataactcgtttttatatgtgtctatttcaacgtctaatgtattagttaaatattaaaacttaccacgtaaaacttaaaatttaaaatgatatttcattgacagatagatcacacattatgaactttcaaggacttgtgttaactgacaattgcaaaaatcaatgggtcgttggaccattaataggaaaaggtggattcggtagtatttatactactaatgacaataattatgtagtaaaaatagagcccaaagctaacggatcattatttaccgaacaggcattttatactagagtacttaaaccatccgttatcgaagaatggaaaaaatctcacaatataaagcacgtaggtcttatcacgtgcaaggcatttggtctatacaaatccattaatgtggaatatcgattcttggtaattaatagattaggtgcagatctagatgcggtgatcagagccaataataatagactaccaaaaaggtcggtgatgttgatcggaatcgaaatcttaaataccatacaatttatgcacgagcaaggatattctcacggagatattaaagcgagtaatatagtcttagatcaaatagataagaataaattatatctagtggattacggattggtttctaaattcatgtctaatggcgaacatgttccatttataagaaatccaaataaaatggataacggtactctagaatttacacctatagattcgcataaaggatacgttgtatctagacgtggagatctagaaacacttggatattgtatgattagatggttgggaggtatcttaccatggactaagatatctgaaacaaagaattgtgcattagtaagtgccacaaaacagaaatatgttaacaatactgcgactttgttaatgaccagtttgcaatatgcacctagagaattgctgcaatatattaccatggtaaactctttgacatattttgaggaacccaattacgacaagtttcggcacatattaatgcagggtgtatattattaagtgtggtgtttggtcgataaaaattaaaaaataacttaatttattattgatctcgtgtgtacaaccgaaatcatggcgatgttttacgcacacgctctcggtgggtacgacgagaatcttcatgcctttcctggaatatcatcgactgttgccaatgatgtcaggaaatattctgttgtgtcagtttataataacaagtatgacattgtaaaagacaaatatatgtggtgttacagtcaggtgaacaagagatatattggagcactgctgcctatgtttgagtgcaatgaatatctacaaattggaaatccgatccatgatcaagaaggaaatcaaatctctatcatcacatatcgccacaaaaactactatgctctaagcggaatcgggtacgagagtctagacttgtgtttggaaggagtagggattcatcatcacgtacttgaaacaggaaacgctgtatatggaaaagttcaacatgattattctactatcaaagagaaggccaaagaaatgagtgcacttagtccaggacctatcatcgattaccacgtctggataggagattgtatctgtcaagttactgctgtggacgtacatggaaaggaaattatgaaaatgagattcaaaaagggtgcggtgcttccgatcccaaatctggtaaaagttaaacttggggagaatgatacagaaaatctttcttctactatatcggcggcaccatcgaggtaaccacctctctggaagacagcgtgaatcatgtactcatgaaacgtttggaaactatacgccatatgtggtctgttgtatatgatcattttgatattgtgaatggtaaagaatgctgttatgtgcatacgcattcatctaatcaaaatcctataccgagtactgtaaaaacaaatttgtacatgaagactatgggatcatgcattcaaatggattccatggaagctctagagtatcttagcgaactgaaggaatcaggtggatggagtcccagaccagaaatgcaggaatttgaatatccagatggagtggaagacactgaatcaattgagagattggcagaggagttcttcaatagatcagaacttcaggctggtgaatcagtcaaatttggtaattctattaattgttaaacatacatctgtttcagctaagcaactaagaacacgtatacggcagcagcttccttctatactctcatcttttaccaacacaaagggtggatatttgttcattggagttgataataatacacacaaagtatttggattcacggtgggttacgactacctcagactgatagagaatgatatagaaaagcatatcaaaagacttcgtgttgtgcatttctgtgagaagaaagaggacatcaagtacgcgtgtcgattcatcaaggtatataaacctggggatgagactacctcgacatacgtgtgcgctatcaaagtggaaagatgctgttgtgctgtgtttgcagattggccagaatcatggtatatggatactaatggtatcaagaagtattctccagatgaatgggtgtcacatataaaattttaattaatgtaactatagagaacaaataataaggttgtaatatcatatagacaataactaacaattaattagtaactgttatctcttttttaactaaccaactaactatatacctattaatacatcgtaattatagttcttaacatctattaatcattaattcgcttctttaattttttataaactaacattgttaattgaaaagggataacatgttacagaatataaattatatatggatttttttaaaaaggaaatacttgactggagtatatatttatctcttcattatatagcacgcgtgttttccaatttttccacatcccatataatacaggattataatctcgttcgaacatacgagaaagtggataaaacaatagttgattttttatctaggttgccaaatttattccatattttagaatatggggaaaatattctacatatttattctatggatgatgctaatacgaatattataattttttttctagatagagtattaaatattaataagaacgggtcatttatacacaatctcgggttatcatcatccattaatataaaagaatatgtatatcaattagttaataatgatcatccagataataggataagactaatgcttgaaaatggacgtagaacaagacattttttgtcctatatatcagatacagttaatatctatatatgtattttaataaatcatggattttatatagatgccgaagacagttacggttgtacattattacatagatgtatatatcactataagaaatcagaatcagaatcatacaatgaattaattaagatattgttaaataatggatcagatgtagataaaaaagatacgtacggaaacacaccttttatcctattatgtaaacacgatatcaacaacgtggaattgtttgagatatgtttagagaatgctaatatagactctgtagactttaatagatatacacctcttcattatgtctcatgtcgtaataaatatgattttgtaaagttattaatttctaaaggagcaaatgttaatgcgcgtaataaattcggaactactccattttattgtggaattatacacggtatctcgcttataaaactatatttggaatcagacacagagttagaaatagataatgaacatatagttcgtcatttaataatttttgatgctgttgaatctttagattatctattatccagaggagttattgatattaactatcgtactatatacaacgaaacatctatttacgacgctgtcagttataatgcgtataatacgttggtctatctattaaacaaaaatggtgattttgagacgattactactagtggatgtacatgtatttcggaagcagtcgcaaacaacaacaaaataataatggaagtactattgtctaaacgaccatctttgaaaattatgatacagtctatgatagcaattactaaacataaacagcataatgcagatttattgaaaatgtgtataaaatatactgcgtgtatgaccgattatgatactcttatagatgtacagtcgctacagcaatataaatggtatattttaagatgtttcgatgaaatagatatcatgaagagatgttatataaaaaataaaactgtattccaattagttttttgtatcaaagacattaatactttaatgagatacggtaaacatccttctttcgtgaaatgcactagtctcgacgtatacggaagtcgtgtacgtaatatcatagcatctattagatatcgtcagagattaattagtctattatccaagaagctggatcctggagataaatggtcgtgttttcctaacgaaataaaatataaaatattggaaaactttaacgataacgaactatccacatatctaaaaatcttataaacattattaaaatataaaatctaagtaggataaaatcacactacatcattgtttccttttagtgctcgacagtgtatactatttttaacgctcataaataaaaatgaaaacgatttccgttgttacgttgttatgcgtactacctgctgttgtttattcaacatgtactgtacccactatgaataacgctaaattaacgtctaccgaaacatcgtttaatgataaccagaaagttacgtttacatgtgatcagggatatcattctttggatccaaatgctgtctgtgaaacagataaatggaaatacgaaaatccatgcaaaaaaatgtgcacagtttctgattatgtctctgaactatataataaaccgctatacgaagtgaattccaccatgacactaagttgcaacggcgaaacaaaatattttcgttgcgaagaaaaaaatggaaatacttcttggaatgatactgttacgtgtcctaatgcggaatgtcaacctcttcaattagaacacggatcgtgtcaaccagttaaagaaaaatactcatttggggaatatatgactatcaactgtgatgttggatatgaggttattggtgcttcgtacataagttgtacagctaattcttggaatgttattccatcatgtcaacaaaaatgtgatatgccgtctctatctaacggattaatttccggatctacattttctatcggtggcgttatacatcttagttgtaaaagtggttttacactaacggggtctccatcatccacatgtatcgacggtaaatggaatcccatactcccaatatgtgtacgaactaacgaaaaatttgatccagtggatgatggtcccgacgatgagacagatttgagcaaactctcgaaagacgttgtacaatatgaacaagaaatagaatcgttagaagcaacttatcatataatcatagtggcgttgacaattatgggcgtcatatttttaatctccgttatagtattagtttgttcctgtgacaaaaataatgaccaatataagttccataaattgctaccgtaaatataaatccgttaaaataattaataatttaataacaaacaagtatcaaaagattaaagacttatagctagaatcaattgagatgtcttcttcagtggatgttgatatctacgatgccgttagagcatttttactcaggcactattataacaagagatttattgtgtatggaagaagtaacgccatattacataatatatacaggctatttacaagatgcgccgttataccgttcgatgatatagtacgtactatgccaaatgaatcacgtgttaaacaatgggtgatggatacacttaatggtataatgatgaatgaacgcgatgtttctgtaagcgttggcaccggaatactattcatggaaatgtttttcgattacaataaaaatagtatcaacaatcaactaatgtatgatataattaatagcgtatctataattctagctaatgagagatatagaagcgcttttaacgacgatggtatatacatccgtagaaatatgattaacaagttgtacggatacgcatctctaactactattggcacgatcgctggaggtgtttgttattatctgttgatgcatctagttagtttgtataaataattatttcaatatactagttaaaattttaagattttaaatgtataaaaaactaataacgtttttatttgtaataggtgcattagcatcctattcgaataatgagtacactccgtttaataaactgagtgtaaaactctatatagatggagtagataatatagaaaattcatatactgatgataataatgaattggtgttaaattttaaagagtacacaatttctattattacagagtcatgcgacgtcggatttgattccatagatatagatgttataaacgactataaaattattgatatgtataccattgactcgtctactattcaacgcagaggtcacacgtgtagaatatctaccaaattatcatgccattatgataagtacccttatattcacaaatatgatggtgatgagcgacaatattctattactgcagagggaaaatgctataaaggaataaaatatgaaataagtatgatcaacgatgatactctattgagaaaacatactcttaaaattggatctacttatatatttgatcgtcatggacatagtaatacatattattcaaaatatgatttttaaaaatttaaaatatattatcacttcagtgacagtagtcaaataacaaacaacaccatgagatatattataattctcgcagttttgttcattaatagtatacatgctaaaataactagttataagtttgaatccgtcaattttgattccaaaattgaatggactggggatggtctatacaatatatcccttaaaaattatggcatcaagacgtggcaaacaatgtatacaaatgtaccagaaggaacatacgacatatccgcatttccaaagaatgatttcgtatctttctgggttaaatttgaacaaggcgattataaagtggaagagtattgtacgggactatgcgtcgaagtaaaaattggaccaccgactgtaacattgactgaatacgacgaccatatcaatttgtacatcgagcatccgtatgctactagaggtagcaaaaagattcctatttacaaacgcggtgacatgtgtgatatctacttgttgtatacggctaacttcacattcggagattctaaagaaccagtaccatatgatatcgatgactacgattgcacgtctacaggttgcagcatagactttgtcacaacagaaaaagtgtgcgtgacagcacagggagccacagaagggtttctcgaaaaaattactccatggagttcgaaagtatgtctgacacctaaaaagagtgtatatacatgcgcaattagatccaaagaagatgttcccaatttcaaggacaaaatggccagagttatcaagagaaaatttaatacacagtctcaatcttatttaactaaatttctcggtagcacatcaaatgatgttaccacttttcttagcatgcttaacttgactaaatattcataactaatttttattaatgatacaaaaacgaaataaaactgcatattatacactggttaacgcccttataggctctaaccattttcaagatgaggtccctgattatagtccttctgttcccctctatcatctactccatgtctattagacgatgtgagaagactgaagaggaaacatggggattgaaaatagggttgtgtataattgccaaagatttctatcccgaaagaactgattgcagtgttcatctcccaactgcaagtgaaggattgataactgaaggcaatggattcagggatatacgaaacaccgataaattataaaaaaagcaatgtgtccgctgtttccgttaataatactattttcgtaactggcggattattcataaataactctaatagcacgatcgtggttaacaatatggaaaaacttgacatttataaagacaaacaatggtcgattatagaaatgcctatggctagggtatatcacggcattgactcgacatttggaatgttatattttgccggaggtctatccgttaccgaacaatatggtaatttagagaaaaacaacgagatatcttgttacaatcctagaacgaataagtggtttgatatttcatatactatttataagatatccatatcatcattgtgtaaactaaataacgtcttctatgtatttagtaaggacattggatatgtggaaaagtatgatggtgcatggaagttagtacatgatcgtctccccgctataaaggcattatcaacttctccttattgattgaaaatgaaaatataaatagtttttatgtatagcagtattaccctatagttttattgcttactactaacatggatacagatgttacaaatgtagaagatatcataaatgaaatagatagagagaaagaagaaatactaaaaaatgtagaaattgaaaataataaaaacattaacaagaatcatcccaatgaatatattagagaagcactcgttattaataccagtagtaatagtgattccattgataaagaagttatagaatgtatcagtcacgatgtaggaatatagatcatatctactaatttttataatcgatacaaaacataaaaaacaactcgttattacatagcaggcatggaatccttcaagtattgttttgataacgatggcaagaaatggattatcggaaatactttatattctggtaattcaatactctataaggtcagaaaaaatttcactagttcgttctacaattacgtaatgaagatagatcacaaatcacacaagccattgttgtctgaaatacgattctatatatctgtattggatcctttgactatcgacaactggacacgggaacgtggtataaagtatttggctattccagatctgtatggaattggagaaaccgatgattatatgttcttcgttataaagaattcgggaagagtattcgccccaaaggatactgaatcagtcttcgaagcatgcgtcactatgataaacacgttagagtttatacactctcgaggatttacccatggaaaaatagaaccgaggaatatactgattagaaataaacgtctttcactaattgactattctagaactaacaaactatacaagagtggaaactcacatatagattacaacgaggacatgataacttcaggaaatatcaattatatgtgtgtagacaatcatcttggagcaacagtttcaagacgaggagatttagaaatgttgggatattgcatgatagaatggttcggtggcaaacttccatggaaaaacgaaagtagtataaaagtaataaaacaaaaaaaagaatataaaaaatttatagctactttctttgaggactgttttcctgaaggaaatgaacctctggaattagttagatatatagaattagtatacacgttagattattctcaaactcctaattatgacagactacgtaaactgtttatacaagattgaaattatattcttttttttatagagtgtggtagtgttacggatatctaatattaatattagactatctctatcgcgctacacgaccaatatcgattactatggatatcttctatgaaaggagagaatgtatttatttctccagcgtcaatctcgtcagtattgacaatactgtattatggagctaatggatccactgctgaacagctatcaaaatatgtagaaacggaggagaacacggataaggttagcgctcagaatatctcattcaaatccatgaataaagtatatgggcgatattctgccgtgtttaaagattcctttttgagaaaaattggcgataagtttcaaactgttgacttcactgattgtcgcactatagatgcaatcaacaagtgtgtagatatctttactgaggggaaaatcaatccactattggatgaaccattgtctcctagcaattagtgccgtatactttaaagcaaaatggttgacgccattcgaaaaggaatttaccagtgattatcccttttacgtatctccgacggaaatggtagacgtaagtatgatgtctatgtacggcaaggcatttaatcacgcatctgtaaaagaatcattcggcaacttttcaatcatagaactgccatatgttggagatactagtatgatggtcattcttccagacaagattgatggattagaatccatagaacaaaatctaacagatacaaattttaagaaatggtgtgactttatggatgctatgtttatagatgttcacattcccaagtttaaggtaacaggctcgtataatctggtggatactctagtaaagtcaggactgacagaggtgttcggttcaactggagattatagcaatatgtgtaatttagatgtgagtgtcgacgctatgatccacaaaacgtatatagatgtcaatgaagagtatacagaagcagctgcagcaacttctgtactagtggcagactgtgcatcaacaattacaaatgagttctgtgcagatcatccgttcatctatgtgattaggcatgttgatggaaaaattcttttcgttggtagatattgctctccgacaactaattgttaaccattttttttaaaaaaaatagaaaaaacatgtggtattagtgcaggtcgttgttcttccaattgcaattggtaagatgacggccaactttagtacccacgtcttttcaccacagcactgtggatgtgacagactgaccagtattgatgacgtcaaacaatgtttgactgaatatatttattggtcgtcctatgcataccgcaacaggcaatgcgctggacaattgtattccacactcctctcttttagagatgatgcggaattagtgttcatcgacattcgcgagctggtaaaaaatatgccgtgggatgatgtcaaagattgtacagaaatcatccgttgttatataccggatgagcaaaaaaccatcagagagatttcggccatcatcggactttgtgcatatgctgctacttactggggaggtgaagaccatcccactagtaacagtctgaacgcattgtttgtgatgcttgagatgctaaattacgtggattataacatcatattccggcgtatgaattgatgagttgtacatcttgacattttctttcttctcttctccctttcttctcttctcccttcctccctcttctccctttcccagaaacaaacttttttacccactataaaataaaatgagtatactacctattatatttcttcctatatttttttattcttcattcgttcagacttttaacgcgtctgaatgtatcgacaaagggcaatattttgcatcattcatggagttagaaaacgagccagtaatcttaccatgtcctcaaataaatacgctatcatccggatataatatattagatattttatgggaaaaacgaggagcggataatgatagaattataccgatagataatggtagcaatatgctaattctgaacccgacacaatcagactctggtatttatatatgcattaccacgaacgaaacctactgtgacatgatgtcgttaaatttgacaatcgtgtctgtctcagaatcaaatatagatcttatctcgtatccacaaatagtaaatgagagatctactggcgaaatggtatgtcccaatattaatgcatttattgctagtaacgtaaacgcagatattatatggagcggacatcgacgccttagaaataagagacttaaacaacggacacctggaattattaccatagaagatgttagaaaaaatgatgctggttattatacatgtgttttagaatatatatacggtggcaaaacatataacgtaaccagaattgtaaaattagaggtacgggatagaataataccttctactatgcaattaccagatggcattgtaacttcaataggtagtaatttgactattgcatgcagagtatcgttgagacctcccacaacggacaccgacgtcttttggataagtaatggtatgtattacgaagaagatgatggggacggaaacggtagaataagtgtagcaaataaaatctatatgaccgataagagacgtgttattacatcccggttaaacattaatcctgtcaaggaagaagatgctacaacgtttacgtgtatggcgtttactattcctagcatcagcaaaacagttactgttagtataacgtgaatgtatgttgttacatttccatgtcaattgagtttataagaatttttatacattatcttccaacaaacaattgacgaacgtattgctatgattaactcccacgatactatgcatattattaatcattaacttgcagactatacctagtgctattttgacatactcgtgttcttgtgtaattgcggtatctatattattaaagtacgtaaatctagctatagttttattatttaattttagataatataccgtctccttatttttaaaaattgccacatcctttattaaatcatgaatgggaatttctatgtcatcgttagtatattgtgaacaacaagagcagatatctataggaaagggtggaatgcgatacattgatctatgtagttttaaaacacacgcgaactttgaagaatttatataaatcattccatcgatacatccttctatgttgacatgtatatatccaggaattcttttattaatgtcaggaaatgtataaactaaaacattgcccgaaagcggtgcctctatctgcgttatatccgttcttaacttacaaaatgtaaccaatacctttgcatgacttgttttgttcggcaacgttagtttaaacttgacgaatggattaattacaatagcatgatccgcgcatctattaagtttttttactttaacgcccttgtatgtttttacagagactttatctaaatttctagtgcttgtatgtgttataaatataacgggatatagaaccgaatcacctaccttagatacccaattacattttatcagatccagataataaacaaattttgtcgccctaactaattctatattgttatatattttacaattggttatgatatcatgtaataacttggagtctaacgcgcatcgtcgtacgtttatacaattgtgatttagtgtagtatatctacacatgtatttttccgcactatagtattctggactagtgataaaactatcgttatatctgtcttcaatgaactcatcgagatattgctctctgtcatattcatacacctgcataaactttctagacatcttacaatccgtgttattttaggatcatatttacatatttacgggtatatcaaagatgttagattagttaatgggaatcgtctataataatgaatattaaacaattatatgaggacttttaccacaaagcatcataaaaatgagtcgtcgtctgatttatgttttaaatatcaaccgcaaatcaactcataaaatacaagagaatgaaatatatacatattttagtcattgcaatatagaccatacttctacagaacttgattttgtagttaaaaactatgatctaaacagacgacaacctgtaactgggtatactgcactacactgctatttgtataataattactttacaaacgatgtactgaagatattattaaatcatgacgtaaatgtaacgatgaaaaccagtagcggacgtatgcctgtttatatattgcttactagatgttgtaatatttcacatgatgtagtgatagatatgatagacaaagataaaaaccacttattacatagagactattccaacctattactagagtatataaaatctcgttacatgttattgaaggaagaggatatcgatgagaacatagtatccactttattagataagggaatcgatcctaactttaaacaagacggatatacagcgttacattattattatttgtgtctcgcacacgtttataaactaggtgagtgtagaaaaccgataacgataaaaaaggccaagcgaattatttctttgtttatacaacatggagctaatctaaacgcgttagataattgtggtaatacaccattccatttgtatcttagtattgaaatgtgtaataatattcatatgactaaaatgctgttgacttttaatccgaatttcaaaatatgtaataatcatggattaacgcctatactatgttatataacttccgactacatacaacacgatattcttgttatgttaatacatcactatgaaacaaatgttggagaaatgccgatagatgagcgtcgtatgatcgtattcgagtttatcaaaacatattctacacgtccggcagattcgataacttatttgatgaataggtttaaaaatataaatatttatacccgctatgaaggaaagacattattacacgtagcatgtgaatataataatacacaagtaatagattatcttatacgtatcaacggagatataaatgcgttaaccgacaataacaaacacgctacacaactcattatagataacaaagaaaattccccatataccattaattgtttactgtatatacttagatatattgtagataagaatgtgataagatcgttggtggatcaacttccatctctacctatcttcgatataaaatcatttgagaaattcatatcctactgtatacttttagatgacacattttacgataggcacgttaagaatcgcgattctaaaacgtatcgatacgcattttcaaaatacatgtcgtttgataaatacgatggtataataactaaatgtcacgacgaaacaatgttactcaaactgtccactgttctagacactacactatatgcagttttaagatgtcataattcgagaaagttaagaagatacctcaacgagttaaaaaaatataataacgataagtcctttaaaatatattctaatattatgaatgagagataccttaatgtatattataaagatatgtacgtgtcaaaggtatatgataaactatttcctgttttcacagataaaaattgtctactaacattactaccttcagaaattatatacgaaatattatacatgctgacaattaacgatctttataatatatcgtatccacctaccaaagtatagttgtatttttctcatgcgatgtgtgtaaaaaaactgatattatataaatattttagtgccgtataataaagatgacgatgaaaatgatggtacatatatatttcgtatcattattgttattgctattccacagttacgccatagacatcgaaaatgaaatcacagaattcttcaataaaatgagagatactctaccagctaaagactctaaatggttgaatccagcatgtatgttcggaggcacaatgaatgatatagccgctctaggagagccattcagcgcaaagtgtcctcctattgaagacagtcttttatcgcacagatataaagactatgtggttaaatgggagaggctagaaaagaatagacggcgacaggtttctaataaacgtgttaaacatggtgatttatggatagccaactatacatctaaattcagtaaccgtaggtatttgtgcaccgtaactacaaagaatggtgactgtgttcagggtatagttagatctcatattaaaaaacctccttcatgcattccaaaaacatatgaactaggtactcatgataagtatggcatagacttatactgtggaattctttacgcaaaacattataataatataacttggtataaagataataaggaaattaatatcgacgacattaagtattcacaaacgggaaaggaattaattattcataatccagagttagaagatagcggaagatacgactgttacgttcattacgacgacgttagaatcaagaatgatatcgtagtatcaagatgtaaaatacttacggttataccgtcacaagaccacaggtttaaactaatactagatccgaaaatcaacgtaacgataggagaacctgccaatataacatgcactgctgtgtcaacgtcattattgatcgacgatgtactgattgaatgggaaaatccatccggatggcttataggattcgattttgatgtatactctgttttaactagtagaggcggtatcaccgaggcgaccttgtactttgaaaatgttactgaagaatatataggtaatacatataaatgtcgtggacacaactattattttgaaaaaacccttacaactacagtagtattggagtaaatatacaatgcatttttatatacattactgaattattattactgaattattattactgaattattattaattatatcgtatttgtgctatagaatggatgaagatacgcgactatctaggtatttgtatctcaccgatagagaacatataaatgtagactctattaaacagttgtgtaaaatatcagatcctaatgcatgttatagatgtggatgtacggctttacatgagtacttttataattatagatcagtcaacggaaaatacaagtatagatacaacggttactatcaatattattcatctagcgattatgaaaattataatgaatattattatgatagaactggtatgaacagtgagagtgataatatatcaatcaaaacagaatatgaattctatgatgaaacacaagatcaaagtacacaactagtaggttacgacattaaactcaaaaccaatgaggatgattttatggctatgatagatcagtgggtgtccatgattatatagatgaatcaattaataaagtagtatatggaagagagtctcacgtaagatggcgggatatatggcaagaacataatgatggcgtatacagtataggaaaggagtgcatagataatatatacgaagacaaccataccgtagacgaattctacaagatagacagcgtatcagatgtagatgacgcggaacacatatctccgataactaaaaaaccatagaatcagttgatgataatacctacatttctaatcttccgtataccatcaaatacaaaatattcgagcaacaataagtattttttatacctttaaaactgataaataaattttttctagtgatattttggcaagatgagaatcctatttctcatcgctttcatgtatgggtgtgttcactcatatgttaacgcggttgaaaccaaatgtccaaatctagacattgtaacatcttctggagaatttcattgttcaggatgtgtggaacatatgcctgagtttagctatatgtattggttggcaaaggatatgaaatcggacgaggataccaagtttatagaacatctgggtgatggcatcaaagaagatgaaaccgttcgtaccacagatagtggaatcgtcactctacgtaaagtccttcatgtgactgatactaataaatttgataattataggttcacttgtgtcctcgctacgctagatggcatttataaaaagaatgtttgctgaagtagttgtgtgctactatttttatttatgatataatctaatggaattaatttgaattgatatttatccaatactaaagattatattagaatcaaattaatcttttatacgagaaaaaataacgacatacgtcgtcaacaaattaaactttttatttattagttaactagcttatagaacttgctcattgttatgtttctaaaacgggtacggcatataggacaattatccgacgcaccggtttctcttcgtgttctatgccatatattgatgcatgttatgcaaaatatatgagtacacgaatccaataaaccaaagtatctatcgttttgagtaaacaacttcatagcaaattccacattctttttctttacttactctatacacgtcctcgtatttatttagtattttgatgatatccaactcagaaatggttgttgtattattgggtgtatttggagtataggtattattagctatgtaccaatttaccaaccctcttaatattgattgataatcacatcggttatccaattaataactaaattgtagtgtatatatagaccatatatgtttctatttttttgacagttacgtatagtttcagtaagttttgattgttgtattcctgtatctctagataagttagtcatatagtcccttccggcgatacgttttttccaagcccgaaattgattagccaaatgtgtatttatttttgtgatattgatataatatttcggataatgcatactgttagtcttatatcatttggttcatctatgtattgtaatattgttacatgatctatagatgatgtattgattttggcaggatcgaattccatatccgcgactaaacagtgaaaaaaatgtaaatactttttaaattttaaattagtaaaacttttttttattttttatgattccaaaaatactgaatacaaagtcctaaattataaatatggagatcatactaccacaacttattattatgtatacaaggccggtgtaatagatagatatatataattctattacaccggcagacaattaccgaccggtatttgtcgttaccaacataccgtataatatgtaatatacaattccataacccattgacagttgttatacatcaaaattgcaattcttttgattacgatgttataagaatgtagttaattgatgtatgatgttaatgtgtcctctttcctcttataacatcgtaatcaaaaacttttttataatatatacctaataatgtgtcttaatagttctcgtgattcgtcaaacaatcattcttataaaatataataaagcaacgtaaaaacacataaaaataagcgtaactaataagacaatggatatttacgacgataaaggtctacagactattaaactgtttaataatgaatttgattgtataaggaatgacatcagagaattatttaaacatgtaactgattccgatagtatacaacttccgatggaagacaattctgatattatagaaaatatcagaaaaatactatatagacgattaaaaaatgtagaatgtgttgacatcgataacacaataacttttatgaaatacgatccaaatgatgataataagcgtacgtgttctaattgggtacccttaactaataactatatggaatattgtctagtaatatatttggaaacaccgatatgtggaggcaaaataaaattataccaccctacaggaaatataaagtcggataaggatattatgtttgcaaagactctagactttaaatcaacgaaagtgttaactggacgtaaaacaattgccgttctagacatatccgtttcatataatagatcaatgactactattcactacaacgacgacgttgatatagatatacatactgataaaaatggaaaagagttatgttattgttatataacaatagatgatcattacttggttgatgtggaaactataggagttatagtcaatagatctggaaaatgtctgttagtaaataaccatctaggtataggtatcgttaaagataaacgtataagcgatagttttggagatgtatgtatggatacaatatttgacttttctgaagcacgagagttattttcattaactaatgatgataacaggaatatagcatgggacactgataaactagacgatgatacagatatatggactcccgtcacagaagatgattacaaatttctttctagactagtattgtatgcaaaatctcaatcggatactgtatttgactattatgttcttactggtgatacggaaccacccactgtattcattttcaaggtaactagattttactttaatatgccgaaataaaaaatttttgtataatatctagaggtagaggtattgtttagataaatacaaataacatagatacatcgcatacttagcatttttataaatatacataagacatacactttatacatttttgtaaaaatactcataaaaaaatttataaaaattatggcacaaccatatcttgtataggtagtttagttcgtcgagtgaacctataaacagataatagacaacacataataatgcctactaatacaagcataataccgggagatgggatatatgacgttgtagtgtttgggttttctgaacgttgatagtctactaatactacatgctgacatctaatgcctgtataaccatgagagcatctacaatacataccgtcaatatctctagcgtggatacagtcaccgtgtaaacaatatccatctccctctggaccgcataatctgatagctggaatatctgttgtagcgtttgtaatttctggcaatgtcgtttcgatagcgttaccactatcggcgaatgatctgattatcatagcagcgaacaacaacatcagataatttatcaacatttttgatggattctgtgtttatgctgtttctcagtgtgtgtttatgacaagattgggaattttatattattaattcagtaatataaactaataatatattgttaattgtgtaaataatataaaaataacaatacaatattgaatgtgttgctgttaaaaatgtatgtgttaatataatagaataaaataaatgagtatgatcattttagataacgattgattttatcattaccgcttcattcttatattctttgcttacggaacctatatttagaaacatctactaacaattttttatgcttgcattattaatggtatgtaatatgattgattgtgtacgcaataccaatttgttaagtatgaatacggggtacaaacataaattgaaatttaacattatttatttatgatatatatcgttatcgttaggtctataccatggatatctttaaagaactaatcttaaaacaccctgatgaaaatgttttgatttctccagtttccattttatctactttatctattctaaatcatggagcagctggttctacagctgaacaactatcaaaatatatagagaatatgaatgagaatacacccgatgacaataatgatgacatggaggtagatattccgtattgtgcgacactagctaccgcaaataaaatatacggtagcgatagtatcgagttccacgcctccttcctacaaaaaataaaagacgattttcaaactgtaaactttaataatgctaaccaaacaaaggaactaatcaacgaatgggttaagacaatgacaaatggtaaaattaattccttattgactagtccgctatccattaatactcgtatgacagttgttagcgccgtccattttaaagcaatgtggaaatatccattttctaaacatcttacatatacagacaagttttatatttctaagaatatagttaccagcgttgatatgatggtgggtaccgagaataacttgcaatatgtacatattaatgaattattcggaggattctctattatcgatattccatacgagggaaactctagtatggtaattatactaccggacgacatagaaggtatatataacatagaaaaaaatataacagatgaaaaatttaaaaaatggtgtggtatgttatctactaaaagtatagacttgtatatgccaaagtttaaagtggaaatgacagaaccgtataatctggtaccgattttagaaaatttaggacttactaatatattcggatattatgcagattttagcaagatgtgtaatgaaactatcactgtagaaaaatttctacatacgacgtttatagatgttaatgaggagtatacagaagcatcggccgttacaggagtatttacgattaacttttcgatggtatatcgtacgaaggtctacataaaccatccattcatgtacatgattaaagacaccacaggacgtatactttttatagggaaatactgctatccgcaataaatataaacaaatagacttttataaagagtcttcaacgataagtatatcgacatactacttatgctgcgaaagattctgaacgagaacgactatctcaccctcttggatcatatccgcactgctaaatactaaatctccactacactttttatcatcttatgaggaatgattgccttcgtgaaataggaataattagcaccagaatagctatggattattgtggtagagagtgcactattctatgtcgtctactggatgaagatgtgacgtacaaaaaaataaaactagaaattgaaacgtgtcacaacttatcaaaacatatagatagacgaggaaacaatgcgctacattgttacgtctccaataaatgcgatacagacattaagattgttctctcgcggagtcgagagactttgtagaaacaacgaaggattaactccgctaggagtatacagtaagcatagatacgtaaaatctcagattgtgcatctactgatatccagctattcaaattcctctaacgaactcaagtcgaatataaatgatttcgatctgtattcggataatatcgacttacgtctgctaaaatacctaattgtggataaacggatacgtccgtccaagaatacgaattatgcaatcaatggtctcggattggtggatatatacgtaacgacgcctaatccgagaccagaagtattgctatggcttcttaaatcagaatgttacagcaccggttacgtatttcgtacctgtatgtacgacagtgatatgtgtaagaactctcttcattactatatatcgtctcatagagaatctcaatctctatccaaggatgtaattaaatgtttgatcgataacaatgtttccatccatggcagagacgaaggaggatctttacccatccaatactactggtctttctcaaccatagatatagagattgttaaattattattaataaaggatgtggacacgtgtagagtatacgacgtcagccctatattagaggcgtattatctaaacaagcgatttagagtaaccccatataatgtagacatggaaatcgttaatcttcttattgagagacgtcatactcttgtcgacgtaatgcgtagtattacttcgtacgattccagagaatataaccactacatcatcgataacattctaaagagatttagacaacaggatgaatccatcgtacaagccatactgataaactacttacattacggcgatatggtcgttcgatgcatgttagataacggacaacaactatcctctacacgactactttgttaataataatctcgtcgatgtaaacgtcgtaaggtttatcgtggaaaatatggacacgcggctgtaaatcacgtatcgaacaatggccgtctatgtatgtacggtctgatattatcgagatttaataattgcgggtatcactgttatgaaaccatactgatagatgtatttgatatactaagcaagtacatggatgatatagatatgatcgataactctactatattacgcggtcgatgtcaataatatacaatttgcaaagcggttattggaatatggagcgagtatcacgctcgataatcaatacggccatccagaaaagcagttacagaagagaaaacaaaacgaaatcgttgttctacaagatgtctctccctacgacgattactacgtaaaaaagatactagcctactgcctattaagggacgagtcattcgcggaactacatagtaaattctgtttaaacgaggactataaaagtgtatttatgaaaaatatatcattcgataagatagattccatcatcgtgacataagtcgcctcaaagagattcgaatctccgacaccgacctgtatacggtatcacagctatcttaaagccatacattcagacagtcacatttcatttcccatgtacgacgatctcatagaacagtgccatctatcgatggagcgtaaaagtaaactcgtcgacaaagcactcaataaattagagtctaccatcggtcaatctagactatcgtatttgcctccggaaattatgcgcaatatcatctaaacagtatgttgtacggaaagaaccattacaaatattatccatgatagaaagaaaatatctatatgattggagaagtaggaaacaggaacaagacaacgattactacattattaaatcatgaagtccgtattatactcgtatatattgtttctctcatgtataataataaacggaagagatatagcaccgcatgcaccatccgatggaaagtgtaaagacaacgaatacaaacgccataatttgtgtccgggaacatacgcttccagattatgcgatagcaagactaacacacgatgtacgccgtgtggttcgggtaccttcacatctcgcaataatcatttacccgcttgtctaagttgtaacggaagacgcgatcgtgtaacacgactcacaatagaatctgtgaatgctctcccggatattattgtcttctcaaaggatcatccggatgcaaggcatgtgtttcccaaacaaaatgtggaataggatacggagtatccggagacgtcatctgttctccgtgtggtctcggaacatattctcacaccgtctcttccgcagataaatgcgaacccgtacccagaaatacgtttaactatatcgatgtggaaattaacctgtatccagttaacgacacgtcgtgtactcggacgaccactaccggtctcagcgaatccatctcaacgtcggaactaactattactatgaatcataaagactgtaatcccgtatttcgtgatggatacttctccgttcttaataaggtagcgacttcaggtttctttacaggagaaaggtgtgcactctgaatttcgagattaaatgcaataacaaagattcttcctccaaacagttaacgaaagcaaagaatgatactatcatgccgcattcggagacagtaactctagtgggcgacatctatatactatatagtaataccaatactcaagactacgaaactgatacaatctcttatcatgtgggtaatgttctcgatgtcgatagccatatgcccggtagttgcgatatacataaactgatcactaattccaaacccacccactttttatagtaagtttttcacccataaataataaatacaataattaatttctcgtaaaagtagaaaatatattctaatttattgcacggtaaggaagtagaatcataaagaacagtactcaatcaatagcaattatgaaacaatatatcgtcctggcatgcatgtgcctggcggcagctgctatgcctgccagtcttcagcaatcatcctcatcctcctcctcgtgtacggaagaagaaaacaaacatcatatgggaatcgatgttattatcaaagtcacaaagcaagaccaaacaccgaccaatgataagatttgccaatccgtaacggaaattacagagtccgagtcagatccagatcccgaggtggaatcagaagatgattccacatcagtcgaggatgtagatcctcctaccacttattactccatcatcggtggaggtctgagaatgaactttggattcaccaaatgtcctcagattaaatccatctcagaatccgctgatggaaacacagtgaatgctagattgtccagcgtgtccccaggacaaggtaaggactctcccgcgatcactcatgaagaagctcttgctatgatcaaagactgtgaagtgtctatcgacatcagatgtagcgaagaagagaaagacagcgacatcaagacccatccagtactcgggtctaacatctctcataagaaagtgagttacgaagatatcatcggttcaacgatcgtcgatacaaaatgcgtcaagaatctagagtttagcgttcgtatcggagacatgtgcaaggaatcatctgaacttgaggtcaaggatggattcaagtatgtcgacggatcggcatctgaaggtgcaaccgatgatacttcactcatcgattcaacaaaactcaaagcgtgtgtctgaatcgataactctattcatctgaaattggatgagtagggttaatcgaacgattcaggcacaccacgaattaaaaaagtgtaccggacactatattccggtttgcaaaacaaaaatgttcttaactacattcacaaaaagttacctctcgcgacttcttctttttctgtctcaatagtgtgatacgattatgacactattcctattcctattcctatttcctttcagagtatcacaaaaatattaaacctctttctgatggtctcataaaaaaagttttacaaaaatatttttattctctttctctctttgatggtctcataaaaaaagttttacaaaaatatttttattctctttctctctttgatggtctcataaaaaaagttttacaaaaatatttttattctctttctctctttgatggtctcataaaaaaagttttacaaaaatatttttattctctttctctctttgatggtctcataaaaaaagttttacaaaaatatttttattctctttctctctttgatggtctcataaaaaaagttttacaaaaatatttttattctctttctctctttgatggtctcataaaaaaagttttacaaaaatatttttattctctttctctctttgatggtctcataaaaaaagttttacaaaaatatttttattctctttctctctttgatggtctcataaaaaaagttttacaaaaatatttttattctctttctctctttgatggtctcataaaaaaagttttacaaaaatatttttattctctttctctctttgatggtctcataaaaaaagttttacaaaaatatttttattctctttctctctttgatggtctcataaaaaaagttttacaaaaatatttttattctctttctctctttgatggtctcataaaaaagttttacaaaaatatttttattctctttctctctttgatggtctcataaaaaagttttacaaaaatatttttattctctttctctctttgatggtctcataaaaaaagttttacaaaaatatttttattctctttctctctttgatggtctcataa

SEQ ID NO: 2 - DNA, 186854 bp, Artificial Sequence
  LIVP complete genome
ttccactatctgtggtacgaacggtttcatcttctttgatgccatcacccagatgttctataaacttggtatcctcgtccgatttcatatcctttgccaaccaatacatatagctaaactcaggcatatgttccacacatcctgaacaatgaaattctccagaagatgttacaatgtctagatttggacatttggtttcaaccgcgttaacatatgagtgaacacacccatacatgaaagcgatgagaaataggattctcatcttgccaaaatatcactagaaaaaatttatttatcaattttaaaggtataaaaaatacttattgttgctcgaatattttgtatttgatggtatacggaagattagaaatgtaggtattatcatcaactgattctatggttttatgtattctatcatgtttcactattgcgttggaaataatatcatatgcttccacatatattttattttgttttaactcataatactcacgtaattctggattattggcatatctatgaataattttagctccatgatcagtaaatattaatgagaacatagtattaccacctaccattatttttttcatctcattcaattcttaattgcaaagatctatataatcattatagcgttgacttatggactctggaatcttagacgatgtacagtcatctataatcatggcatatttaatacattgttttatagcatagtcgttatctacgatgttagatatttctctcaatgaatcaatcacacaatctaatgtaggtttatgacataatagcattttcagcagttcaatgtttttagattcgttgatggcaatggctatacatgtatatccgttatttgatctaatgttgacatctgaaccggattctagcagtaaagatactagagattgtttattatatctaacagccttgtgaagaagtgtttctcctcgtttgtcaatcatgttaatgtctttaagataaggtaggcaaatgtttatagtactaagaattgggcaagcataagacatgtcacaaagacccttttttgtatgtataagtgtaaaaattataacatccatagttggatttacataggtgtccaatcgggatctctccatcatcgagataattgatggcatctcccttccttttttagtagatatttcatcgtgtaagaatcaatattaatatttctaaagtatccgtgtatagcctctttatttaccacagctccatattccactagagggatatcgccgaatgtcatatactcaattagtatatgttggaggacatccgagttcattgttttcaatatcaaagagatggtttccttatcatttctccatagtggtacaatactacacattattccgtgcggctttccattttccaaaaacaatttgaccaaatctaaatctacatctttattgtatctataatcactatttagataatcagccataattcctcgagtgcaacatgttagatcgtctatatatgaataagcagtgttatctattcctttcattaacaatttaacgatgtctatatctatatgagatgacttaatataatattgaagagctgtacaatagtttttatctataaaagacggcttgattccgtgattaattagacatttaacaacttccggacgcacatatgctctcgtatccgactctgaatacagatgagagatgatatacagatgcaatacggtaccgcaatttcgtagttgataatcatcatacgcgtatcagtactcgtcctcataaagaacactgcagccattttctatgaacaaatcaataattttagaaacaggatcattgtcattacataattttctataactgaacgatggttttcacatttaacactcaagtcaaatccatgttctaccaacacctttatcaagtcaacgtctacatttttggatttcatatagctgaatatattaaagttatttatgttgctaaatccagtggcttctagtagagccatcgctatatccttattaactttaacatgtctactatttgtgtattcttctaatggggtaagctgtctccaatttttgcgtaatggattagtgccactgtctagtagtagtttgacgacctcgacattattacaatgctcattaaaaaggtatgcgtgtaaagcattattcttgaattggttcctggtatcattaggatctctgtctttcaacatctgtttaagttcatcaagagccacctcctcattttccaaatagtcaaacattttgactgaatgagctactgtgaactctatacacccacacaactaatgtcattaaatatcatgtcaaaaacttgtacaattattaataaaaataatttagtgtttaaattttaccagttccagattttacacctccgttaatacctccattaaccccactggacgatcctcctccccacattccaccgccaccagatgtataagttttagatcctttattactaccatcatgtccatggataaagacactccacatgccgccactaccccctttagaagacatattaataagacttaaggacaagtttaacaataaaattaatcacgagtaccctactaccaacctacactattatatgattatagtttctatttttacagtaccttgactaaagtttctagtcacaagagcaatactaccaacctacactattatatgattatagtttctatttttataggaacgcgtacgagaaaatcaaatgtctaatttctaacggtagtgttgataaacgattgttatccgcggatacctcctctatcatgtcgtctattttcttactttgttctattaacttattagcattatatattatttgattataaaacttatattgcttattagcccaatctgtaaatatcggattattaacatatcgtttctttgtaggtttatttaacatgtacatcactgtaagcatgtccttaccatttattttaatttgacgcatatccgcaatttctttttcgcagtcggttataaattctatatatgatggatacatgctacatgtgtacttataatcgactaatatgaagtacttgatacatattttcagtaacgatttattattaccacctatgaataagtacctgtgatcgtctaggtaatcaactgttttcttaatacattcgatggttggtaatttactcagaataatttccaatatcttaatatataattctgctatttctgggatatatttatctgccagtataacacaaatagtaatacatgtaaacccatattttgttattatattaatgtctgcgccattatctattaaccattctactaggctgacactatgcgactcaatacaatgataaagtatactacatccatgtttatctattttgtttatatcatcaatatacggcttacaaagttttagtatcgataacacatccaactcacgcatagagaaggtagggaataatggcataatatttattaggttatcatcattgtcattatctacaactaagtttccattttttaaaatatactcgacaactttaggatctctattgccaaatttttgaaaatatttatttatatgcttaaatctatataatgtagctccttcatcaatcatacatttaataacattgatgtatactgtatgataagatacatattctaacaatagatcttgtatagaatctgtatatcttttaagaattgtggatattaggatattattacataaactattacacaattctaaaatataaaacgtatcacggtcgaataatagttgatcaactatataattatcgattttgtgatttttcttcctaaactgtttacgtaaatagttagatagaatattcattagttcatgaccactatagttactatcgaataacgcgtcaaatatttcccgtttaatatcgcatttgtcaagataataatagagtgtggtatgttcacgataagtataataacgcatctctttttcgtgtgaaattaaatagtttattacgtccaaagatgtagcataaccatcttgtgacctagtaataatataataatagagaactgttttacccattctatcatcataatcagtggtgtagtcgtaatcgtaatcgtctaattcatcatcccaattataatattcaccagcacgtctaatctgttctattttgatcttgtatccatactgtatgttgctacatgtaggtattcctttatccaataatagtttaaacacatctacattgggatttgatgttgtagcgtatttttctacaatattaataccatttttgatactatttatttctatacctttcgaaattagtaatttcaataagtctatattgatgttatcagaacatagatattcgaatatatcaaaatcattgatatttttatagtcgactgacgacaataacaaaatcacaacatcgtttttgatattattatttttcttggtaacgtatgcctttaatggagtttcaccatcatactcatataatggatttgcaccactttctatcaatgattgtgcactgctggcatcgatgttaaatgttttacaactatcatagagtatcttatcgttaaccatgattggttgttgatgctatcgcattttttggtttctttcatttcagttatgtatggatttagcacgtttgggaagcatgagctcatatgatttcagtactgtagtgtcagtactattagtttcaataagatcaatctctagatctatagaatcaaaacacgataggtcagaagataatgaatatctgtaggcttcttgttgtactgtaacttctggttttgttagatggttgcatcgtgctttaacgtcaatggtacaaattttatcctcgctttgtgtatcatattcgtccctactataaaattgtatattcagattatcatgcgatgtgtatacgctaacggtatcaataaacggagcacaccatttagtcataaccgtaatccaaaaatttttaaagtatatcttaacgaaagaagttgtgtcattgtctacggtgtatggtactagatcctcataagtgtatatatctagagtaatgtttaatttattaaatggttgataatatggatcctcgtgacaatttccgaagatggaaataagacataaacacgcaataaatctaattgcggacatggttactccttaaaaaaatacgaataatcaccttggctatttagtaagtgtcatttaacactatactcatattaatccatggactcataatctctatacgggattaacggatgttctatatacggggatgagtagttctcttctttaactttatactttttactaatcatatttagactgatgtatgggtaatagtgtttgaagagctcgttctcatcatcagaataaatcaatatctctgtttttttgttatacagatgtattacagcctcatatattacgtaatagaacgtgtcatctaccttattaactttcaccgcatagttgtttgcaaatacggttaatcctttgacctcgtcgatttccgaccaatctgggcgtataatgaatctaaactttaattgcttgtaatcattcgaaataatttttagtttgcatccgtagttatcccctttatgtaactgtaaatttctcaacgcgatatctccattaataatgatgtcgaattcgtgctgtatacccatactgaatggatgaacgaataccgacggcgttaatagtaatttactttttcatctttacatattgggtactagttttactatcataagtttataaattccacaagctactatggaataagccaaccatcttagtataccacacatgtcttaaagtttattaattaattacatgttgttttatatatatcgctacgaatttaaagagaaattagtttaggaagaaaaattatctatctacatcatcacgtctctgtattctacgatagagtgctactttaagatgcgacagatccgtgtcatcaaatatatactccattaaaatgattattccggcagcgaacttgatattggatatatcacaacctttgttaatatctacgacaatagacagcagtcccatggttccataaacagtgagtttatctttctttgaagagatattttgtagagatcttataaaactgtcgaatgacatcgcatttatatctttagctaaatcgtatatgttaccatcgtaatatctaaccgcgtctatcttaaacgtttccatcgctttaaagacgtttccgatagatggtctcatttcatcagtcatactgagccaacaaatataatcgtgtataacatctttgatagaatcagactctaaagaaaacgaatcggctttattatacgcattcatgataaacttaatgaaaaatgtttttcgttgtttaagttggatgaatagtatgtcttaataattgttattatttcattaattaatatttagtaacgagtacactctataaaaacgagaatgacataactaatcataactagttatcaaagtgtctaggacgcgtaattttcatatggtatagatcctgtaagcattgtctgtattctggagctattttctctatcgcattagtgagttcagaatatgttataaatttaaatcgaataacgaacataactttagtaaagtcgtctatattaactcttttattttctagccatcgtaataccatgtttaagatagtatattctctagttactacgatctcatcgttgtctagaatatcacatactgaatctacatccaattttagaaattggtctgtgttacatatctcttctatattattgttgatgtattgtcgtagaaaactattacgtagaccattttctttataaaacgaatatatagtactccaattatctttaccgatatatttgcacacataatccattctctcaatcactacatctttaagattttcgttgttaagatatttggctaaactatataattctattagatcatcaacagaatcagtatatatttttctagatccaaagacgaactctttggcgtcctctataatattcccagaaaagatattttcgtgttttagtttatcgagatctgatctgttcatatacgccatgattgtacggtacgttatgataaccgcataaaataaaaatccattttcatttttaaccaatactattcataattgagattgatgtaatactttgttactttgaacgtaaagacagtacacggatccgtatctccaacaagcacgtagtaatcaaatttggtgttgttaaacttcgcaatattcatcaatttagatagaaacttatactcatcatctgttttaggaatccatgtattattaccactttccaacttatcattatcccaggctatgtttcgtccatcatcgttgcgcagagtgaataattcttttgtattcggtagttcaaatatatgatccatgcatagatcggcaaagctattgtagatgtgatttttcctaaatctaatataaaactcgtttactagcaaacactttcctgatttatcgaccaagacacatatggtttctaaatctatcaagtggtggggatccatagttatgacgcagtaacatatattattacattcttgactgtcgctaatatctaaatatttattgttatcgtattggattctgcatatagatggcttgtatgtcaaagatatagaacacataaccaatttatagtcgcgctttacattctcgaatctaaagttaagagatttagaaaacattatatcctcggatgatgttatcactgtttctggagtaggatatattaaagtctttacagatttcgtccgattcaaataaatcactaaataatatcccacattatcatctgttagagtagtatcattaaatctattatattttatgaaagatatatcactgctcacctctatatttcgtacatttttaaactgtttgtataatatctctctgatacaatcagatatatctattgtgtcggtagacgataccgttacatttgaattaatggtgttccattttacaacttttaacaagttgaccaattcatttctaatagtatcaaactctccatgattaaatattttaatagtatccattttatatcactacggacacaaagtagctgacataaaccattgtataatttttatgttttatgtttattagcgtacacattttggaagttccggcttccatgtatttcctggagagcaagtagatgatgaggaaccagatagtttatatccgtacttgcacttaaagtctacattgtcgttgtatgagtatgatcttttaaacccgctagacaagtatccgtttgatattgtaggatgtggacatttaacaatctgacacgtgggtggatcggaccattctcctcctgaacacaggacactagagttaccaatcaacgaatatccactattgcaactataagttacaacgctcccatcggtataaaaatcctcgtatccgttatgtcttccgttggatatagatggaggggattggcatttaacagattcacaaataggtgcctcgggattccataccatagatccagtagatcctaattcacaatacgatttagattcaccgatcaactgatatccgctattacaagagtacgttatactagagccaaagtctactccaccaatatcaagttggccattatcgatatctcgaggcgatgggcatctccgtttaatacattgattaaagagtgtccatccagtacctgtacatttagcatatataggtcccattttttgctttctgtatccaggtagacatagatattctatagtgtctcctatgttgtaattagcattagcatcagtctccacactattcttaaatttcatattaatgggtcgtgacggaatagtacagcatgatagaacgcatcctattcccaacaatgtcaggaacgtcacgctctccaccttcatatttatttatccgtaaaaatgttatcctggacatcgtacaaataataaaaagcccatatatgttcgctattgtagaaattgtttttcacagttgctcaaaaacgatggcagtgacttatgagttacgttacactttggagtctcatctttagtaaacatatcataatattcgatattacgagttgacatatcgaacaaattccaagtatttgattttggataatattcgtattttgcatctgctataattaagatataatcaccgcaagaacacacgaacatctttcctacatggttaaagtacatgtacaattctatccatttgtcttccttaactatatatttgtatagataattacgagtctcgtgagtaattccagtaattacatagatgtcgccgtcgtactctacagcataaactatactatgatgtctaggcatgggagacttttttatccaacgatttttagtgaaacattccacatcgtttaatactacatatttctcatacgtggtataaactccacccattacatatatatcatcgtttacgaataccgacgcgcctgaatatctaggagtaattaagtttggaagtcttatccatttcgaagtgccgtgtttcaaatattctgccacacccgttgaaatagaaaattctaatcctcctattacatataactttccatcgttaacacaagtactaacttctgattttaacgacgacatattagtaaccgttttccattttttcgttttaagatctacccgcgatacggaataaacatgtctattgttaatcatgccgccaataatgtatagacaattatgtaaaacatttgcattatagaattgtctatctgtattaccgactatcgtccaatattctgttctaggagagtaatgggttattgtggatatataatcagagtttttaatgactactatattatgttttataccatttcgtgtcactggctttgtagatttggatatagttaatcccaacaatgatatagcattgcgcatagtattagtcataaacttgggatgtaaaatgttgatgatatctacatcgtttggatttttatgtatccactttaataatatcatagctgtaacatcctcatgatttacgttaacgtcttcgtgggataagatagttgtcagttcatcctttgataattttccaaattctggatcggatgtcaccgcagtaatattgttgattatttctgacatcgacgcattatatagttttttaattccatatcttttagaaaagttaaacatccttatacaatttgtgaaattaatattatgaatcatagtttttacacatagatctactacaggcggaacatcaattattatggcagcaactagtatcatttctacattgtttatggtgatgtttatcttcttccagcgcatatagtctaatagcgattcaaacgcgtgatagtttataccattcaatataatcgcttcatcctttagatggtgatcctgaatgcgtttaaaaaaattatacggagacgccgtaataatttccttattcacttgtataatttccccattgatagaaaatattacgctttccattcttaaagtactataagtaattatagtataatgtaaacgtttatatattcaatatttttataaaaatcattttgacattaattcctttttaaatttccgtctatcatctatagaaacgtattctatgaatttataaaatgcttttacgtgtcctatcgtaggcgatagaaccgctaaaaagcctatcgaatttctacaaaagaatctgttatatggtatagggagagtataaaacattaaatgtccgtacttattaaagtattcagtagccaatcctaactctttcgaatacttattaatggctcttgttctgtacgaatctatttttttgaacaacggacctagtggtatatcttgttctatgtatctaaaataatgtctgactagatccgttagtttaatatccgcagtcatcttgtctagaatggcaaatctaactgcgggtttaggctttagtttagtttctatatctacatctatgtctttatctaacaccaaaaatataatagctaatattttattacaatcatccggatattcttctacgatctcactaactaatgtttctttggttatactagtatagtcactatcggacaaataaagaaaatcagatgatcgatgaataatacatttaaattcatcatctgtaagatttttgagatgtctcattagaatattattagggttagtactcattatcattcggcagctattacttattttattatttttcaccatatagatcaatcattagatcatcaaaatatgtttcaatcatcctaaagagtatggtaaatgactcttcccatctaatttctgaacgttcaccaatgtctctagccactttggcactaatagcgatcattcgcttagcgtcttctatattattaactggttgattcaatctatctagcaatggaccgtcggacagcgtcattctcatgttcttaatcaatgtacatacatcgccgtcatctaccaattcatccaacaacataagctttttaaaatcatcattataataggtttgatcgttgtcatttctccaaagaatatatctaataagtagagtcctcatgcttagttaacaactattttttatgttaaatcaattagtacaccgctatgtttaatacttattcatattttagtttttaggattgagaatcaatacaaaaattaatgcatcattaattttagaaatacttagtttccacgtagtcaatgaaacatttgaactcatcgtacaggacgttctcgtacaggacgtaactataaaccggtttatatttgttcaagatagatacaaatccgataactttttttacgaattctacgggatccactttaaaagtgtcataccgggttctttttatttttttaaacagatcaatggtgtgatgttgattaggtcttttacgaatttgatatagaatagcgtttacatatcctccataatggtcaatcgccatttgttcgtatgtcataaattctttaattatatgacactgtgtattatttagttcatccttgttcattgttaggaatctatccaaaatggcaattatactagaactataggtgcgttgtatacacatattgatgtgtctgtttatacaatcaatgctactaccttcgggtaaaattgtagcatcatataccatttctagtactttaggttcattattatccattgcagaggacgtcatgatcgaatcataaaaaaatatattatttttatgttattttgttaaaaataatcatcgaatacttcgtaagatactccttcatgaacataatcagttacaaaacgtttatatgaagtaaagtatctacgatttttacaaaagtccggatgcataagtacaaagtacgcgataaacggaataataatagatttatctagtctatctttttctatagctttcatagttagatacatggtctcagaagtaggattatgtaacatcagcttcgataaaatgactgggttatttagtcttacacattcgctcatacatgtatgaccgttaactacagagtctacactaaaatgattgaacaatagatagtctaccattgtttcgtattcagatagtacagcgtagtacatggcatcttcacaaattatatcattgtctaatagatatttgacgcatcttatggatcccacttcaacagccatcttaaaatcggtagaatcatattgctttcctttatcattaataatttctagaacatcatctctatcataaaagatacaaatattaactgtttgatccgtaataacattgctagtcgatagcaatttgttaataagatgcgctgggctcaatgtcttaataagaagtgtaagaggactatctccgaatttgttttgtttattaacatccgttgatggaagtaaaagatctataatgtctacattcttgactgttttagagcatacaatatggagaggtgtatttccatcatgatctggttttgagggactaattcctagtttcatcatccatgagattgtagaagcttttggattgtctgacataagatgtctatgaatatgatttttgccaaatttatccactatcctggcttcgaatccgatggacattatttttttaaacactctttctgaaggatctgtacacgccaacaacggaccacatccttcttcatcaaccgagttgttaatcttggctccatactgtaccaataaatttattctctctatgacttcatcatctgttcccgagagataatatagaggcgttttatgctgtttatcacacgcgtttggatctgcgccgtgcgtcagcagcatcgcgactattctattattattaattttagaagctatatgcaatggataatttccatcatcatccgtctcatttggagagtatcctctatgaagaagttcttcgacaaatcgttcatctagtcctttaattccacaatacgcatgtagaatgtgataattatttccagaaggttcgatagcttgtagcatattcctaaatacatctaaatttttactattatatttggcataaagagatagataatactcggccgacataatgttgtccattgtagtataaaaattaatatttctatttctgtatatttgcaacaatttactctctataacaaatatcataacttagttcttttatgtcaagaaggcactggtttagttcatctataaatgtcacgccataactaccacgcatgccatactcagaattatgataaagatatttatccttggggtgtaggtaatggggattaatctttgttggatcagtctctaagttaacacatgtcacacatgatccatttatagttatatcacacgatgatgatttatgaattgattccggaagatcgctatcgtattttgtggttccacaattcatttccatacatgttattgtcacactaatattatgatgaactttatctagccgctgagtggtaaacaacagaacagatagtttattatctttaccaacaccctcagccgctgccacaaatctctgatccgtatccatgatggtcatgtttatttctagtccgtatccagtcaacactatgttagcatttctgtcgatatagctttcactcatatgacactcaccaataatagtagaattaatgtcgtaatttacaccaatagtgagttcggcggcaaagtaccaataccggtaatcttgtcgaggaggacatatagtattcttgtattctaccgaatacccgagagatgcgatacaaaagagcaagactaatttgtaaaccatcttactcaaaatatgtaacaatagtacgatgcaatgagtaagacaataggaaatctatcttatatacacataattattctatcaattttaccaattagttagtgtaatgttaacaaaaatgtgggagaatctaattagtttttctttacacaattgacgtacatgagtctgagttccttgtttttgctaattatttcatccaatttattattcttgacgatatcgagatcttttgtataggagtcaaacttgtattcaacatgcttttctataatcattttagctatttcggcatcatccaatagtacattttccagattagcagaatagatattaatgtcgtatttgaacagagcctgtaacatctcaatgtctttattatctatagccaatttaatgtccggaatgaagagaagggaattattggtgtttgtcgacgtcatatagtcgagcaagagaatcatcatatccacgtgtccattttttatagtgatgtgaatacaactaaggagaatagccagatcaaaagtagatggtatctctgaaagaaagtaggaaacaatacttacatcattaagcatgacggcatgataaaatgaagttttccatccagttttcccatagaacatcagtctccaatttttcttaacaaacagttttaccgtttgcatgttaccactatcaaccgcataatacaatgcggtgtttcccttgtcatcaaattgtgaatcatccagtccactgaatagcaaaatctttactattttggtatcttccaatgtggctgcctgatgtaatggaaattcattctctagaagatttttcaatgctccagcgttcaacaacgtacatactagacgcacgttattatcagctattgcataatacaaggcactatgtccatggacatccgccttaaatgtatctttactagagagaaagcttttcagctgcttagacttccaagtattaattcgtgacagatccatgtctgaaacgagacgctaattagtgtatattttttcattttttataattttgtcatattgcaccagaattaataatatctttaatagatctgattagtagatacatggctatcgcaaaacaacatatacacatttaataaaaataatatttattaagaaaattcagatttcacgtacccatcaatataaataaaataatgattccttacaccgtacccatattaaggagattccaccttacccataaacaatataaatccagtaatatcatgtctgatgatgaacacaaatggtgtattaaattccagtttttcaggagatgatctcgccgtagctaccataatagtagatgcctctgctacagttccttgttcgtcgacatctatctttgcattctgaaacattttataaatatataatgggtccctagtcatatgtttaaacgacgcattatctggattaaacatactaggagccatcatttcggctatcgacttaatatccctcttattttcgatagaaaatttagggagtttaagattgtacactttattccctaattgagacgaccaatagtctaattttgcagccgtgatagaatctgtgaaatgggtcatattatcacctattgccaggtacatactaatattagcatccttatacggaaggcgtaccatgtcatattctttgtcatcgattgtgattgtatttccttgcaatttagtaactacgttcatcatgggaaccgttttcgtaccgtacttattagtaaaactagcattgcgtgttttagtgatatcaaacggatattgccatatacctttaaaatatatagtattaatgattgcccatagagtattattgtcgagcatattagaatctactacattagacataccggatctacgttctactatagaattaattttattaaccgcatctcgtctaaagtttaatctatataggccgaatctatgatattgttgataatacgacggtttaatgcacacagtattatctacgaaactttgataagttagatcagtgtacgtatatttagatgttttcagcttagctaatcctgatattaattctgtaaatgctggacccagatctctttttctcaaatccatagtcttcaataattctattctagtattacctgatgcaggcaatagcgacataaacatagaaaacgaataaccaaacggtgagaagacaatattatcatcttgaatatttttatacgctactataccggcattggtaaatccttgtagacgataggcggacgctgaacacgctaacgatagtatcaataacgcaatcatgattttatggtattaataattaaccttatttttatgttcggtataaaaaaattattgatgtctacacatccttttgtaattgacatctatatatccttttgtataatcaactctaatcactttaacttttacagttttccctaccagtttatccctatattcaacatatctatccatatgcatcttaacactctctgccaagatagcttcagagtgaggatagtcaaaaagataaatatatagagcataatcattctcgtatactctgccctttattacatcacccgcattgggcaacgaataacaaaatgcaagcatcttgttaacgggctcgtaaattgggataaaaattatgtttttattgtcttatatctattttattcaagagaatattcaggaatttctttttccggttgtatctcgtcgcagtatatatcatttgtacattgtttcatattttttaatagtttacaccttttagtaggactagtatcgtacaattcatagctgtattttgaattccaatcacgcataaaaatatcttccaattgttgacgaagacctaatccatcatccggtgtaatattaatagatgctccacatgtatccgtaaagtaatttcctgtccaatttgaggtacctatataggccgttttatcggttaccatatatttggcatggtttaccctagaatacggaatgggaggatcagcatctggtacaataaatagctttacttctatatttatgtttttagattttagcatagcgatagatcttaaaaagtttctcatgataaacgaagatcgttgccagcaactaatcaatagcttaacggatacttgtctgtctatagcggatcttcttaattcatcttctatataaggccaaaacaaaattttacccgccttcgaataaataatagggataaagttcataacagatacataaacgaatttactcgcatttctaatacatgacaataaagcggttaaatcattggttctttccatagtacatagttgttgcggtgcagaagcaataaatacagagtgtggaacgccgcttacgttaatactaagaggatgatctgtattataatacgacggataaaagtttttccaattatatggtagattgttaactccaagataccagtatacctcaaaaatttgagtgagatccgctgccaagttcctattattgaagatcgcaatacccaattccttgacctgagttagtgatctccaatccatgttagcgcttcctaaataaatatgtgtattatcagatatccaaaattttgtatgaagaactcctcctaggatatttgtaatatctatgtatcgtacttcaactccggccatttgtagtctttcaacatcctttaatggtttgttagatttattaacggctactctaactcgtactcctcttttgggtaattgtacaatctcgtttaatattatcgtgccgaaattcgtacccacttcatccgataaactccaataaaaagatgatatatctagtgtttttgtggtattggatagaatttccctccacatgttaaatgtagacaaatatactttatcaaattgcatacctataggaatagtttctgtaatcactgcgattgtattatccggattcattttatttgttaaaagaataatcctatatcacttcactctattaaaaatccaagtttctatttctttcatgactgattttttaacttcatccgtttccttatgaagatgatgtttggcaccttcataaatttttatttctctattacaatttgcatgttgcatgaaataatatgcacctaaaacatcgctaatcttattgtttgttccctggagtatgagagtcgggggggtgttaatcttggaaattatttttctaaccttgttggtagccttcaagacctgactagcaaatccagccttaattttttcatgattgactaatgggtcgtattggtatttataaactttatccatatctctagatactgattctggacatagctttccgactggcgcatttggtgtgatggttcccataagtttggcagctagcagattcagtcttgaaacagcatctgcattaactagaggagacattagaatcattgctgtaaacaagtttggattatcgtaagaggctagctcccatggaatgacccaataagtagatttaatagttaccacgtgctgtaccaaagtcatcaatcatcattttttcaccattacttcttccatgtccaatatgatcatgtgagaatactaaaattcctaacgatgatatgttttcagctagttcgtcataacgtccagaatgtttaccagctccatgacttatgaatactaatgccttaggatatgtaataggtttccaatatttacaatatatgtaatcattgtccagattgaacatacagtttgcactcatgattcacgttatataactatcaatattaacagttcgtttgatgatcatattatttttatgttttattgataattgtaaaaacatacaattaaatcaatatagaggaaggagacggctactgtcttttgtaagatagtcatggcgactaaattagattatgaggatgctgttttttactttgtggatgatgataaaatatgtagtcgcgactccatcatcgatctaatagatgaatatattacgtggagaaatcatgttatagtgtttaacaaagatattaccagttgtggaagactgtacaaggaattgatgaagttcgatgatgtcgctatacggtactatggtattgataaaattaatgagattgtcgaagctatgagcgaaggagaccactacatcaattttacaaaagtccatgatcaggaaagtttattcgctaccataggaatatgtgctaaaatcactgaacattggggatacaaaaagatttcagaatctagattccaatcattgggaaacattacagatttgatgaccgacgataatataaacatcttgatactttttctagaaaaaaaattgaattgatgatataggggtcttcataacgcataattattacgttagcattctatatccgtgttaaaaaaaattatcctatcatgtatttgagagttttatatgtagcaaacatgatagctgtgatgccaataagctttagatattcacgcgtgctagtgttagggatggtattatctggtggtgaaatgtccgttatataatctacaaaacaatcatcgcatatagtatgcgatagtagagtaaacatttttatagtttttactggattcatacatcgtctacccaattcggttataaatgaaattgtcgccaatcttacacccaaccccttgttatccattagcatagtattaacttcgttatttatgtcataaactgtaaatgattttgtagatgccatatcatacatgatattcatgtccctattataatcattactaactttatcacaatatatgttgataatatctatatatgatctagtctttgtgggcaactgtctatacaagtcgtctaaacgttgtttactcatatagtatcgaacagccatcattacatggtcccgttccgttgatagataatcgagtatgttagtggacttgtcaaatctatataccatattttctggaagtggatatacatagtcgtgatcaacattattgctagcctcatcttctatatcctgtactataccattatctatatcatctacataatctatgatattattacacataaacatcgacaacatactattgtttattatctaagtcctgttgatccaaacccttgatctcctctatttgtactatctagagattgtacttcttccagttctggataatatatacgttgatagattagctgagctattctatctccagtatttacattaaacgtacattttccattattaataagaatgactcctatgtttcccctataatcttcgtctattacaccacctcctatatcaatgccttttagtgacagaccagacctaggagctattctaccatagcagaacttaggcatggacatactaatatctgtcttaattaactgtctttctcctggagggatagtataatcgtaagcgctatacaaatcatatccggcagcacccggcgattgcctagtaggagatttagctctgttagtttccttaacaaatctaactggtgagttaatattcatgttgaacataaaactaatattttatttcaaaattatttaccatcccatatattccatgaataagtgtgatgattgtacacttctatagtatctatatacgatccacgataaaatcctcctatcaatagcagtttattatccactatgatcaattctggattatccctcggataaataggatcatctatcagagtccatgtattgctggattcacaataaaattccgcatttctaccaaccaagaataaccttctaccgaacactaacgcgcatgatttataatgaggataataagtggatggtccaaactgccactgatcatgattgggtagcaaatattctgtagttgtatcagtttcagaatgtcctcccattacgtatataacattgtttatggatgccactgctggattacatctaggtttcagaagactcggcatattaacccaagcagcatccccgtggaaccaacgctcaacagatgtgggatttggtagacctcctactacgtataatttattgttagcgggtatcccgctagcatacagtctggggctattcatcggaggaattggaatccaattgtttgatatataatttaccgctatagcattgttatgtatttcattgttcatccatccaccgatgagatatactacttctccaacatgagtacttgtacacatatggaatatatctataatttgatccatgttcataggatactctatgaatggatacttgtatgatttgcgtggttgtttatcacaatgaaatattttggtacagtctagtatccattttacattatttatacctctgggagaaagataatttgacctgattacatttttgataaggagtagcagatttcctaatttatttcttcgctttatataccacttaatgacaaaatcaactacataatcctcatctggaacatttagttcatcgctttctagaataagtttcatagatagataatcaaaattgtctatgatgtcatcttccagttccaaaaagtgtttggcaataaagtttttagtatgacataagagattggatagtccgtattctatacccatcatgtaacactcgacacaatattcctttctaaaatctcgtaagataaagtttatacaagtgtagatgataaattctacagaggttaatatagaagcacgtaataaattgacgacgttatgactatctatatatacctttccagtatacgagtaaataactatagaagttaaactgtgaatgtcaaggtctagacaaaccctcgtaactggatctttatttttcgtgtatttttgacgtaaatgtgtgcgaaagtaaggagataactttttcaatatcgtagaattgactattatattgcctcctatggcatcaataattgttttgaatttcttagtcatagacaatgctaatatattcttacagtacacagtattgacaaatatcggcatttatgtttctttaaaagtcaacatctagagaaaaatgattatctttttgagacataactcccattttttggtattcacccacacgtttttcgaaaaaattagtttttccttccaatgatatattttccatgaaatcaaacggattggtaacattataaatttttttaaatcccaattcagaaatcaatctatccgcgacgaattctatatatgttttcatcatttcacaattcattcctataagtttaactggaagagccgcagtaagaaattcttgttcaatggatactgcatctgttataatagatctaacggtttcttcactcggtggatgcaataaatgtttaaacatcaaacatgcgaaatcgcagtgcagaccctcgtctctactaattagttcgttggaaaacgtgagtccgggcattaggccacgctttttaagccaaaatatggaagcgaatgatccggaaaagaagattccttctactgcagcaaaggcaataagtctctctccataaccggcgctgtcatgtatccacttttgagcccaatcggccttcttttttacacaaggcatcgtttctatggcattaaagagatagtttttttcattactatctttaacataagtatcgatcaaaagactatacatttccgaatgaatgttttcaatggccatctgaaatccgtagaaacatctagcctcggtaatctgtacttctgtacaaaatcgttccgccaaattttcattcactattccgtcactggctgcaaaaaacgccaatacatgttttataaaatatttttcgtctggtgttagtttattccaatcattgatatctttagatatatctacttcttccactgtccaaaatgatgcctctgcctttttatacatgttccagatgtcatgatattggattgggaaaataacaaatctatttggatttggtgcaaggatgggttccataactaaattaacaataacaataaattttttttcagttatctatatgcctgtacttggattttttgtacatcgatatcgccgcaatcactacaataattacaagtattattgatagcattgttattagtactatcataattaaattatctacattcatgggtgctgaataatcgttattatcatcattatcattttgtaattgtgacatcatactagataaatcgtttgcgagattgttgtgggaagcgggcatggaggatgcattatcattattatttaacgccttccatttggattcacaaatgttacgcacattcaacattttatggaaactataattttgtgaaaacaaataacaagaaaactcgtcatcgttcaaatttttaacgatagtaaaccgattaaacgtcgagctaatttctaacgctagcgactctgttggatatgggtttccagatatatatcttttcagttcccctacgtatctataatcatctgtaggaaatggaagatatttccatttatctactgttcctaatatcatatgtggtggtgtagtagaaccattaagcgcgaaagatgttatttcgcatcgtattttaacttcgcaataatttctggttagataacgcactctaccagtcaagtcaatgatattagcctttacagatatattcatagtagtcgtaacgatgactccatcttttagatgcgatactcctttgtatgtaccagaatcttcgtacctcaaactcgatatatttaaacaagttaatgagatattaacgcgttttatgaatgatgatatataaccagaagttttatcctcggtggctagcgctataaccttatcattataataccaactagtgtgattaatatgtgacacgtcagtgtgggtacaaatatgtacattatcgtctacgtcgtattcgatacatccgcatacagccaacaaatataaaatgacaaatactctaacgccgttcgtacccatcttgatgcggtttaataaatgttttgatttcaatttattgtaaaaaaagattcggttttatactgttcgatattctcattgcttatattttcatctatcatctccacacagtcaaatccgtggttagcatgcacctcatcaaccggtaaaagactatcggactcttctatcattataactctagaatatttaatttggtcattattaatcaagtcaattatcttatttttaacaaacgtgagtattttactcattttttataaaaacttttagaaatatacagactctatcgtgtgtctatatcttctttttatatccaatgtatttatgtctgatttttcttcatttatcatatataatggtccaaattctacacgtgcttcggattcatccagatcattaaggttcttataattgtaacatccttctcttccctcttctacatcttccttcttattcttattcttagcgtcacagaatctaccacagcaggatcccatgacgagcgtcatattaaactaatccattttcaattataatatatgattagtaatgaccattaaaataaaaaatattcttcataaccggcaagaaagtgaaaagttcacattgaaactatgtcagtagtatacatcatgaaatgatgatatatatatactctattttggtggaggattatatgatataattcgtggataatcatttttaagacacatttctttattcgtaaatcttttcacgttaaatgagtgtccatattttgcaatttcttcatatgatggcggtgtacgtggacgaggctgctcctgttcttgttgtggtcgccgactgtcgtgtctgcgtttagatccctccattatcgcgattgcgtagatggagtactattttataccttgtaattaaatttttttattaattaaacgtataaaaacgttccgtatctgtatttaagagccagatttcgtctaatagaacaaatagctacagtaaaaataactagaataattgctacacccactagaaaccacggatcgtaatacggcaatcggttttcgataataggtggaacgtatattttatttaaggacttaacaattgtctgtaaaccacaatttgcttccgcggatcctgtattaactatctgtaaaagcatatgttgaccgggcggagccgaacattctccgatatctaatttctgtatatctataatattattaacctccgcatacgcattacagttcttttctagcttggataccgcactaggtacatcgtctagatctattcctatttcctcagcgatagctcttctatccttttccggaagcaatgaaatcacttcaataaatgattcaaccatgagtgtgaaactaagtcgagaattactcatgcatttgttagttattcggagcgcgcaatttttaaactgtcctataacctctcctatatgaatagcacaagtgacattagtagggatagaatgttgagctaatttttgtaaataactatctataaaaagattatacaaagttttaaactctttagtttccgccatttatccagtctgagaaaatgtctctcataataaatttttccaagaaactaattgggtgaagaatggaaacctttaatctatatttatcacagtctgttttggtacacatgatgaattcttccaatgccgtactaaattcgatatctttttcgatttctggatatgtttttaataaagtatgaacaaagaaatggaaatcgtaataccagttatgtttaactttgaaattgttttttattttcttgttaatgattccagccacttgggaaaagtcaaagtcgtttaatgccgatttaatacgttcattaaaaacaaactttttatcctttagatgaattattattggttcattggaatcaaaaagtaagatattatcgggtttaagatctgcgtgtaaaaagttgtcgcaacagggtagttcgtagattttaatgtataacagagccatctgtaaaaagataaactttatgtattgtaccaaagatttaaatcctaatttgatagctaactcggtatctactttatctgccgaatacagtgctaggggaaaaattataatgtttcctctttcatattcgtagttagttctcttttcatgttcgaaaaagtgaaacatgcggttaaaatagtttataacattaatattactgttaataactgccggataaaagtgggatagtaatttcacgaatttgatactgtcctttctctcgttaaacgcctttaaaaaaactttagaagaatatctcaatgagagttcctgaccatccatagtttgtatcaataatagcaacatatgaagaacacgtttatacagagtatgtaaaaatgttaatttatagtttaatcccatggcccacgcacacacgattaattttttttcatctccctttagattgttgtatagaaatttgggtactgtgaactccgccgtagtttccatgggactatataattttgtggcctcgaatacaaattttactacatagttatctatcttaaagactataccatatcctcctgtagatatgtgataaaaatcgtcgtttataggataaaatcgtttatccttttgttggaaaaaggatgaattaatgtaatcattctcttctatctttagtagtgtttccttattaaaattcttaaaataatttaacaatctaactgacggagcccaattttggtgtaaatctaattgggacattatattgttaaaatacaaacagtctcctaatataacagtatctgataatctatggggagacatccattgatattcaggggatgaatcattggcaacacccatttattgtacaaaaagccccaatttacaaacgaaagtccaggtttgatagagacaaacaattaactattttgtctctgtttttaacacctccacagtttttaatttctttagtaatgaaattattcacaatatcagtatcttctttatctaccagagattttactaacttgataaccttggctgtctcattcaatagggtagtaatatttgtatgtgtgatattgatatctttttgaattgtttcttttagaagtgattctttgatggtgccagcatacgaattacaataatgcagaaactcggttaacatgcaggaattatagtaagccaattccaattgttgcctgtgttgtattagagtgtcaatatgagcaatggtgtccttgcgtttctctgatagaatgcgagcagcgattttggcgttatcatttgacgatatttctggaatgacgaatcctgtttctactaactttttggtaggacaaagtgaaacaatcaagaagatagcttctcctcctatttgtggaagaaattgaactcctctagatgatctactgacgatagtatctccttgacagatattggaccgaattacagaagtacctggaatgtaaagccctgaaaccccctcattttttaagcagattgttgccgtaaatcctgcactatgcccaagatagagagctcctttggtgaatccatctctatgtttcagtttaaccaagaaacagtcagctggtctaaaatttccatctctatctaatacagcatctaacttgatgtcaggaactatgaccggtttaatgttatatgtaacattgagtaaatccttaagttcataatcatcactgtcatcagttatgtacgatccaaacaatgtttctaccggcatagtggatacgaagatgctatccatcagaatgtttccctgattagtattttctatatagctattcttctttaaacgattttccaaatcagtaactatgttcatttttttaggagtaggacgcctagccagtatggaagaggattttctagatcctctcttcaacatctttgatctcgatggaatgcaaaaccccatagtgaaacaaccaacgataaaaataatattgtttttcactttttataattttaccatctgactcatggattcattaatatctttataagagctactaacgtataattctttataactgaactgagatatatacaccggatctatggtttccataattgagtaaatgaatgctcggcaataactaatggcaaatgtatagaacaacgaaattatactagagttgttaaagttaatattttctatgagctgttccaataaattatttgttgtgactgcgttcaagtcataaatcatcttgatactatccagtaaaccgtttttaagttctggaatattatcatcccattgtaaagcccctaattcgactatcgaatatcctgctctgatagcagtttcaatatcgacggacgtcaatactgtaataaaggtggtagtattgtcatcatcgtgataaactacgggaatatggtcgttagtaggtacggtaactttacacaacgcgatatataactttccttttgtaccatttttaacgtagttgggacgtcctgcagggtattgttttgaagaaatgatatcgagaacagatttgatacgatatttgttggattcctgattattcactataatataatctagacagatagatgattcgataaatagagaaggtatatcgttggtaggataatacatccccattccagtattctcggatactctattgatgacactagttaagaacatgtcttctattctagaaaacgaaaacatcctacatggactcattaaaacttctaacgctcctgattgtgtctcgaatgcctcgtacaaggatttcaaggatgccatagattctttgaccaacgatttagaattgcgtttagcatctgatttttttattaaatcgaatggtcggctctctggtttgctaccccaatgataacaatagtcttgtaaagataaaccgcaagaaaatttatacgcatccatccaaataaccctagcaccatcggatgatattaatgtattattatagattttccatccacaattattgggccagtatactgttagcaacggtatatcgaatagattactcatgtaacctactagaatgatagttcgtgtactagtcataatatctttaatccaatctaaaaaatttaaaattagattttttacactgttaaagttaacaaaagtattacccgggtacgtggatatcatatatggcattggtccattatcagtaatagctccataaactgatacggcgatggtttttatatgtgtttgatctaacgaggaagaaattcgcgcccacaattcatctctagatatgtatttaatatcaaacggtaacacatcaatttcgggacgcgtatatgtttctaaatttttaatccaaatataatgatgacctatatgccctattatcatactgtcaactatagtacacctagggaacttacgatacatctgtttcctataatcgttaaattttacaaatctataacatgctaaaccttttgacgacagccattcattaatttctgatatggaatctgtattctcgataccgtatcgttctaaagccagtgctatatctccctgttcgtgggaacgctttcgtataatatcgatcaacggataatctgaagtttttggagaataatatgactcatgatctatttcgtccataaacaatctagacataggaattggaggcgatgatcttaattttgtgcaatgagtcgtcaatcctataacttctaatcttgtaatattcatcatcgacataatactatctatgttatcatcgtatattagtataccatgaccttcttcatttcgtgccaaaatgatatacagtcttaaatagttacgcaatatctcaatagtttcataattgttagctgttttcatcaaggtttgtatcctgtttaacatgatggcgttctataacgtctctattttctatttttaattttttaaatttttaacgatttactgtggctagatacccaatctctctcaaatatttttttagcctcgcttacaagctgtttatctatactattaaaactgacgaatccgtgattttggtaatgggttccgtcgaaatttgccgaagtgatatgaacatattcgtcgtcgactatcaacaattttgtattattctgaatagtgaaaaccttcacagatagatcattttgaacacacaacgcatctagacttttggcggttgccatagaatatacgtcgttcttatcccaattaccaactagaagtctgatcttaactcctctattaatggctgcttctataatggagttgtaaatgtcgggccaatagtagctattaccgtcgacacgtgtagtgggaactatggccaaatgttcaatatctatactagtcttagctgacctgagtttatcaataactacatcggtatctagatctctagaatatcccaataggtgttccggagaatcagtaaagaacactccacctataggattcttaatatgatacgcagtgctaactggcaaacaacaagccgcagagcataaattcaaccatgaattttttgcgctattaaaggctttaaaagtatcaaatcttctacgaagatctgtggccagcgggggataatcagaatatacacctaacgttttaatcgtatgtatagatcctccagtaaatgacgcgtttcctacataacatctttcatcatctgacacccaaaaacaaccgagtagtagtcccacattattttttttatctatattaacggttataaaatttatatccgggcagtgactttgtagctctcccagatttcttttccctcgttcatctagcaaaactattattttaatccctttttcagatgcctcttttagtttatcaaaaataagcgctcccctagtcgtactcagaggattacaacaaaaagatgctatgtatatatatttcttagctagagtgataatttcgttaaaacattcaaatgttgttaaatgatcggatctaaaatccatattttctggtagtgtttctaccagcctacattttgctcccgcaggtaccgatgcaaatggccacatttagttaacataaaaacttatacatcctgttctatcaacgattctagaatatcatcggctatatcgctaaaattttcatcaaagtcgacatcacaacctaactcagtcaatatattaagaagttccatgatgtcatcttcgtctatttctatatccgtatccattgtagattgttgaccgattatcgagtttaaatcattactaatactcaatccttcagaatacaatctgtgtttcattgtaaatttataggcggtgtatttaagttggtagattttcaattatgtattaatatagcaacagtagttcttgctcctccttgattctagcatcctcttcattattttcttctacgtacataaacatgtccaatacgttagacaacacaccgacgatggcggccgctacagacacgaatatgactaaaccgatgaccatttaaaaacccctctctagctttcacttaaactgtatcgatcattcttttagcacatgtataatataaaaacattattctatttcgaatttaggcttccaaaaatttttcatccgtaaaccgataataatatatatagacttgttaatagtcggaataaatagattaatgcttaaactatcatcatctccacgattagagatacaatatttacattctttttgctgtttcgaaactttatcaatacacgttaatacaaacccaggaaggagatattgaaactgaggctgttgaaaatgaaacggtgaatacaataattcagataatgtaaaatcatgattccgtattctgatgatattagaactgctaatggatgtcgatggtatgtatctaggagtatctattttaacaaagcatcgatttgctaatatacaattatccttttgattaattgttattttattcatattcttaaaaggtttcatatttatcaattcttctacattaaaaatttccatttttaatttatgtagccccgcaatactcctcattacgtttcattttttgtctataatatccattttgttcatctcggtacatagattatccaattgagaagcgcatttagtagttttgtacattttaagtttattgacgaatcgtcgaaaactagttatagttaacattttattatttgataccctgatattaatacccctgccgttactattatttataactgatgtaatccacgtaacattggaattaactatcgatagtaatgcatcgacgcttccaaaattgtctattataaactcaccgataatttttttattgcatgttttcatattcattaggattatcaaatctttaatcttattacgattgtatgcgttgatattacaagacgtcattctaaaagacggaggatctccatcaaatgccagacaatcacgtacaaagtacatggaaataggttttgttctattgcgcatcatagatttatatagaacacccgtagaaatactaatttgttttactctataaaatactaatgcatctatttcatcgttttgtataacgtctttccaagtgtcaaattccaaatttttttcattgatagtaccaaattcttctatctctttaactacttgcatagataggtaattacagtgatgcctacatgccgttttttgaaactgaatagatgcgtctagaagcgatgctacgctagtcacaatcaccactttcatatttagaatatatatatgtaaaaatatagtagaatttcattttgtttttttctatgctataaatgaattctcattttgcatctgctcatactccgttttatattaataccaaagaaggaagatatctggttctaaaagccgttaaagtatgcgatgttagaactgtagaatgcgaaggaagtaaagcttcctgcgtactcaaagtagataaaccctcatcgcccgcgtgtgagagaagaccttcgtccccgtccagatgcgagagaatgaataaccctggaaaacaagttccgtttatgaggacggacatgctacaaaatatgttcgcggctaatcgcgataatgtagcttctagacttttgtcctaaaatactattatatccttttcgatattaataaatccgtgtcgtccaggttttttatctctttcagtatgtgaatagataggtattttatctctattcatcatcgaatttaagagatccgataaacattgtttgtattctccagatgtcagcatctgatacaacaatatatgtgcacataaacctctggcacttatttcatgtaccttccccttatcactaaggagaatagtatttgagaaatatgtatacatgatattatcatgaattagatatacagaatttgtaacactctcgaaatcacacgatgtgtcggcgttaagatctaatatatcactcgataacacattttcatctagatacactagacattttttaaagctaaaatagtctttagtagtaacagtaactatgcgattattttcatcgatgatacatttcatcggcatattattacgcttaccatcaaagactataccatgtgtatatctaacgtattctagcatggttgccatacgcgcattaaacttttcaggatctttggatagatcttccaatctatctatttgagaaaacatttttatcatgttcaatagttgaaacgtcggatccactatatagatattatctataaagattttaggaactacgttcatggtatcctggcgaatattaaaactatcaatgatatgattatcgttttcatcttttatcaccatatagtttctaagatatgggattttacttaatataatattatttcccgtgataaattttattagaaaggccaaatctataagaaaagtcctagaattagtctgaagaatatctatatcgccgtatagtatatttggattaattagatatagagaatatgatccgtaacatatacaacttttattatggcgtctaagatattcttccatcaacttattaacatttttgactagggaagatacattatgacgtcccattacttttgccttgtctattactgcgacgttcatagaatttagcatatctcttgccaattcttccattgatgttacattataagaaattttagatgaaattacatttggagctttaatagtaagaactcctaatatgtccgtgtatgtggtcactaatacagattgtagttctataatcgtaaataatttacctatattatatgtttgagtctgtttagaaaagtagctaagtatacgatcttttatttctgatgcagatgtattaacatcggaaaaaaatctttttttattcttttttactaaagatacaaatatgtctttgttaaaaacagttattttctgaatatttctagcttgtaattttaacatatgatattcgttcacactaggtactctgcctaaataggtttctataatctttaatgtaatattaggaaaagtattctgatcaggattcctattcattttgaggatttaaaactctgattattgtctaatatggtctctacgcaaactttttcacagagcgatagagtttttgataactcgtttttcttaagaaatataaaactactgtctccagagctcgctctatcttttattttatctaattcgatacaaactcctgatactggttcagaaagtaattcattaattttcagtcctttatagaagatatttaatatagataatacaaaatcttcagtttttgatatcgatctgattgatcctagaactagatatattaataacgtgctcattaggcagtttatggcagcttgataattagatatagtatattccagttcatatttattagataccgcattgcccagattttgatattctatgaattcctctgaaaataaatccaaaataactagacattctattttttgtggattagtgtactctcttccctctatcatgttcactactggtgtccacgatgataaatatctagagggaatataatatagtccataggatgccaatctagcaatgtcgaataactgtaattttattcttcgctcttcattatgaattgattcttgaggtataaacctaacacaaattatattattagacttttcgtatgtaatgtctttcatgttataagtttttaatcctggaatagaatctattttaatgaggcttttaaacgcagagttctccaacgagtcaaagcataatactctgttgtttttcttatatacgatgttacgattttcttctttgaatggaataggtttttgaattagtttataattacaacataatagataaggaagtgtgcaaatagtacgcggaaaaaacataatagctcccctgttttcatccatggttttaagtaaatgatcactggcttctttagtcaatggatattcgaacattaaccgtttcatcatcattggacagaatccatatttcttaatgtaaagagtgatcaaatcattgtgtttattgtaccatcttgttgtaaatgtgtattcggttatcggatctgctcctttttctattaaagtatcgatgtcaatctcgtctaagaattcaactatatcgacatatttcatttgtatacacataaccattactaacgtagaatgtataggaagagatgtaacgggaacagggtttgttgattcgcaaactattctaatacataattcttctgttaatacgtcttgcacgtaatctattatagatgccaagatatctatataattattttgtaagatgatgttaactatgtgatctatataagtagtgtaataattcatgtattttgatatatgttccaactctgtctttgtgatgtctagtttcgtaatatctatagcatcctcaaaaaatatattcgcatatattcccaagtcttcagttctatcttctaaaaaatcttcaacgtatggaatataataatctattttacctcttctgatatcattaatgatatagtttttgacactatcttctgtcaattgattcttattcactatatctaagaaacggatagcgtccctaggacgaactactgccattaatatctctattatagcttctggacataattcatctattataccagaattaatgggaactattccgtatctatctaacatagttttaagaaagtcagaatctaagacttgatgttcatatattggttcatacatgaaatgatctctattgatgatagtgactatttcattctctgaaaattggtaactcattctatatatgctttccttgttgatgaaggatagaatatactcaatagaatttgtaccaacaaactgttctcttatgaatcgtatatcatcatctgaaataatcatgtaaggcatacatttaacaattagagacttgtctcctgttatcaatatactattcttgtgataatttatgtgtgaggcaaatttgtccacgttctttaattttgttatagtagatatcaaatccaatggagctacagttcttggcttaaacagatatagtttttctggaacaaattctacaacattattataaaggactttgggtaaataagtgggatgaaatcctattttaattaatgcgatagccttgtcctcgtgcagatatccaaacgcttttgtgatagtatggcattcattgtctagaaacgctctacgaatatctgtgacagatatcatctttagagaatatactagtcgcgttaatagtactacaatttgtattttttaatctatctcaataaaaaaattaatatgtatgattcaatgtataactaaactactaactgttattgataactagaatcagaatctaatgatgacgtacccaagaagtttatctactgccaatttagctgcattatttttagcatctcgtttagattttccatctgccttatcgaatactcttccgtcgatatctacacaggcataaaatgtaggagagttactaggcccaactgattcaatacgaaaagaccaatctctcttagttatttggcagtactcattaataacggtgacagggttagcatctttccaatcaataatttttttagccggaataacatcatcaaaagacttatgatcctctctcattgatttttcgcgggatacatcatctattatgacgtcagccataacatcagcatccggcttatccgcctccgttgtcataaaccaacgaggaggaatatcgtcggagctgtacaccatagcactacgttgaagatcgtacagagctttattaacttctcgcttctccatattaagttgtctagttagttgtgcagcagtagctccttcgattccaatggttttaatagcctcacacacaatctctgcgttagaacgttcgtcgatatagattttagacatttttagagagaactaacacaaccagcaataaaactgaacctactttatcatttttttattcatcatcctctggtggttcgtcgttcctatcaaatgtagctctgattaacccgtcatctataggtgatgctggttctggagattctggaggagatggattattatctggaagaatctctgttatttccttgttttcatgtatcgattgcgttgtaacattaagattgcgaaatgctctaaatttgggaggcttaaagtgttgtttgcaatctctacacgcgtgtctaactagtggaggttcgtcagctgctctagtttgaatcatcatcggcgtagtattcctacttttacagttaggacacggtgtattgtatttctcgtcgagaacgttaaaataatcgttgtaactcacatcctttattttatctatattgtattctactcctttcttaatgcattttataccgaataagagatagcgaaggaattctttttcggtgccgctagtacccttaatcatatcacatagtgttttatattccaaatttgtggcaatagacggtttatttctatacgatagtttgtttctggaatcctttgagtattctataccaatattattctttgattcgaatttagtttcttcgatattagattttgtattacctatattcttgatgtagtactttgatgatttttccatggcccattctattaagtcttccaagttggcatcatccacatattgtgatagtaattctcggatatcagtagcggctaccgccattgatgtttgttcattggatgagtaactactaatgtatacattttccatttataacacttatgtattaactttgttcatttatattttttcattattatgttgatattaacaaaagtgaatatatatatatgttaataattgtattgtggttatacggctacaattttataatgagtgaaagtcagtgtccgatgatcaatgacgatagctttactctgaaaagaaagtatcaaatcgatagtgcggagtcaacaataaaaatggataagaagaggataaagtttcagaatagagccaaaatggtaaaagaaataaatcagacaataagagcagcacaaactcattacgagacattgaaactaggatacataaaatttaagagaatgattaggactactactctagaagatatagcaccatctattccaaataatcagaaaacttataaactattctcggacatttcagccatcggcaaagcatcacagaatccgagtaagatggtatatgctctgctgctttacatgtttcccaatttgtttggagatgatcatagattcattcgttatagaatgcatccaatgagtaaaatcaaacacaagatcttctctcctttcaaacttaatcttattagaatattagtggaagaaagattctataataatgaatgcagatctaataaatggaaaataattggaacacaagttgataaaatgttgatagctgaatctgataaatatacaatagatgcaaggtataacctaaaacccatgtatagaatcaagggagaatctgaagaagataccctcttcatcaaacagatggtagaacaatgtgtgacatcccaggaattggtggaaaaagtgttgaagatactgtttagagatttgttcaagagtggagaatacaaagcgtacagatacgatgatgatgtagaaaatggatttattggattggatacactaaaattaaacattgttcatgatatagttgaaccatgtatgcctgttcgtaggccagtggctaagatactgtgtaaagaaatggtaaataaatactttgagaatccgctacatattattggtaagaatcttcaagagtgcattgactttgttagtgaataggcatttcatctttctccaatactaattcaaattgttaaattaataatggatagtataaatagtaaaaataattattagaataagagtgtagtatcatagataactctcttctataaaaatggattttattcgtagaaagtatcttatatacacagtagaaaataatatagattttttaaaggatgatacattaagtaaagtaaacaattttaccctcaatcatgtactagctctcaagtatctagttagcaattttcctcaacacgttattactaaggatgtattagctaataccaatttttttgttttcatacatatggtacgatgttgtaaagtgtacgaagcggttttacgacacgcatttgatgcacccacgttgtacgttaaagcattgactaagaattatttatcgtttagtaacgcaatacaatcgtacaaggaaaccgtgcataaactaacacaagatgaaaaatttttagaggttgccgaatacatggacgaattaggagaacttataggcgtaaattatgacttagttcttaatccattatttcacggaggggaacccatcaaagatatggaaatcatttttttaaaactgtttaagaaaacagacttcaaagttgttaaaaaattaagtgttataagattacttatttgggcatacctaagcaagaaagatacaggcatagagtttgcggataatgatagacaagatatatatactctatttcaacaaactggtagaatcgtccatagcaatctaacagaaacgtttagagattatatctttcccggagataagactagctattgggtgtggttaaacgaaagtatagctaatgatgcggatatcgttcttaatagacccgccattaccatgtatgataaaattcttagttatatatactctgagataaaacaaggacgcgttaataaaaacatgcttaagttagtttatatctttgagcctgaaaaagatatcagagaacttctgctagaaatcatatatgatattcctggagatatcctatctattattgatgcaaaaaacgacgattggaaaaaatattttattagtttttataaagctaattttattaacggtaatacatttattagtgatagaacgtttaacgaggacttattcagagttgttgttcaaatagatcccgaatatttcgataatgaacgaattatgtctttattctctacgagtgctgcggacattaaacgatttgatgagttagatattaataacagttatatatctaatataatttatgaggtgaacgatatcacattagatacaatggatgatatgaagaagtgtcaaatctttaacgaggatacgtcgtattatgttaaggaatacaatacatacctgtttttgcacgagtcggatcccatggtcatagagaacggaatactaaagaaactgtcatctataaaatccaagagtagacggctgaacttgtttagcaaaaacattttaaaatattatttagacggacaattggctcgtctaggtcttgtgttagatgattataaaggagacttgttagttaaaatgataaaccatcttaagtctgtggaggatgtatccgcattcgttcgattttctacagataaaaaccctagtattcttccatcgctaatcaaaactattttagctagttataatatttccatcatcgtcttatttcaaaggtttttgagagataatctatatcatgtagaagaattcttggataaaagcatccatctaaccaagacggataagaaatatatacttcaattgataagacacggtagatcatagaacagaccaaatatattattaataatttgtatatacatagatataattatcacacatttttgataaatgggaactgctgcaacaattcagactcccaccaaattaatgaataaagaaaatgcagaaatgattttggaaaaaattgttgatcatatagttatgtatattagtgacgaatcaagtgattcagaaaataatcctgaatatattgattttcgtaacagatacgaagactatagatctctcattataaaaagtgatcacgagtttgtaaagctatgtaaaaatcatgcggagaaaagttctccagaaacgcaacaaatgattatcaaacacatatacgaacaatatcttattccagtatctgaagtactattaaaacctataatgtccatgggtgacataattacatataacggatgtaaagacaatgaatggatgctagaacaactctctaccctaaactttaacaatctccgcacatggaactcatgtagcataggcaatgtaacgcgtctgttttatacattttttagttatctgatgaaagataaactaaatatataagtataatcccattctaatactttaacctgatgtattagcatcttattagaatattaacctaactaaaagacataacataaaaactcattacatagttgataaaaagcggtaggatataaatattatggctgccaccgttccgcgttttgacgacgtgtacaaaaatgcacaaagaagaattctagatcaagaaacattttttagtagaggtctaagtagaccgttaatgaaaaacacatatctatttgataattacgcgtatggatggataccagaaactgcaatttggagtagtagatacgcaaacttagatgcaagtgactattatcccatttcgttgggattacttaaaaagttcgagtttctcatgtctctatataaaggtcctattccagtatacgaagaaaaagtaaatactgaattcattgctaatggatctttctccggtagatacgtatcatatcttagaaagttttctgctcttccaacaaacgagtttattagttttttgttactgacttccattccaatctataatatcttgttctggtttaaaaatactcagtttgatattactaaacacacattattcagatacgtctatacagataatgccaaacacctggcgttggctaggtatatgtatcaaacaggagactataagcctttgtttagtcgtctcaaagagaattatatatttaccggtcccgttccaatatgtatcaaagatatagatcaccctaatcttagtagagcaagaagtccatccgattatgagacattagctaatattagtactatattgtactttaccaagtatgatccggtattaatgtttttattgttttacgtacctgggtattcaattactacaaaaattactccagccgtagaatatctaatggataaactgaatctaacaaagagcgacgtacaactgttgtaaattattttatgcttcgtaaaatgtaggttttgaaccaaacattctttcaaagaatgagatgcataaaactttattatccaatagattgactatttcggacgtcaatcgtttaaagtaaacttcgtaaaatattctttgatcactgccgagtttaaaacttctatcgataattgtttcatatgttttaatatttacaagttttttggtccatggtccattaggacaaatatatgcaaaataatatcgttctccaagttctatagtctctggattatttttattatattcagtaaccaaatacatattagggttatctgcggatttataatttgagtgatgcattcgactcaacataaataattctagaggagacgatctactatcaaattcggatcgtaaatctgtttctaaagaacggagaatatctatacatacctgattagaattcatccgtccttcagacaacatctcagacagtctggttttgtacatcttaatcatattcttatgaaacttggaaacatctcttctagtttcactagtacctttattaattctctcaggtacagattttgaattcgacgatgctgagtatttcatcgttgtatatttcttcttcgattgcataatcagattcttatataccgcctcaaactctattttaaaattattaaacaatactctattattaatcagtcgttctaactctttcgctatttctatagacttatctacatcttgactgtctatctctgtaaacacggagtcggtatctccatacacgctacgaaaacgaaatctgtaatctataggcaacgatgttttcacaatcggattaatatctctatcgtccatataaaatggattacttaatggattggcaaaccgtaacataccgttagataactctgctccatttagtaccgattctagatacaagatcattctacgtcctatggatgtgcaactcttagccgaagcgtatgagtatagagcactatttctaaatcccatcagaccatatactgagttggctactatcttgtacgtatattgcatggaatcatagatggccttttcagttgaactggtagcctgttttagcatctttttatatctggctctctctgccaaaaatgttcttaatagtctaggaatggttccttctatcgatctatcgaaaattgctatttcagagatgaggttcggtagtctaggttcacaatgaaccgtaatatatctaggaggtggatatttctgaagcaatagctgattatttatttcttcttccaatctattggtactaacaacgacaccgactaatgtttccggagatagatttccaaagatacacacattaggatacagactgttataatcaaagattaatacattattactaaacattttttgttttggagcaaataccttaccgccttcataaggaaacttttgttttgtttctgatctaactaagatagttttagtttccaacaatagctttaacagtggacccttgatgactgtactcgctctatattcgaataccatggattgaggaagcacatatgttgacgcacccgcgtctgtttttgtttctactccataatactcccacaaatactgacacaaacaagcatcatgaatacagtatctagccatatctaaagctatgtttagattataatccttatacatctgagctaaatcaacgtcatcctttccgaaagataatttatatgtatcattaggtaaagtaggacataatagtacgactttaaatccattttcccaaatatctttacgaattactttacatataatatcctcatcaacagtcacataattacctgtggttaaaacctttgcaaatgcagcggctttgcctttcgcgtctgtagtatcgtcaccgatgaacgtcatttctctaactcctctatttaatactttacccatgcaactgaacgcgttcttggatatagaatccaatttgtacgaatccaatttttcaaatttttgaatgaatgaatatagatcgaaaaatatagttccattattgttattaacgtgaaacgtagtattggccatgccgcctactcccttatgactagactgatttctctcataaatacagagatgtacagcttcctttttgtccggagatctaaagataattttctctcctgttaataactctagacgattagtaatatatctcagatcaaagttatgtccgttaaaggtaacgacgtagtcgaacgttagttccaacaattgtttagctattcgtaacaaaactatttcagaacatagaactagttctcgttcgtaatccatttccattagtgactgtatcctcaaacatcctctatcgacggcttcttgtatttcctgttccgttaacatctcttcattaatgagcgtaaacaataatcgtttaccacttaaatcgatataacagtaacttgtatgcgagattgggttaataaatacagaaggaaacttcttatcgaagtgacactctatatctagaaataagtacgatcttgggatatcgaatctaggtatttttttagcgaaacagttacgtggatcgtcacaatgataacatccattgttaatctttgtcaaatattgctcgtccaacgagtaacatccgtctggagatatcccgttagaaatataaaaccaactaatattgagaaattcatccatggtggcattttgtatgctgcgtttctttggctcttctatcaaccacatatctgcgacggagcattttctatctttaatatctagattataacttattgtctcgtcaatgtctatagttctcatctttcccaacggcctcgcattaaatggaggaggagacaatgactgatatatttcgtccgtcactacgtaataaaagtaatgaggaaatcgtataaatacggtctcaccatttcgacatctggatttcagatataaaaatctgttttcaccgtgactttcaaaccaattaatgcaccgaacatccatttatagaatttagaaatatattttcatttaaatgaatcccaaacattggggaagagccgtatggaccattatttttatagtactttcgcaagcgggtttagacggcaacatagaagcgtgtaaacgaaaactatatactatagttagcactcttccatgtcctgcatgtagacggcacgcgactatcgctatagaggacaataatgtcatgtctagcgatgatctgaattatatttattattttttcatcagattatttaacaatttggcatctgatcccaaatacgcgatcgatgtgacaaaggttaaccctttataaacttaacccattataaaacttatgattagtcacaactgaaataaccgcgtgattattttttggtataattctacacggcatggtttctgtgactatgaattcaacccccgttacattagtgaaatctttaacaaacagcaagggttcgtcaaagacataaaactcattgtttacaatcgaaatagaccccctatcacacttaaaataaaaaatatccttatcctttaccaccaaataaaattctgattggtcaatgtgaatgtattcacttaacagttccacaaatttatttattaactccgaggcacatacatcgtcggtattttttatggcaaactttactcttccagcatccgtttctaaaaaaatattaacgagttccatttatatcatccaatattattgaaatgacgttgatggacagatgatacaaataagaaggtacggtacctttgtccaccatctcctccaattcatgctctattttgtcattaactttaatgtatgaaaacagtacgccacatgcttccatgacagtgtgtaacactttggatacaaaatgtttgacattagtataattgttcaagactgtcaatctataatagatagtagctataatatattctatgatggtattgaagaagatgacaaccttggcatattgatcatttaacacagacatggtatcaacagatagcttgaatgaaagagaatcagtaattggaataagcgtcttctcgatagagtgtccgtataccaacatgtctgatattttgatgtattccattaaattatttagttttttctttttattctcgttaaacagcatttctgtcaacggaccccaacatcgttgaccgattaagttttgattgatttttccgtgtaaggcgtatctagtcagatcgtatagcctatccaataatccatcatctgtgcgtagatcacatcgtacactttttaattctctatagaagagcgacagacatctggagcaattacagacagcaatttctttattctctacagatgtaagatacttgaagacattcctatgatgatgcagaattttggataacacggtattgatggtatctgttaccataattcctttgatggctgatagtgtcagagcacaagatttccaatctttgacaatttttagcaccattatctttgttttgatatctatatcagacagcatggtgcgtctgacaacacagggattaagacggaaagatgaaatgattctctcaacatcttcaatagataccttgctattttttctggcattatctatatgtgcgagaatatcctctagagaatcagtatcctttttgatgatagtggatctcaatgacatgggacgtttaaaccttcttattctatcaccagattgcatggtgatttgtcttctttcttttatcataatgtaatctctaaattcatcggcaaattgtctatatctaaaatcataatatgagatgtttacctctacaaatatctgttcgtccaatgttagagtatttacatcagttttgtattccaaattaaacatggcaacggatttaattttatattcctctattaagtcctcgtcgataataacagaatgtagataatcatttaatccatcgtacatggttggaagatgcttgttgacaaaatctttaattgtcttgatgaaggtgggactatatctaacatcttgattaataaaatttataacattgtccataggatactttgtaactagttttatacacatctcttcatcggtaagtttagacagaatatcgtgaacaggtggtatattatattcatcagatatacgaagaacaatgtccaaatctatattgtttaatatattatatagatgtagcgtagctcctacaggaatatctttaactaagtcaatgatttcatcaaccgttagatctattttaaagttaatcatataggcattgatttttaaaaggtatgtagccttgactacattctcattaattaaccattccaagtcactgtgtgtaagaagattatattctatcataagcttgactacatttggtcccgataccattaaagaattcttatgatataaggaaacagcttttaggtactcatctactctacaagaattttggagagccttaacgatatcagtgacgtttattatttcaggaggaaaaaacctaacattgagaatatcggaattaatagcttccagatacagtgattttggcaatagtccgtgtaatccataatccagtaacacgagctggtgcttgctagacaccttttcaatgtttaatttttttgaaataagctttgataaagccttcctcgcaaattccggatacatgaacatgtcggcgacatgattaagtattgttttttcattattttctcaataccccaatagatgatagaatatcacccaatgcgtccatgttgtctatttccaacaggtcgctatatccaccaatagaagtttttccaaaaaagattctaggaacagttctaccaccagtaatttgttcaaaatagtcacgcaattcattttcgggtttaaattctttaatatcgacaatttcatacgctcctcttttgaaactaaacttatttagaatatccagtgcatttctacaaaaaggacatgtatacttgacaaaaattgtcactttgttattggccaacctttgttgtacaaattcctcggccattttaatatttaagtgatataaaactatctcgacttatttaactctttagtcgagatatatggacgcagatagctatatgatagccaactacagaaggcaaacgctataaaaaacataattacgacgagcatatttataaatatttttattcagcattacttgatatagtaatattaggcacagtcaaacattcaaccactctcgatacattaactctctcattttctttaacaaattctgcaatatcttcgtaaaaagattcttgaaactttttagaatatctatcgactctagatgaaatagcgttcgtcaacatactatgttttgtatacataaaggcgcccattttaacagtttctagtgacaaaatgctagcgatcctaggatcctttagaatcacatagattgacgattcgtctctcttagtaactctagtaaaataatcatacaatctagtacgcgaaataatattatccttgacttgaggagatctaaacaatctagttttgagaacatcgataagttcatcgggaatgacatacatactatctttaatagaactcttttcatccagttgaatggattcgtccttaaccaactgattaatgagatcttctattttatcattttccagatgatatgtatgtccattaaagttaaattgtgtagcgcttctttttagtctagcagccaatactttaacatcactaatatcgatatacaaaggagatgatttatctatggtattaagaattcgtttttcgacatccgtcaaaaccaattcctttttgcctgtatcatccagttttccatcctttgtaaagaaattattttctactagactattaataagactgataaggattcctccataattgcacaatccaaactttttcacaaaactagactttacaagatctacaggaatgcgtacttcaggttttttagcttgtgattttttcttttgcggacattttcttgtgaccaactcatctaccatttcattgattttagcagtgaaataagctttcaatgcacgggcactgatactattgaaaacgagttgatcttcaaattccgccatttaagttcaccaaacaacttttaaatacaaatatatcaatagtagtagaataagaactataaaaaaaataataattaaccaataccaaccccaacaaccggtattattagttgatgtgactgttttctcatcacttagaacagatttaacaatttctataaagtctgtcaaatcatcttccggagaccccataaatacaccaaatatagcggcgtacaacttatccatttatacattgaatattggcttttctttatcgctatcttcatcatattcatcatcaatatcaacaagtcccagattacgagccagatcttcttctacattttcagtcattgatacacgttcactatctccagagagtccgataacgttagccaccacttctctatcaatgattagtttcttgagcgcgaaagtaatttttgtttccgttccggatctatagaagacgataggtgtgataattgccttggccaattgtctttctcttttactgagtgattctagttcaccttctatagatctgagaatggatgattctccagtcgaaacatattctaccatggatccgtttaatttgttgatgaagatggattcatccttaaatgttttctctgtaatagtttccaccgaaagactatgcaaagaatttggaatgcgttccttgtgcttaatgtttccatagacggcttctagaagttgatacaacataggactagccgcggtaacttttatttttagaaagtatccatcgcttctatcttgtttagatttatttttataaagtttagtctctccttccaacataataaaagtggaagtcatttgactagataaactatcagtaagttttatagagatagacgaacaattagcgtattgagaagcatttagtgtaacgtattcgatacattttgcattagatttactaatcgattttgcatactctataacacccgcacaagtctgtagagaatcgctagatgcagtaggtcttggtgaagtttcaactctcttcttgattaccttactcatgattaaacctaaataattgtactttgtaatataatgatatatattttcactttatctcatttgagaataaaaatgtttttgtttaaccactgcatgatgtacagatttcggaatcgcaaaccaccagtggttttattttatccttgtccaatgtgaattgaatgggagcggatgcgggtttcgtacgtagatagtacattcccgtttttagaccgagactccatccgtaaaaatgcatactcgttagtttggaataactcggatctgctatatggatattcatagattgactttgatcgatgaaggctcccctgtctgcagccatttttatgatcgtcttttgtggaatttcccaaatagttttataaactcgcttaatatcttctggaaggtttgtattctgaatggatccaccatctgccataatcctattcttgatctcatcattccataattttctctcggttaaaactctaaggagatgcggattaactacttgaaattctccagacaatactctccgagtgtaaatattactggtatacggttccaccgactcattatttcccaaaatttgagcagttgatgcagtcggcataggtgccaccaataaactatttctaagaccgtatgttctgattttatcttttagaggttcccaattccaaagatccgacggtacaacattccaaagatcatattgtagaataccgttactggcgtacgatcctacatatgtatcgtatggtccttccttctcagctagttcacaactcgcctctaatgcaccgtaataaatggtttcgaagatcttcttatttagatcttgtgcttccaggctatcaaatggataatttaagagaataaacgcgtccgctaatccttgaacaccaataccgataggtctatgtctcttattagagatttcagcttctggaataggataataattaatatctataattttattgagatttctgacaattactttgaccacatccttcagtttgagaaaatcaaatcgcccatctattacaaacatgttcaaggcaacagatgccagattacaaacggctacctcattagcatccgcatattgtattatctcagtgcaaagattactacacttgatagttcctaaattttgttgattactctttttgttacacgcatccttataaagaatgaatggagtaccagtttcaatctgagattctataatcgctttccagacgactcgagcctttattatagatttgtatctcctttctctttcgtatagtgtatacaatcgttcgaactcgtctccccaaacattgtccaatccaggacattcatccggacacatcaacgaccactctccgtcatccttcactcgtttcataaagagatcaggaatccaaagagctataaatagatctctggttctatgttcctcgtttcctgtattctttttaagatcgaggaacgccataatatcagaatgccacggttccaagtatatggccataactccaggccgtttgtttcctccctgatctatgtatctagcggtgttattataaactctcaacattggaataataccgtttgatataccattggtaccggagatatagcttccactggcacgaatattactaattgatagacctattccccctgccattttagagattaatgcgcatcgttttaacgtgtcatagataccctctatgctatcatcgatcatgttaagtagaaaacagctagacatttggtgacgactagttcccgcattaaataaggtaggagaagcgtgcgtaaaccatttttcagaaagtagattgtacgtctcaatagctgagtctatatcccattgatgaattcctactgcgacacgcattaacatgtgctgaggtctttcaacgatcttgttgtttattttcaacaagtaggatttttccaaagttttaaaaccaaaatagttgtatgaaaagtctcgttcgtaaataataaccgagttgagtttatccttatatttgttaactatatccatggtgatacttgaaataatcggagaatgtttcccatttttaggattaacatagttgaataaatcctccatcacttcactaaatagtttttttgtttccttgtgtagatttgatacggctattctggcggctagaatggcataatccggatgttgtgtagtacaagtggctgctatttcggctgccagagtgtccaattctaccgttgttactccattatatattccttgaataaccttcatagctattttaataggatctatatgatccgtgtttaagccataacataattttctaatacgagacgtgattttatcaaacatgacattttccttgtatccatttcgtttaatgacaaacatttttgttggtgtaataaaaaaattatttaacttttcattaatagggatttgacgtatgtagcgtacaaaatgatcgttcctggtatatagataaagagtcctatatatttgaaaatcgttacggctcgattaaactttaatgattgcatagtgaatatatcattaggatttaactccttgactatcatggcggcgccagaaattaccatcaaaagcattaatacagttatgccgatcgcagttaaaacggttatagcatccaccatttatatctaaaaattagatcaaagaatatgtgacaaagtcctagttgtatactgagaattgacgaaacaatgtttcttacatatttttttcttattagtaactgacttaatagtaggaactggaaagctagacttgattattctataagtatagatacccttccagataatgttctctttgataaaagttccagaaaatgtagaattttttaaaaagttatcttttgctattaccaagattgtgtttagacgcttattattaatatgagtgatgaaatccacaccgcctctagatatcgcctttatttccacattagatggtaaatccaatagtgaaactatctttttaggaatgtatggactcgcgtttagaggagtgaacgtcttgggcgtcggaaaggatgattcgtcaaacgaataaacaatttcacaaatggatgttaatgtattagtaggaaattttttgacgctagtggaattgaagattctaatggatgatgttctacctatttcatccgataacatgttaatttccgacaccaacggttttaatatttcgatgatatacggtagtctctctttcggacttatatagcttattccacaatacgagtcattatatactccaaaaaacaaaataactagtataaaatctgtatcgaatgggaaaaacgaaattatcgacataggtatagaatccggaacattgaacgtattaatacttaattctttttctgtggtaagtaccgataggttattgacattgtatggttttaaatattctataacttgagacttgatagatattagtgatgaattgaaaattatttttatcaccacgtgtgtttcaggatcatcgtcgacgcccgtcaaccaaccgaatggagtaaaataaatatcattaatatatgctctagatattagtatttttattaatcctttgattatcatcttctcgtaggcgaatgattccatgatcaagagtgatttgagaacatcctccggagtattaatgggcttagtaaacagtccatcgttgcaataataaaagttatccaagttaaaggatattatgcattcgtttaaagatatcacctcatctgacggagacaattttttggtaggttttagagactttgaagctacttgtttaacaaagttattcatcgtcgtctactattctatttaattttgtagttaatttatcacatatcacattaattgactttttggtccatttttccatacgtttatattcttttaatcctgcgttatccgtttccgttatatccagggatagatcttgcaagttaaatagaatgctcttaaataatgtcattttcttatccgctaaaaatttaaagaatgtataaacctttttcagagatttgaaactcttaggtggtgtcctagtacacaatatcataaacaaactaataaacattccacattcagattccaacagctgattaacttccacattaatacagcctattttcgctccaaatgtacattcgaaaaatctgaataaaacatcgatgtcacaatttgtattatccaatacagaatgtttgtgattcgtgttaaaaccatcggagaaggaatagaaataaaaattattatagtggtggaattcagttggaatattgcctccggagtcataaaaggatactaaacattgttttttatcataaattacacatttccaatgagacaaataacaaaatccaaacattacaaatctagaggtagaacttttaattttgtctttaagtatatacgataagatatgtttattcataaacgcgtcaaatttttcatgaatcgctaaggagtttaagaatctcatgtcaaattgtcctatataatccacttcggatccataagcaaactgagagactaagttcttaatacttcgattgctcatccaggctcctctctcaggctctattttcatcttgacgacctttggattttcaccagtatgtattcctttacgtgataaatcatcgattttcaaatccatttgtgagaagtctatcgccttagatactttttcccgtagtcgaggtttaaaaaaatacgctaacggtatactagtaggtaactcaaagacatcatatatagaatggtaacgcgtctttaactcgtcggttaactctttcttttgatcgagttcgtcgctactattgggtctgctcaggtgccccgactctactagttccaacatcataccgataggaatacaagacactttgccagcggttgtagatttatcatatttctccactacatatccgttacaatttgttaaaaatttagatacatctatattgctacataatccagctagtgaatatatatgacataataaattggtaaatcctagttctggtattttactaattactaaatctgtatatctttccatttatcatggaaaagaatttaccagatatcttcttttttccaaactgcgttaatgtattctcttacaaatattcacaagatgaattcagtaatatgagtaaaacggaacgtgatagtttctcattggccgtgtttccagttataaaacatagatggcataacgcacacgttgtaaaacataaaggaatatacaaagttagtacagaagcacgtggaaaaaaagtatctcctccatcactaggaaaacccgcacacataaacctaaccgcgaagcaatatatatacagtgaacacacaataagctttgaatgttatagttttctaaaatgtataacaaatacagaaatcaattcgttcgatgagtatatattaagaggactattagaagctggtaatagtttacagatattttccaattccgtaggtaaacgaacagatactataggtgtactagggaataagtatccatttagcaaaattccattggcctcattaactcctaaagcacaacgagagatattttcagcgtggatttctcatagacctgtagttttaactggaggaactggagtgggtaagacgtcacaggtacccaagttattgctttggtttaattatttatttggtggattctctactctagataaaatcactgactttcacgaaagaccagtcattctatctcttcctaggatagctttagttagattgcatagcaataccattttaaaatcattgggatttaaggtactagatggatctcctatttctttacggtacggatctataccggaagaattaataaacaaacaaccaaaaaaatatggaattgtattttctacccataagttatctctaacaaaactatttagttatggcactcttattatagacgaagttcatgagcatgatcaaataggagatattattatagcagtagcgagaaagcatcatacgaaaatagattctatgtttttaatgactgccacgttagaggatgacagggaacggctaaaagtatttttacctaatcccgcatttatacatattcctggagatacactgtttaaaattagcgaggtatttattcataataagataaatccatcttccagaatggcatacatagaagaagaaaagagaaatttagttactgctatacagatgtatactcctcctgatggatcatccggtatagtctttgtggcatccgttgcacagtgtcacgaatataaatcatatttagaaaaaagattaccgtatgatatgtatattattcatggtaaggtcttagatatagacgaaatattagaaaaagtgtattcatcacctaatgtatcgataattatttctactccttatttggaatccagcgttactatacgcaatgttacacacatttatgatatgggtagagtttttgtccccgctccttttggaggatcgcaacaatttatttctaaatctatgagagatcaacgaaaaggaagagtaggaagagttaatcctggtacatacgtctatttctatgatctgtcttatatgaagtctatacagcgaatagattcagaatttctacataattatatattgtacgctaataagtttaatctaacactccccgaagatttgtttataatccctacaaatttggatattctatggcgtacaaaggaatatatagactcgttcgatattagtacagaaacatggaataaattattatccaattattatatgaagatgatagagtatgctaaactttatgtactaagtcctattctcgctgaggagttggataactttgagaggacgggagaattaactagtattgtacgagaagccattttatctctaaatttacaaattaagattttaaattttaaacataaagatgatgatacgtatatacacttttgtaaaatattattcggtgtctataacggaacaaacgctactatatattatcatagacctctaacgggatatatgaatatgatttcagatactatatttgttcctgtagataataactaaaaatcaaactctaatgaccacatctttttttagagatgaaaaattttccacatctccttttgtagacacgactaaacattttgcagaaaaaagtttattagtgtttagataatcgtatacttcatcagtgtagatagtaaatgtgaacagataaaaggtattcttgctcaatagattggtaaattccatagaatatattaatcctttcttcttgagatcccacatcatttcaaccagagacgttttatccaatgatttacctcgtactataccacatacaaaactagattttgcagtgacgtcgtacctggtattcctaccaaacaaaattttacttttagttcttttagaaaattctaaggtagaatctctatttgccaatatgtcatctatggaattaccactagcaaaaaatgatagaaatatatattgatacatcgcagctggttttgatctactatactttaaaaacgaatcagattccataattgcctgtatatcatcagctgaaaaactatgttttacacgtattccttcggcatttctttttaatgatatatcttgtttagacaatgataaagttatcatgtccatgagagacgcgtctccgtatcgtataaatatttcattagatgttagacgcttcattaggggtatacttctataaggtttcttaatcagtccatcattggttgcgtcaagaactactatcggatgttgttgggtatctctagtgttacacatggccttactaaagtttgggtaaataactatgatatctctattaattatagatgcatatatttcattcgtcaaggatattagtatcgacttgctatcgtcattaatacgtgtaatgtaatcatataaatcatgcgatagccaaggaaaatttaaatagatgttcatcatataatcgtcgctataattcatattaatacgttgacattgactaatttgtaatatagcctcgccacgaagaaagctctcgtattcagtttcatcgataaaggataccgttaaatataactggttgccgatagtctcatagtctattaagtggtaagtttcgtacaaatacagaatccctaaaatattatctaatgttggattaatctttaccataactgtataaaatggagacggagtcataactattttaccgtttgtacttactggaatagatgaaggaataatctccggacatgctggtaaagacccaaatgtctgtttgaagaaatccaatgttccaggtcctaatctcttaacaaaaattacgatattcgatcccgatatcctttgcattctatttaccagcatatcacgaactatattaagattatctatcatgtctattctcccaccgttatataaatcgcctccgctaagaaacgttagtatatccatacaatggaatacttcatttctaaaatagtattcgttttctaattctttaatgtgaaatcgtatactagaaagggaaaaattatctttgagttttccgttagaaaagaaccacgaaactaatgttctgattgcgtccgattccgttgctgaattaatggatttacaccaaaaactcatataacttctagatgtagaagcattcgctaaaaaattagtagaatcaaaggatataagtagatgttccaacaagtgagcaattcccaagatttcatctatatcattctcgaatccgaaattagaaattcccaagtagatatcctttttcatccgatcgttgatgaaaatacgaactttattcggtaagacaatcatttactaaggagtaaaataggaagtaatgttcgtatgtcgttatcatcgtataaattaaaggtgtgttttttaccattaagtgacattataattttaccaatattggaattataatataggtgtatttgcgcactcgcgacggttgatgcatcggtaaatatagctgtatctaatgttctagtcggtatttcatcatttcgctgtctaataatagcgttttctctatctgtttccattacagctgcctgaagtttattggtcggataatatgtaaaataataagaaatacatacgaataacaaaaataaaataagatataataaagatgccatttagagatctaattttgtttaacttgtccaaattcctacttacagaagatgaggaatcgttggagatagtgtcttccttatgtagaggatttgaaatatcttataatgacttgataacttactttccagataggaaataccataaatatatttataaagtatttgaacatgtagatttatcggaggaattaagtatggaattccatgatacaactctgagagatttagtctatcttagattgtacaagtattccaagtgtatacggccgtgttataaattaggagataatctaaaaggcatagttgttataaaggacaggaatatttatattagggaagcaaatgatgacttgatagaatatctcctcaaggaatacactcctcagatttatacatattctaatgagcgcgtccccataactggttcaaaattaattctttgtggattttctcaagttacatttatggcgtatacaacgtcgcatataacaacaaataaaaaggtagatgttctcgtttccaaaaaatgtatagatgaactagtcgatccaataaattatcaaatacttcaaaatttatttgataaaggaagcggaacaataaacaaaatactcaggaagatattttattcggtaacaggtggccaaactccataggtagctttttctatttcggattttagaatttccaaattcaccagcgatttatcggttttggtgaaatccaaggatttattaatgtccacaaatgccatttgttttgtctgtggattgtatttgaaaatggaaacgatgtagttagatagatgcgctgcgaagtttcctattagggttccgcgcttcacgtcacccagcatacttgaatcaccatcctttaaaaaaaatgataagatatcaacatggagtatatcatactcggattttaattcttctactgcatcactgacattttcacaaatactacaatacggtttaccgaaaataatcagtacgttcttcatttatgggtatcaaaaacttaaaatcgttactgctggaaaataaatcactgacgatattagatgataatttatacaaagtatacaatggaatatttgtggatacaatgagtatttatatagccgtcgccaattgtgtcagaaacttagaagagttaactacggtattcataaaatacgtaaacggatgggtaaaaaagggagggcatgtaaccctttttatcgatagaggaagtataaaaattaaacaagacgttagagacaagagacgtaaatattctaaattaaccaaggacagaaaaatgttagaattagaaaagtgtacatccgaaatacaaaatgttaccggatttatggaagaagaaataaaggcagaaatgcaattaaaaatcgataaactcacatttcaaatatatttatctgattctgataacataaaaatatcattgaatgagatactaacacatttcaacaataatgagaatgttacattattttattgtgatgaacgagacgcagaattcgttatgtgtctcgaggctaaaacacatttctctaccacaggagaatggccgttgataataagtaccgatcaggatactatgctatttgcatctgctgataatcatcctaagatgataaaaaacttaactcaactgtttaaatttgttccctcggcagaggataactatttagcaaaattaacggcgttagtgaatggatgtgatttctttcctggactctatggggcatctataacacccaccaacttaaacaaaatacaattgtttagtgattttacaatcgataatatagtcactagtttggcaattaaaaattattatagaaagactaactctaccgtagacgtgcgtaatattgttacgtttataaacgattacgctaatttagacgatgtctactcgtatattcctccttgtcaatgcactgttcaagaatttatattttccgcattagatgaaaaatggaatgaatttaaatcatcttatttagaaagcgtgccgttaccctgccaattaatgtacgcgttagaaccacgcaaggagattgatgtttcagaagttaaaactttatcatcttatatagatttcgaaaatactaaatcagatatcgatgttataaaatctatatcctcgatcttcggatattctaacgaaaactgtaacacgatagtattcggcatctataaggataatttactactgagtataaataattcattttactttaacgatagtctgttaataaccaatactaaaagtgataatataataaatataggttactagattaaaaatggtgttccaactcgtgtgctctacatgcggtaaagatatttctcacgaacgatataaattgattatacgaaaaaaatcattaaaggatgtactcgtcagtgtaaagaacgaatgttgtaggttaaaattatctacacaaatagaacctcaacgtaacttaacagtgcaacctctattggatataaactaatatggatccggttaattttatcaagacatatgcgcctagaggttctattatttttattaattataccatgtcattaacaagtcatttgaatccatcgatagaaaaacatgtgggtatttattatggtacgttattatcggaacacttggtagttgaatctacctatagaaaaggagttcgaatagtcccattggatagtttttttgaaggatatcttagtgcaaaagtatacatgttagagaatattcaagttatgaaaatagcagctgatacgtcattaactttattgggtattccgtatggatttggtcataatagaatgtattgttttaaattggtagctgactgttataaaaatgccggtattgatacatcgtctaaacgaatattgggcaaagatatttttctgagccaaaacttcacagacgataatagatggataaagatatatgattctaataatttaacattttggcaaattgattaccttaaagggtgagttaatatgcataactactcctccgttgttttttccctcgttctttttcttaacgttgtttgccatcactctcataatgtaaagatattctaaaatggtaaacttttgcatatcggacgcagaaattggtataaatgttgtaattgtattatttcccgtcaatggactagtcacagctccatcagttttatatcctttagagtatttctcactcgtgtctaacattctagagcattccatgatctgtttatcgttgatattggccggaaagatagattttttattttttattatattactattggcaattgtagatataacttctggtaaatatttttctaccttttcaatctcttctattttcaagccggctatatattctgctatattgttgctagtatcaataccttttctggctaagaagtcatatgtggtattcactatatcagttttaactggtagttccattagcctttccacttctgcagaataatcagaaattggttctttaccagaaaatccagctactataataggctcaccgatgatcattggcaaaatcctatattgtaccagattaatgagagcatatttcatttccaataattctgctagttcttgagacattgatttatttgatgaatctagttggttctctagatactctaccatttctgccgcatacaataacttgttagataaaatcagggttatcaaagtgtttagcgtggctagaatagtgggcttgcatgtattaaagaatgcggtagtatgagtaaaccgttttaacgaattatatagtctccagaaatctgtggcgttacatacatgagccgaatgacatcgaagattgtccaatatttttaatagctgctctttgtccattatttctatatttgactcgcaacaattgtagataccattaatcaccgattcctttttcgatgccggacaatagcacaattgtttagctttggactctatgtattcagaattaatagatatatctctcaatacagattgcactatacattttgaaactatgtcaaaaattgtagaacgacgctgttctgcagccatttaactttaaataatttacaaaaatttaaaatgagcatccgtataaaaatcgataaactgcgccaaattgtggcatatttttcagagttcagtgaagaagtatctataaatgtagactcgacggatgagttaatgtatatttttgccgccttgggcggatctgtaaacatttgggccattatacctctcagtgcatcagtgttttaccgaggagccgaaaatattgtgtttaatcttcctgtgtccaaggtaaaatcgtgtttgtgtagttttcacaatgatgccatcatagatatagaacctgatctggaaaataatctagtaaaactttctagttatcatgtagtaagtgtcgattgtaacaaggaactgatgcctattaggacagatactactatttgtctaagtatagatcaaaagaaatcttacgtgtttaattttcacaagtatgaagaaaaatgttgtggtagaaccgtcattcattaagtgacattataattttaccaatattggaattataatataggtgtatttgcgcacttgcgacggttgatgcatcggtaaatatagctgtatctaatgttctagtcggtatttcatcatttcgctgtctaataatagcgttttctctatctgtttccattacagctgcctgaagtttattggtcggataatatgtaaaataataagaaatacatacgaataacaaaaataaaataagatataataaagatgccatttagagatctaattttgtttaacttgtccaaattcctacttacagaagatgaggaatcgttggagatagtgtcttccttatgtagaggatttgaaatatcttataatgacttgataacttactttccagataggaaataccataaatatatttataaagtatttgaacatgtagatttatcggaggaattaagtatggaattccatgatacaactctgagagatttagtctatcttagattgtacaagtattccaagtgtatacggccgtgttataaattaggagataatctaaaaggcatagttgttataaaggacaggaatatttatattagggaagcaaatgatgacttgatagaatatctcctcaaggaatacactcctcagatttatacatattctaatgagcgcgtccccataactggttcaaaattaattctttgtggattttctcaagttacatttatggcgtatacaacgtcgcatataacaacaaataaaaaggtagatgttctcgtttccaaaaaatgtatagatgaactagtcgatccaataaattatcaaatacttcaaaatttatttgataaaggaagcggaacaataaacaaaatactcaggaagatattttattcggtaacaggtggccaaactccataggtagctttttctatttcggattttagaatttccaaattcaccagcgatttatcggttttggtgaaatccaaggatttattaatgtccacaaatgccatttgttttgtctgtggattgtatttgaaaatggaaacgatgtagttagatagatgcgctgcgaagtttcctattagggttccgcgcttcacgtcacccagcatacttgaatcaccatcctttaaaaaaaatgataagatatcaacatggagtatatcatactcggattttaattcttctactgcatcactgacattttcacaaatactacaatacggtttaccgaaaataatcagtacgttcttcatttatgggtatcaaaaacttaaaatcgttactgctggaaaataaatcactgacgatattagatgataatttatacaaagtatacaatggaatatttgtggatacaatgagtatttatatagccgtcgccaattgtgtcagaaacttagaagagttaactacggtattcataaaatacgtaaacggatgggtaaaaaagggagggcatgtaaccctttttatcgatagaggaagtataaaaattaaacaagacgttagagacaagagacgtaaatattctaaattaaccaaggacagaaaaatgctagaattagaaaagtgtacatccgaaatacaaaatgttaccggatttatggaagaagaaataaaggcagaaatgcaattaaaaatcgataaactcacatttcaaatatatttatctgattctgataacataaaaatatcattgaatgagatactaacacatttcaacaataatgagaatgttacattattttattgtgatgaacgagacgcagaattcgttatgtgtctcgaggctaaaacacatttctctaccacaggagaatggccgttgataataagtaccgatcaggatactatgctatttgcatctgctgataatcatcctaagatgataaaaaacttaactcaactgtttaaatatgttccatctgcagaggataactatttagcaaaattaacggcgttagtgaatggatgtgatttctttcctggactctatggggcatctataacacccaccaacttaaacaaaatacaattgtttagtgattttacaatcgataatatagtcactagtttggcaattaaaaattattatagaaagactaactctaccgtagacgtgcgtaatattgttacgtttataaacgattacgctaatttagacgatgtctactcgtatgttcctccttgtcaatgcactgttcaagaatttatattttccgcattagatgaaaaatggaatgaatttaaatcatcttatttagagaccgtgccgttaccctgtcaattaatgtacgcgttagaaccacgtaaggagattgatgtttcagaagttaaaactttatcatcttatatagatttcgaaaatactaaatcagatatcgatgttataaaatctatatcctcgatcttcggatattctaacgaaaactgtaacacgatagtattcggcatctataaggataatttactactgagtataaataattcattttactttaacgatagtctgttaataaccaatactaaaagtgataatataataaatataggttactagattaaaaatggtgttccaactcgtgtgctctacatgcggtaaagatatttctcacgaacgatataaattgattatacgaaaaaaatcattaaaggatgtactcgtcagtgtaaagaacgaatgttgtaggttaaaattatctacacaaatagaacctcaacgtaacttaacagtgcaacctctattggatataaactaatatggatccggttaattttatcaagacatatgcgcctagaggttctattatttttattaattataccatgtcattaacaagtcatttgaatccatcgatagaaaaacatgtgggtatttattatggtacgttattatcggaacacttggtagttgaatctacctatagaaaaggagttcgaatagtcccattggatagtttttttgaaggatatcttagtgcaaaagtatacatgttagagaatattcaagttatgaaaatagcagctgatacgtcattaactttattgggtattccgtatggatttggtcataatagaatgtattgttttaaattggtagctgactgttataaaaatgccggtattgatacatcgtctaaacgaatattgggcaaagatatttttctgagccaaaacttcacagacgataatagatggataaagatatatgattctaataatttaacattttggcaaattgattaccttaaagggtgagttaatatgcataactactcctccgttgttttttccctcgttctttttcttaacgttgtttgccatcactctcataatgtaaagatattctaaaatggtaaacttttgcatatcggacgcagaaattggtataaatgttgtaattgtattatttccatattattatgaagactcctggtaatactgatggcgttttccagggaatattctatgactgaatgttctcaagaactacaaaagttttctttcaaaatagctatctcgtctctcaacaaactacgaggattcaaaaagagagtcaatgtttttgaaactagaatcgtaatggataatgacgataacattttaggaatgttgttttcggatagagttcaatcctttaagatcaacatctttatggcgtttttagattaatactttcaatgagataaatatgggtggcggagtaagtgttgagctccctaaacgggatccgcacccgggagtacccactgatgagatgttattaaacgtggataaaatgcatgacgtgatagctcccgctaagcttttagaatatgtgcatataggaccactagcaaaagataaagaggataaagtaaagaaaagatatccagagtttagattagtcaacacaggacccggtggtctttcggcattgttaagacaatcgtataatggaaccgcacccaattgctgtcgcacttttaatcgtactcattattggaagaaggatggaaagatatcagataagtatgaagagggtgcagtattagaatcgtgttggccagacgttcacgacactggaaaatgcgatgttgatttattcgactggtgtcagggggatacgttcgatagaaacatatgccatcagtggatcggttcagcctttaataggagtaatagaactgtagagggtcaacaatcgttaataaatctgtataataagatgcaaacattatgtagtaaagatgctagtgtaccaatatgcgaatcatttttgcattatttacgcgcacacaatacagaagatagcaaagagatgatcgattatattctaagacaacagtctgcggactttaaacagaaatatatgagatgtagttatcccactagagataagttagaagagtcattaaaatatgcggaacctcgagaatgttgggatccagagtgttcgaatgccaatgttaatttcttactaacacgtaattataataatttaggactttgcaatattgtacgatgtaataccagcgtgaacaacttacagatggataaaacttcctcattaagattgtcatgtggattaagcaatagtgatagattttctactgttcccgtcaatagagcaaaagtagttcaacataatattaaacactcgttcgacctaaaattgcatttgatcagtttattatctctcttggtaatatggatactaattgtagctatttaaatgggtgccgcggcaagcatacagacgacggtgaatacactcagcgaacgtatctcgtctaaattagaacaagaagcgaacgctagtgctcaaacaaaatgtgatatagaaatcggaaatttttatatccgacaaaaccatggatgtaacctcactgttaaaaatatgtgctctgcggacgcggatgctcagttggatgctgtgttatcagccgctacagaaacatatagtggattaacaccggaacaaaaagcatacgtgccagctatgtttactgctgcgttaaacattcagacgagtgtaaacactgttgttagagattttgaaaattatgtgaaacagacttgtaattctagcgcggtcgtcgataacaaattaaagatacaaaacgtaatcatagatgaatgttacggagccccaggatctccaacaaatttggaatttattaatacaggatctagcaaaggaaattgtgccattaaagcgttgatgcaattgacgactaaggccactactcaaatagcacctagacaagttgctggtacaggagttcagttttatatgattgttatcggtgttataatattggcagcgttgtttatgtactatgccaagcgtatgttgttcacatccaccaatgataaaatcaaacttattttagccaataaggaaaacgtccattggactacttacatggacacattctttagaacttctccgatggttattgctaccacggatatgcaaaactgaaaatatattgataatattttaatagattaacatggaagttatcgctgatcgtctagacgatatagtgaaacaaaatatagcggatgaaaaatttgtagattttgttatacacggtctagagcatcaatgtcctgctatacttcgaccattaattaggttgtttattgatatactattatttgttatagtaatttatatttttacggtacgtctagtaagtagaaattatcaaatgttgttggtggtgctagtcatcacattaactattttttattactttatactataatagtactagactgacttctaacaaacatctcacctgccataaataaatgcttgatattaaagtcttctatttctaacactattccatctgtggaaaataatactctgacattatcgctaattgacacatcggtgagtgatatgcctataaagtaataatcttctttgggcacatataccagtgtaccaggttctaacaacctatttactggtgctcctgtagcatactttttctttaccttgagaatatccatcgtttgcttggtcaatagcgatatgtgattttttatcaaccactcaaaaaagtaattggagtgttcatatcctctacgggctattgtctcatggccgtgtatgaaatttaagtaacacgactgtggtagatttgttctatagagccgattgccgcaaatagatagaactaccaatatgtctgtacaaatgttaaacattaattgattaacagaaaaaacaatgttcgttctgggaatagaaaccagatcaaaacaaaattcgttagaatatatgccacgtttatacatggaatataaaataactacagtttgaaaaataacagtatcatttaaacatttaacttgcggggttaatctcacaactttactgtttttgaactgttcaaaatatagcatcgatccgtgagaaatacgtttagccgcctttaatagaggaaatcccaccgcctttctggatctcaccaacgacgatagttctgaccagcaactcatttcttcatcatccacctgttttaacatataataggcaggagatagatatccgtcattgcaatattccttctcgtaggcacacaatctaatattgataaaatctccattctcttctctgcatttattatcttgtctcggtggctgattaggctgtggtcttggtttaggccttggtctatcgttgttgaatctattttggtcattaaatctttcatttcttcctggtatatttctatcacctcgtttggttggatttttgtctatattatcgtttgtaacatcggtacgggtattcatttatcacaaaaaaaacttctctaaatgagtctactgctagaaaacctcatcgaagaagataccatattttttgcaggaagtatatctgagtatgatgatttacaaatggttattgccggcgcaaaatccaaatttccaagatctatgctttctatttttaatatagtacctagaacgatgtcaaaatatgagttggagttgattcataacgaaaatatcacaggagcaatgtttaccacaatgtataatataagaaacaatttgggtctaggagatgataaactaactattgaagccattgaaaactatttcttggatcctaacaatgaagttatgcctcttattattaataatacggatatgactgccgtcattcctaaaaaaagtggtaggagaaagaataagaacatggttatcttccgtcaaggatcatcacctatcttgtgcattttcgaaactcgtaaaaagattaatatttataaagaaaatatggaatccgcgtcgactgagtatacacctatcggagacaacaaggctttgatatctaaatatgcgggaattaatgtcctgaatgtgtattctccttccacatccataagattgaatgccatttacggattcaccaataaaaataaactagagaaacttagtactaataaggaactagaatcgtatagttctagccctcttcaagaacccattaggttaaatgattttctgggactattggaatgtgttaaaaagaatattcctctaacagatattccgacaaaggattgattactataaatggagaatgttcctaatgtatactttaatcctgtgtttatagagcccacgtttaaacattctttattaagtgtttataaacacagattaatagttttatttgaagtattcgttgtattcattctaatatatgtattttttagatctgaattaaatatgttcttcatgcctaaacgaaaaatacccgatcctattgatagattacgacgtgctaatctagcgtgtgaagacgataaattaatgatctatggattaccatggatgacaactcaaacatctgcgttatcaataaatagtaaaccgatagtgtataaagattgtgcaaagcttttgcgatcaataaatggatcacaaccagtatctcttaacgatgttcttcgcagatgatgattcattttttaagtatttggctagtcaagatgatgaatcttcattatctgatatattgcaaatcactcaatatctagactttctgttattattattgatccaatcaaaaaataaattagaagctgtgggtcattgttatgaatctctttcagaggaatacagacaattgacaaaattcacagactttcaagattttaaaaaactgtttaacaaggtccctattgttacagatggaagggtcaaacttaataaaggatatttgttcgactttgtgattagtttgatgcgattcaaaaaagaatcctctctagctaccaccgcaatagatcctgttagatacatagatcctcgtcgtgatatcgcattttctaacgtgatggatatattaaagtcgaataaagtgaacaataattaattctttattgtcatcatgaacggcggacatattcagttgataatcggccccatgttttcaggtaaaagtacagaattaattagacgagttagacgttatcaaatagctcaatataaatgcgtgactataaaatattctaacgataatagatacggaacgggactatggacgcatgataagaataattttgaagcattggaagcaactaaactatgtgatgtcttggaatcaattacagatttctccgtgataggtatcgatgaaggacagttctttccagacattgtttaattctgtgagcgtatggcaaacgaaggaaaaatagttatagtagccgcactcgatgggacatttcaacgtaaaccgtttaataatattttgaatcttattccattatctgaaatggtggtaaaactaactgctgtgtgtatgaaatgctttaaggaggcttccttttctaaacgattgggtgaggaaaccgagatagagataataggaggtaatgatatgtatcaatcggtgtgtagaaagtgttacgtcggctcataatattatattttttatctaaaaaactaaaaataaacattgattaaattttaatataatacttaaaaatggatgttgtgtcgttagataaaccgtttatgtattttgaggaaattgataatgagttagattacgaaccagaaagtgcaaatgaggtcgcaaaaaaactgccgtatcaaggacagttaaaactattactaggagaattattttttcttagtaagttacagcgacacggtatattagatggtgccaccgtagtgtatataggatcggctcctggtacacatatacgttatttgagagatcatttctataatttaggagtgatcatcaaatggatgctaattgacggccgccatcatgatcctattttaaatggattgcgtgatgtaactctagtgactcggttcgttgatgaggaatatctacgatccatcaaaaaacaactgcatccttctaagattattttaatttctgatgtaagatccaaacgaggaggaaatgaacctagtacggcggatttactaagtaattacgctctacaaaatgtcatgattagtattttaaaccccgtggcatctagtcttaaatggagatgcccgtttccagatcaatggatcaaggacttttatatcccacacggtaataaaatgttacaaccttttgctccttcatattcagctgaaatgagattattaagtatttataccggtgagaacatgagactgactcgagttaccaaattagacgctgtaaattatgaaaaaaagatgtactaccttaataagatcgtccgtaacaaagtagttgttaactttgattatcctaatcaggaatatgactattttcacatgtactttatgctgaggaccgtgtactgcaataaaacatttcctactactaaagcaaaggtactatttctacaacaatctatatttcgtttcttaaatattccaacaacatcaactgaaaaagttagtcatgaaccaatacaacgtaaaatatctagcaaaaattctatgtctaaaaacagaaatagcaagagatccgtacgcggtaataaatagaaacgtactactgagatatactaccgatatagagtataatgatttagttactttaataaccgttagacataaaattgattctatgaaaactgtgtttcaggtatttaacgaatcatccataaattatactccggttgatgatgattatggagaaccaatcattataacatcgtatcttcaaaaaggtcataacaagtttcctgtaaattttctatacatagatgtggtaatatctgacttatttcctagctttgttagactagatactacagaaactaatatagttaatagtgtactacaaacaggcgatggtaaaaagactcttcgtcttcccaaaatgttagagacggaaatagttgtcaagattctctatcgccctaatataccattaaaaattgttagatttttccgcaataacatggtaactggagtagagatagccgatagatctgttatttcagtcgctgattaatcaattagtagagatgagataagaacattataataatcaataatatatcttatatcttatatcttatatcttatatcttgtttagaaaaatgctaatattaaaatagctaacgctagtaatccaatcggaagccatttgatatctataatagggtatctaatttcctgatttaaatagcggacagctatattctcggtagctactcgtttggaatcacaaacattatttacatctaatttactatctgtaatggaaacgtttcccaatgaaatggtacaatccgatacattgcattttgttatatttttttttaaagaggctggtaacaacgcatcgcttcgtttacatggctcgtaccaacaataatagggtaatcttgtatctattcctatccgtactatgcttttatcaggataaatacatttacatcgtatatcgtctttgttagcatcacagaatgcataaatttgttcgtccgtcatgataaaaatttaaagtgtaaatataactattatttttatagttgtaataaaaagggaaatttgattgtatactttcggttctttaaaagaaactgacttgataaaaatggctgtaatctctaaggttacgtatagtctatatgatcaaaaagagattaatgctacagatattatcattagtcatgttaaaaatgacgacgatatcggtaccgttaaagatggtagactaggtgctatggatggggcattatgtaagacttgtgggaaaacggaattggaatgtttcggtcactggggtaaagtaagtatttataaaactcatatagttaagcctgaatttatttcagaaattattcgtttactgaatcatatatgtattcactgcggattattgcgttcacgagaaccgtattccgacgatattaacctaaaagagttatcgggacacgctcttaggagattaaaggataaaatattatccaagaaaaagtcatgttggaacagtgaatgtatgcaaccgtatcaaaaaattactttttcaaagaaaaaggtttgtttcgtcaacaagttggatgatattaacgttcctaattctctcatctatcaaaagttaatttctattcatgaaaagttttggccattattagaaattcatcaatatccagctaacttattttatacagactactttcccatccctccgttgattattagaccggctattagtttttggatagatagtatacccaaagagaccaatgaattaacttacttattaggtatgatcgttaagaattgtaacttgaatgctgatgaacaggttatccagaaggcggtaatagaatacgatgatattaaaattatttctaataacactaccagtatcaatttatcatatattacatccggcaaaaataatatgattagaagttatatcgtcgcccgacgaaaagatcagaccgctagatctgtaattggtcccagtacatctatcaccgttaatgaggtaggaatgcccgcatatattagaaatacacttacagaaaagatatttgttaatgcctttacagtggataaagttaaacaactattagcgtcaaaccaagttaaattttactttaataaacgattaaaccaattaacaagaatacgccaaggaaagtttattaaaaataaaatacatttattgcctggtgattgggtagaagtagctgttcaagaatatacaagtattatttttggaagacagccgtctctacatagatacaacgtcatcgcttcatctatcagagctaccgaaggagatactatcaaaatatctcccggaattgccaactctcaaaatgctgatttcgacggggatgaggaatggatgatattagaacaaaatcctaaagctgtaattgaacaaagtattcttatgtatccgacgacgttactcaaacacgatattcatggagcccccgtttatggatctattcaagatgaaatcgtagcagcgtattcattgtttaggatacaagatctttgtttagatgaagtattgaacatcttggggaaatatggaagagagttcgatcctaaaggtaaatgtaaattcagcggtaaagatatctatacttacttgataggtgaaaagattaattatccgggtctcttaaaggatggtgaaattattgcaaacgacgtagatagtaattttgttgtggctatgaggcatctgtcattggctggactcttatccgatcataagtcgaacgtggaaggtatcaactttattatcaagtcatcttatgtttttaagagatatctatctatttacggttttggggtgacattcaaagatctgagaccaaattcgacgttcactaataaattggaggccatcaacgtagaaaaaatagaacttatcaaagaagcatacgccaaatatctcaacgatgtaagagacgggaaaatagttccattatctaaagctttagaggcggactatgtggaatccatgttatccaacttgacaaatcttaatatccgagagatagaagaacatatgagacaaacgctgatagatgatccagataataacctcctgaaaatggccaaagcgggttataaagtaaatcccacagaactaatgtatattctaggtacgtatggacaacaaaggattgatggtgaaccagcagagactcgagtattgggtagagttttaccttactatcttccagactctaaggatccagaaggaagaggttatattcttaattctttaacaaaaggattaacgggttctcaatattacttttcgatgctggttgcaagatctcaatctactgatatcgtctgtgaaacatcacgtaccggaacactggctagaaaaatcattaaaaagatggaggatatggtggtcgacggatacggacaagtagttataggtaatacgctcatcaagtacgccgccaattataccaaaattctaggctcagtatgtaaacctgtagatcttatctatccagatgagtccatgacttggtatttggaaattagtgctctgtggaataaaataaaacagggattcgtttactctcagaaacagaaacttgcaaagaagacattggcgccgtttaatttcctagtattcgtcaaacccaccactgaggataatgctattaaggttaaggatctgtacgatatgattcataacgtcattgatgatgtgagagagaaatacttctttacggtatctaatatagattttatggagtatatattcttgacgcatcttaatccttctagaattagaattacaaaagaaacggctatcactatctttgaaaagttctatgaaaaactcaattatactctaggtggtggaactcctattggaattatttctgcacaggtattgtctgagaagtttacacaacaagccctgtccagttttcacactactgaaaaaagtggtgccgtcaaacaaaaacttggtttcaacgagtttaataacttgactaatttgagtaagaataagaccgaaattatcactctggtatccgatgatatctctaaacttcaatctgttaagattaatttcgaatttgtatgtttgggagaattaaatccaaacatcactcttcgaaaagaaacagataggtatgtagtagatataatagtcaatagattatacatcaagagagcagaaataaccgaattagtcgtcgaatatatgattgaacgattcatctcctttagcgtcattgtaaaggaatggggtatggagacattcattgaggacgaggataatattagatttactgtctacctaaatttcgttgaaccggaagaattgaatcttagtaagtttatgatggttcttccgggggcagccaacaagggaaagattagtaaattcaagattcctatctctgactatacgggatatgacgacttcaatcaaacaaaaaagctcaataagatgactgtagaactcatgaatctaaaagaattgggttctttcgatttggaaaacgtcaacgtgtatcctggagtatggaatacatacgatatcttcggtatcgaggccgctcgtgaatacttgtgcgaagccatgttaaacacctatggagaagggttcgattatctgtatcagccttgtgatcttctcgctagtttactatgtgctagttacgaaccagaatcagtgaataaattcaagttcggcgcagctagtactcttaagagagctacgttcggagacaataaagcattgttaaacgcggctcttcataaaaagtcagaacctattaacgataatagtagctgccacttttttagcaaggtccctaatataggaactggatattacaaatactttatcgacttgggtcttctcatgagaatggaaaggaaactatctgataagatatcttctcaaaagatcaaggaaatggaagaaacagaagacttttaattcttatcaataacatatttttctatgatctgtcttttaaacgatggattttccacaaatgcgcctctcaagtccctcatagaatgatacacgtataaaaaatatagcataggcaatgactccttatttttagacattagatatgccaaaatcatagccccgcttctatttactcccgcagcacaatgaaccaacacgggctcgtttcgttgatcacatttagataaaaaggcggttacgtcgtcaaaatatttactaatatcggtagttgtatcatctaccaacggtatatgaataatattaatattagagttaggtaatgtatatttatccatcgtcaaatttaaaacatatttgaacttaacttcagatgatggtgcatccatagcatttttataatttcccaaatacacattattggttacccttgtcattatagtgggagatttggctctgtgcatatctccagttgaacgtagtagtaagtatttatacaaacttttcttatccatttataacgtacaaatggataaaactactttatcggtaaacgcgtgtaatttagaatacgttagagaaaaggctatagtaggcgtacaagcagccaaaacatcaacacttatattctttgttattatattggcaattagtgcgctattactctggtttcagacgtctgataatccagtctttaatgaattaacgagatatatgcgaattaaaaatacggttaacgattggaaatcattaacggatagcaaaacaaaattagaaagtgatagaggtagacttctagccgctggtaaggatgatatattcgacttcaaatgtgtggatttcggcgcctattttatagctatgcgattggataagaaaacatatctgccgcaagctattaggcgaggtactggagacgcgtggatggttaaaaaggcggcaaaggtcgatccatctgctcaacaattttgtcagtatttgataaaacacaagtctaataatgttattacttgtggtaatgagatgttaaatgaattaggttatagcggttattttatgtcaccgcattggtgttccgattttagtaatatggaatagtgttagataaatgcggtaacgaatgttcctgtaaggaaccataacagcttagatttaacgttaaagatgagcataaacataataaacaaaattacaatcaaacttataacattaatatcaaacaatccaaaaaatgaaatcagtggagtagtaaacgcgtacataactcctggataacgtttagcagctgccgttcctattctagaccaaaaattcggtttcatgttttcgaaacggtattctgcaacaagtcgaggatcgtgttctacatatttggcggcattatccagtatctgcctattgatcttcatttcgttttcaattctggctatttcaaaataaaatcccgatgatagacctccagactttataatttcatctacgatgttcagcgccgtagtaactctaataatataggctgataagctaacatcataccctcctgtatatgtgaatatggcatgatttttgtccattacaagctcggttttaactttattgcctgtaataatttctctcatctgtaggatatctatttttttgtcatgcattgccttcaagacgggacgaagaaacgtaatatcctcaataacgttatcgttttctacaataactacatattctacctttttattttctaactcggtaaaaaaattagaatcccatagggctaaatgtctagcgatatttcttttcgtttcctctgtacacatagtgttacaaaaccctgaaaagaagtgagtatacttgtcatcatttctaatgtttcctccagtccactgtataaacgcataatccttgtaatgatctggatcatccttgactaccacaacatttcttttttctggcataacttcgttgtcctttacatcatcgaacttctgatcattaatatgctcatgaacattaggaaatgtttctgatggaggtctatcaataactggcacaacaataacaggagttttcaccgccgccatttagttattgaaattaatcatatacaactctttaatacgagttatattttcgtctatccattgtttcacattgacatatttcgacaaaaagatataaaatgcgtattccaatgcttctctgtttaatgaattactaaaatatacaaacacgtcactgtctggcaataaatgatatcttagaatattgtaacaatgtaaggaaccataacagtttagatttaacgttaaagatgagcataaacataataaacaaaattacaatcaaacctataacattaatatcaaacaatccaaaaaatgaaatcagtggagtagtaaacgcgtacataactcctggataacgtttagcagctgccgttcctattctagaccaaaaatttggtttcatgttttcgaaacggtattctgcaacaagtcggggatcgtgttctacatatttggcggcattatccagtatctgcctattgatcttcatttcgttttcgattctggctatttcaaaataaaatcccgatgatagacctccagactttataatttcatctacgatgttcagcgccgtagtaactctaataatataggctgataagctaacatcataccctcctgtatatgtgaatatggcatgatttttgtccattacaagctcggttttaactttattgcctgtaataatttctctcatctgtaggatatctatttttttgtcatgcattgccttcaagacgggacgaagaaacgtaatatcctcaataacgttatcgttttctacaataactacatattctacctttttattttctaactcggtaaaaaaattagaatcccatagggctaaatgtctagcgatatttcttttcgtttcctctgtacacatagtgttacaaaaccctgaaaagaagtgagtatacttgtcatcatttctaatgtttcctccagtccactgtataaacgcataatccttgtaatgatctggatcatccttgactaccacaacatttcttttttctggcataacttcgttgtcctttacatcatcgaacttctgatcattaatatgctcatgaacattaggaaatgtttctgatggaggtctatcaataactggcacaacaataacaggagttttcaccgccgccatttagttattgaaattaatcatatacaactctttaatacgagttatattttcgtctatccattgtttcacatttacatatttcgacaaaaagatataaaatgcgtattccaatgcttctctgtttaatgaattactaaaatatacaaacacgtcactgtctggcaataaatgatatcttagaatattgtaacaatttattttgtattgcacatgttcgtgatctatgagttcttcttcgaatggcataggatctccgaatctgaaaacgtataaataggagttagaataataatatttgagagtattggtaatatataaactctttagcggtataattagtttttttctctcaatttctatttttagatgtgatggaaaaatgactaattttgtagcattagtatcatgaactctaatcaaaatcttaatatcttcgtcacacgttagctctttgaagtttttaagagatgcatcagttggttctacagatggagtaggtgcaacaattttttgttctacacatgtatgtactggagccattgttttaactataatggtgcttgtatcgaaaaactttaatgcagatagcggaagctcttcgccgcgactttctacgtcgtaattgggttctaacgccgatctctgaatggatactagttttctaagttctaatgtgattctctgaaaatgtaaatccaattcctccggcattatagatgtgtatacatcggtaaataaaactatagtatccaacgatcccttctcgcaaattctagtcttaaccaaaaaatcgtatataaccacggagatggcgtatttaagagtggattcttctaccgttttgttcttggatgtcatataggaaactataaagtccgcactactgttaagaatgattactaacgcaactatatagtttaaattaagcattttggaaacataaaataactctgtagacgatacttgactttcgaataagtttgcagacaaacgaagaaagaacagacctctcttaatttcagaagaaaactttttttcgtattcctgacgtctagagtttatatcaataagaaagttaagaattagtcggttaatgttgtatttcattacccaagtttgagatttcataatattatcaaaagacatgataatattaaagataaagcgctgactatgaacgaaatagctatatggttcgctcaagaatatagtcttgttaaacgtggaaacgataactgtatttttaatcacgtcagcggcatctaaattaaatataggtatatttattccacacactctacaatatgccacaccatcttcataataaataaattcgttagcaaaattattaattttagtgaaatagttagcgtcaactttcatagcttccttcaatctaatttgatgctcacacggtgcgaattccactctaacatcccttttccatgcctcaggttcatcgatctctataatatctagttttttgcgtttcacaaacacaggctcgtctctcgcgatgagatctgtatagtaactatgtaaatgataactagatagaaagatgtagctatatagatgacgatcctttaagagaggtataataactttaccccaatcagatagactgttgttatggtcttcggaaaaagaatttttataaatttttccagtattttccaaatatacgtacttaacatctaaaaaatccttaatgataataggaatggataatccgtctattttataaagaaatacatatcgcacattatacttttttttggaaatgggaataccgatgtgtctacataaatatgcaaagtctaaatattttttagagaatcttagttggtccaaattcttttccaagtacggtaatagatttttcatattgaacggtatcttcttaatctctggttctagttccgcattaaatgatgaaactaagtcactatttttataactaacgattacatcacctctaacatcatcatttaccagaatactgatcttcttttgtcgtaaatacatgtctaatgtgttaaaaaaaagatcatacaagttatacgtcatttcatctgtggtattcttgtcattgaaggataaactcgtactaatctcttctttaacagcctgttcaaatttatatcctatatacgaaaaaatagcaaccagtgtttgatcatccgcgtcaatattctgttctatcgtagtgtataacaatcgtatatcttcttctgtgatagtcgatacgttataaaggttgataacgaaaatatttttatttcgtgaaataaagtcatcgtaggattttggacttatattcgcgtctagtagatatgcttttatttttggaatgatctcaattagaatagtctctttagagtccatttaaagttacaaacaactaggaaattggtttatgatgtataatttttttagtttttatagattctttattctatacttaaaaaatgaaaataaatacaaaggttcttgagggttgtgttaaattgaaagcgagaaataatcataaattatttcattatcgcgatatccgttaagtttgtatcgtaatggcgtggtcaattacgaataaagcggatactagtagcttcacaaagatggctgaaatcagagctcatctaaaaaatagcgctgaaaataaagataaaaacgaggatattttcccggaagatgtaataattccatctactaagcccaaaaccaaacgagccactactcctcgtaaaccagcggctactaaaagatcaaccaaaaaggaggaagtggaagaagaagtagttatagaggaatatcatcaaacaactgaaaaaaattctccatctcctggagtcagcgacattgtagaaagcgtggccgctgtagagctcgatgatagcgacggggatgatgaacctatggtacaagttgaagctggtaaagtaaatcatagtgctagaagcgatctctctgacctaaaggtggctaccgacaatatcgttaaagatcttaagaaaattattactagaatctctgcagtatcgacggttctagaggatgttcaagcagctggtatctctagacaatttacttctatgactaaagctattacaacactatctgatctagtcaccgagggaaaatctaaagttgttcgtaaaaaagttaaaacttgtaagaagtaaatgcgtgcacttttttataaagatggtaaactctttaccgataataattttttaaatcctgtatcagacgataatccagcgtatgaggttttgcaacatgttaaaattcctactcatttaacagatgtagtagtatatgaacaaacgtgggaggaggcgttaactagattaatttttgtgggaagcgattcaaaaggacgtagacaatacttttacggaaaaatgcatgtacagaatcgcaacgctaaaagagatcgtatttttgttagagtatataacgttatgaaacgaattaattgttttataaacaaaaatataaagaaatcgtccacagattccaattatcagttggcggtttttatgttaatggaaactatgttttttattagatttggtaaaatgaaatatcttaaggagaatgaaacagtagggttattaacactaaaaaataaacacatagaaataagtcccgatgaaatagttatcaagtttgtaggaaaggacaaagtttcacatgaatttgttgttcataagtctaatagactatataaaccgctattgaaactgacggatgattctagtcccgaagaatttctgttcaacaaactaagtgaacgaaaggtatacgaatgtatcaaacagtttggtattagaatcaaggatctccgaacgtatggagtcaattatacgtttttatataatttttggacaaatgtaaagtccatatctcctcttccgtcaccaaaaaagttaatagcgttaactatcaaacaaactgctgaagtggtaggtcatactccatcaatttcaaaaagagcttatatggcaacgactattttagaaatggtaaaggataaaaattttttagatgtagtatctaaaactacgttcgatgaattcctatctatagtcgtagatcacgttaaatcatctacggatggatgatatagatctttacacaaataattacaagaccgataaatggaaatggataagcgtatgaaatctctcgcaatgacagctttcttcggagagctaagcacattagatattatggcattgataatgtctatatttaaacgccatccaaacaataccattttttcagtggataaggatggtcagtttatgattgatttcgaatacgataattataaggcttctcaatatttggatctgaccctcactccgatatctggagatgaatgcaagactcacgcatcgagtatagccgaacaattggcgtgtgtggatattattaaagaggatattagcgaatatatcaaaactactccccgtcttaaacgatttataaaaaaataccgcaatagatcagatactcgcatcagtcgagatacagaaaagcttaaaatagctctagctaaaggcatagattacgaatatataaaagacgcttgttaataagtaaatgaaaaaaaactagtcgtttataataaaacacgatatggatgccaacgtagtatcatcttctactattgcgacgtatatagacgctttagcgaagaatgcttcagaattagaacagaggtctaccgcatacgaaataaataatgaattggaactagtatttattaagccgccattgattactttgacaaatgtagtgaatatctctacgattcaggaatcgtttattcgatttaccgttactaataaggaaggtgttaaaattagaactaagattccattatctaaggtacatggtctagatgtaaaaaatgtacagttagtagatgctatagataacatagtttgggaaaagaaatcattagtgacggaaaatcgtcttcacaaagaatgcttgttgagactatcgacagaggaacgtcatatatttttggattacaagaaatatggatcctctatccgactagaattagtcaatcttattcaagcaaaaacaaaaaactttacgatagactttaagctaaaatattttctaggatccggtgcccaatctaaaagttctttgttgcacgctattaatcatccaaagtcaaggcctaatacatctctggaaatagaattcacacctagagacaatgaaacagttccatatgatgaactaataaaggaattgacgactctctcgcgtcatatatttatggcttctccagagaatgtaattctttctccgcctattaacgcgcctataaaaacctttatgttgcctaaacaagatatagtaggtttggatctggaaaatctatatgccgtaactaagactgacggcattcctataactatcagagttacatcaaacgggttgtattgttattttacacatcttggttatattattagatatcctgttaagagaataatagattccgaagtagtagtctttggtgaggcagttaaggataagaactggaccgtatatctcattaagctaatagagcccgtgaatgctatcagtgatagactagaagaaagtaagtatgttgaatctaaactagtggatatttgtgatcggatagtattcaagtcaaagaaatacgaaggtccgtttactacaactagtgaagtcgtcgatatgttatctacatatttaccaaagcaaccagaaggtgttattctgttctattcaaagggacctaaatctaacattgattttaaaattaaaaaggaaaatactatagaccaaactgcaaatgtagtatttaggtacatgtccagtgaaccaattatctttggagaatcgtctatctttgtagagtataagaaatttagcaacgataaaggctttcctaaagaatatggttctggtaagattgtgttatataacggcgttaattatctaaataatatctattgtttggaatatattaatacacataatgaagtgggtattaagtccgtggttgtacctattaagtttatagcagaattcttagttaatggagaaatacttaaacctagaattgataaaaccatgaaatatattaactcagaagattattatggaaatcaacataatatcatagtcgaacatttaagagatcaaagcatcaaaataggagatatctttaacgaggataaactatcggatgtgggacatcaatacgccaataatgataaatttagattaaatccagaagttagttattttacgaataaacgaactagaggaccgttgggaattttatcaaactacgtcaagactcttcttatttctatgtattgttccaaaacatttttagacgattccaacaaacgaaaggtattggcgattgattttggaaacggtgctgacctggaaaaatacttttatggagagattgcgttattggtagcgacggatccggatgctgatgctatagctagaggaaatgaaagatacaacaaattaaactctggaattaaaaccaagtactacaaatttgactacattcaggaaactattcgatccgatacatttgtctctagtgtcagagaagtattctattttggaaagtttaatatcatcgactggcagtttgctatccattattcttttcatccgagacattatgctaccgtcatgaataacttatccgaactaactgcttctggaggcaaggtattaatcactaccatggacggagacaaattatcaaaattaacagataaaaagacttttataattcataagaatttacctagtagcgaaaactatatgtctgtagaaaaaatagctgatgatagaatagtggtatataatccatcaacaatgtctactccaatgactgaatacattatcaaaaagaacgatatagtcagagtgtttaacgaatacggatttgttcttgtagataacgttgatttcgctacaattatagaacgaagtaaaaagtttattaatggcgcatctacaatggaagatagaccgtctacaaaaaactttttcgaactaaatagaggagccattaaatgtgaaggtttagatgtcgaagacttacttagttactatgttgtttatgtcttttctaagcggtaaataataatatggtatgggttctgatatccccgttctaaatgcattaaataattccaatagagcgatttttgttcctataggaccttccaactgtggatactctgtattgttaatagatatattaatacttttgtcgggtaacagaggttctacgtcttctaaaaataaaagttttataacatctggcctgttcataaataaaaacttggcgattctatatatactcttattatcaaatctagccattgtcttatagatgtgagctactgtaggtgtaccatttgattttctttctaatactatatatttctctcgaagaagttcttgcacatcatctgggaataaaatactactgttgagtaaatcagttattttttttatatcgatattgatggacatttttatagttaaggataataagtatcccaaagtcgataacgacgataacgaagtatttatacttttaggaaatcacaatgactttatcagattaaaattaacaaaattaaaggagcatgtatttttttctgaatatattgtgactccagatacatatggatctttatgcgtcgaattaaatgggtctagttttcagcacggtggtagatatatagaggtggaggaatttatagatgctggaagacaagttagatggtgttctacatccaatcatatatctaaagatatacccgaagatatgcacactgataaatttgtcatttatgatatatacacttttgacgctttcaagaataaacgattggtattcgtacaggtacctccgtcgttaggagatgatagtcatttgactaatccgttattgtctccgtattatcgtaattcagtagccagacaaatggtcaataatatgatttttaatcaagattcatttttaaaatatttattagaacatctgattagaagccactatagagtttctaaacatataacaatagttagatacaaggataccgaagaattaaatctaacgagaatatgttataatagagataagtttaaggcgtttgtattcgcttggtttaacggcgtttcggaaaatgaaaaggtactagatacgtataaaaaggtatctaatttgatataatgaattcagtgactgtatcacacgcgccatatactattacttatcacgatgattgggaaccagtaatgagtcaattggtagagttttataacgaagtagccagttggctgctacgagacgagacgtcgcctattcctgataagttctttatacagttgaaacaaccgcttagaaataaacgagtatgtgtgtgcggtatagatccgtatccgaaagatggaactggtgtaccgttcgaatcaccaaattttacaaaaaaatcaattaaggagatagcttcatctatatctagattaaccggagtaattgattataaaggttataaccttaatataatagacggggttataccctggaattattacttaagttgtaaattaggagaaacaaaaagtcacgcgatctactgggataagatttccaagttactgctgcagcatataactaaacacgttagtgttctttattgtttgggtaaaacagatttctcgaatatacgggcaaagttagaatccccggtaactaccatagtcggatatcatccagcggctagagaccgccaattcgagaaagatagatcatttgaaattatcaacgttttactggaattagacaacaaggcacctataaattgggctcaagggtttatttattaatgctttagtgaaattttaacttgtgttctaaatggatgcggctattagaggtaatgatgttatctttgttcttaagactataggtgtcccgtcagcgtgcagacaaaatgaagatccaagatttgtagaagcatttaaatgcgacgagttagaaagatatattgagaataatccagaatgtacactattcgaaagtcttagggatgaggaagcatactctatagtcagaattttcatggatgtagatttagacgcgtgtctagacgaaatagattatttaacggctattcaagattttattatcgaggtgtcaaactgtgtagctagattcgcgtttacagaatgcggtgccattcatgaaaatgtaataaaatccatgagatctaatttttcattgactaagtctacaaatagagataaaacaagttttcatattatctttttagacacgtataccactatggatacattgatagctatgaaacgaacactattagaattaagtagatcatctgaaaatccactaacaagatcgatagacactgccgtatataggagaaaaacaactcttcgggttgtaggtactaggaaaaatccaaattgcgacactattcatgtaatgcaaccaccgcatgataatatagaagattacctattcacttacgtggatatgaacaacaatagttattacttttctctacaacaacgattggaggatttagttcctgataagttatgggaaccagggtttatttcattcgaagacgctataaaaagagtttcaaaaatattcattaattctataataaactttaatgatctcgatgaaaataattttacaacggtaccactggtcatagattacgtaacaccttgtgcattatgtaaaaaacgatcgcataaacatccgcatcaactatcgttggaaaatggtgctattagaatttacaaaactggtaatccacatagttgtaaagttaaaattgttccgttggatggtaataaactgtttaatattgcacaaagaattttagacactaactctgttttattaaccgaacgaggagaccatatagtttggattaataattcatggaaatttaacagcgaagaacccttgataacaaaactaattttgtcaataagacatcaactacctaaggaatattcaagcgaattactctgtccgaggaaacgaaagactgtagaagctaacatacgagacatgttagtagattcagtggagaccgatacctatccggataaacttccgtttaaaaatggtgtattggacctggtagacggaatgttttactctggagatgatgctaaaaaatatacgtgtactgtatcaaccggatttaaatttgacgatacaaagttcgtcgaagacagtccagaaatggaagagttaatgaatatcattaacgatatccaaccattaacggatgaaaataagaaaaatagagagctatatgaaaaaacattatctagttgtttatgcggtgctaccaaaggatgtttaacattcttttttggagaaactgcaactggaaagtcgacaaccaaacgtttgttaaagtctgctatcggtgacctgtttgttgagacgggtcaaacaattttaacagatgtattggataaaggacctaatccatttatcgctaacatgcatttgaaaagatctgtattctgtagcgaactacctgattttgcatgtagtgggtcaaagaaaatcagatctgataatattaaaaagttgacagaaccttgtgtcattggaagaccgtgtttctccaataaaattaataatagaaaccatgcgacaatcattatcgatactaattacaaacctgtttttgataggatagataacgcattaatgagaagaattgccgtcgtgcgattcagaacacacttttctcaaccttctggtagagaggctgctgaaaataatgacgcgtacgataaagtcaaactattagacgaggggttagatggtaaaatacaaaataatagatatagattcgcatttctatacttgttggtgaaatggtacagaaaatatcatgttcctattatgaaactatatcctacacccgaagagattcctgactttgcattctatctcaaaataggtactctgttggtatctagctctgtaaagcatattccattaatgacggacctctccaaaaagggatatatattgtacgataatgtggtcactcttccgttgactactttccaacagaaaatatccaagtattttaattctagactatttggacacgatatagagagcttcatcaatagacataagaaatttgccaatgttagtgatgaatatctgcaatatatattcatagaggatatttcatctccgtaaatatatgctcatatatttatagaagatatcacatatctaaatgaataccggaatcatagatttatttgataatcatgttgatagtataccaactatattacctcatcagttagctactctagattatctagttagaactatcatagatgagaacagaagcgtgttattgttccatattatgggatcaggtaaaacaataatcgctttgttgttcgccttggtagcttccagatttaaaaaggtttacattctagtgccgaacatcaacatcttaaaaattttcaattataatatgggtgtagctatgaacttgtttaatgacgaattcatagctgagaatatctttattcattccacaacaagtttttattctcttaattataacgataacgtcattaattataacggattatctcgctacaataactctatttttatcgttgatgaggcacataatatctttgggaataatactggagaacttatgaccgtgataaaaaataaaaacaagattccttttttactattgtctggatctcccattactaacacacctaatactctgggtcatattatagatttaatgtccgaagagacgatagattttggtgaaattattagtcgtggtaagaaagtaattcagacacttcttaacgaacgcggtgtgaatgtacttaaggatttgcttaaaggaagaatatcatattacgaaatgcctgataaagatctaccaacgataagatatcacggacgtaagtttctagatactagagtagtatattgtcacatgtctaaacttcaagagagagattatatgattactagacgacagctatgttatcatgaaatgtttgataaaaatatgtataacgtgtcaatggcagtattgggacaacttaatctgatgaataatttagatactttatttcaggaacaggataaggaattgtacccaaatctgaaaataaataatggcgtgttatacggagaagaattggtaacgttaaacattagttccaaatttaaatactttattaatcggatacagacactcaacggaaaacattttatatacttttctaattctacatatggcggattggtaattaaatatatcatgctcagtaatggatattctgaatataatggttctcagggaactaatccacatatgataaacggcaaaccaaaaacatttgctatcgttactagtaaaatgaaatcgtctttagaggatctattagatgtgtataattctcctgaaaacgatgatggtagtcaattgatgtttttgttttcatcaaacattatgtccgaatcctatactctaaaagaggtaaggcatatttggtttatgactatcccagatactttttctcaatacaaccaaattcttggacgatctattagaaaattctcttacgccgatatttctgaaccagttaatgtatatcttttagccgccgtatattccgatttcaatgacgaagtgacgtcattaaacgattacacacaggatgaattaattaatgttttaccatttgacatcaaaaagctgttgtatctaaaatttaagacgaaagaaacgaatagaatatactctattcttcaagagatgtctgaaacgtattctcttccaccacatccatcaattgtaaaagttttattgggagaattggtcagacaatttttttataataattctcgtattaagtataacgataccaagttacttaaaatggttacatcagttataaaaaataaagaagacgctaggaattacatagatgatattgtaaacggtcacttctttgtatcgaataaagtatttgataaatctcttttatacaaatacgaaaacgatattattacagtaccgtttagactttcctacgaaccatttgtttggggagttaactttcgtaaagaatataacgtggtatcttctccataaaactgatgagatatataaagaaataaatgtcgagctttgttaccaatggatacctttccgttacattggaacctcatgagctgacgttagacataaaaactaatattaggaatgccgtatataagacgtatctccatagagaaattagtggtaaaatggccaagaaaatagaaattcgtgaagacgtggaattacctctcggcgaaatagttaataattctgtagttataaacgttccgtgtgtaataacctacgcgtattatcacgttggggatatagtcagaggaacattaaacatcgaagatgaatcaaatgtaactattcaatgtggagatttaatctgtaaactaagtagagattcgggtactgtatcatttagcgattcaaagtactgcttttttcgaaatggtaatgcgtatgacaatggcagcgaagtcactgccgttctaatggaggctcaacaaggtatcgaatctagttttgtttttctcgcgaatatcgtcgactcataaaaaagagaatagcggtaagtataaacacgaatactatggcaataattgcgaatgttttattctcttcgatatatttttgataatatgaaaaacatgtctctctcaaatcggacaaccatctcataaaatagttctcgcgcgctggagaggtagttgccgctcgtataatctctccagaataatatacttgcgtgtcgtcgttcaatttatacggatttctatagttctctgttatataatgcggtttgccctcatgattagacgacgacaatagtgttctaaatttagatagttgatcagaatgaatgtttattggcgttggaaaaattatccatacagcgtctgcagagtggttgatagttgttcctagatatgtaaaataatccaacttactaggcagcaaattgtctagataaaatactgaatcaaacggtgcagacgtattggcggatctaatggaatccaattgattaactatcttttgaaaatatacatttttatgatccaatacttgtaagaatatagaaataatgataagtccatcatcgtgtttttttgcctcttcataagaactatattttttcttattccaatgaacaagattaatctctccagagtatttgtacacatctatcaagtgattggatccataatcgtcttcctttccccaatatatatgtagtgatgataacacatattcattggggagaaaccctccacttatatatcctcctttaaaattaatccttactagttttccagtgttctggatagtggttggtttcgactcattataatgtatgtctaacggcttcaatcgcgcgttagaaattgcttttttagtttctatattaataggagatagttgttgcggcatagtaaaaatgaaatgataactgtttaaaaatagctcttagtatgggaattacaatggatgaggaagtgatatttgaaactcctagagaattaatatctattaaacgaataaaagatattccaagatcaaaagacacgcatgtgtttgctgcgtgtataacaagtgacggatatccgttaataggagctagaagaacttcattcgcgttccaggcgatattatctcaacaaaattcagattctatctttagagtatccactaaactattacggtttatgtactacaatgaactaagagaaatctttagacggttgagaaaaggttctatcaacaatatcgatcctcactttgaagagttaatattattgggtggtaaactagataaaaaggaatctattaaagattgtttaagaagagaattaaaagaggaaagtgatgaacgtataacagtaaaagaatttggaaatgtaattctaaaacttacaacacgggataaattatttaataaagtatatataagttattgcatggcgtgttttattaatcaatcgttggaggatttatcgcatactagtatttacaatgtagaaattagaaagattaaatcattaaatgattgtattaacgacgataaatacgaatatctgtcttatatttataatatgctagttaatagtaaatgaacttttacagatctagtataattagtcagattattaagtataatagacgactagctaagtctattatttgcgaggatgactctcaaattattacactcacggcattcgttaaccaatgcctatggtgtcataaacgagtatccgtgtccgctattttattaactactgataacaaaatattagtatgtaacagacgagatagttttctctattctgaaataattagaactagaaacatgtttagaaagaaacgattatttctgaattattccaattatttgaacaaacaggaaagaagtatactatcgtcatttttttctctagatccagctactactgataatgatagaatagacgctatttatccgggtggcatacccaaaaggggtgagaatgttccagagtgtttatccagggaaattaaagaagaagttaatatagacaattcttttgtattcatagacactcggttttttattcatggcatcatagaagataccattattaataaattttttgaggtaatcttctttgtcggaagaatatctctaacgagtgatcaaatcattgatacatttaaaagtaatcatgaaatcaaggatctaatatttttagatccgaattcaggtaatggactccaatacgaaattgcaaaatatgctctagatactgcaaaacttaaatgttacggccatagaggatgttattatgaatcattaaaaaaattaactgaggatgattgattaaaaaatataaattaatttaccatcgtgtatttttataacgggattgtccggcatatcatgtagatagttaccgtctacatcgtatactcgaccatctacgcctttaaatcctctatttattgacattaatctattagaattggaataccaaatattagtaccctcaattagtttattggtaatattttttttagacgatagatcgatggctcttgaaaccaaggttttccaaccggactcattgtcgatcggtgagaagtctttttcattagcatgaatccattctaatgatgtatgtttaaacactctaaacaattggacaaattcttttgatttgctttgaatgatttcaaataggtcttcgtctacagtaggcataccattagataatctagccattataaagtgcacgtttacatatctacgttctggaggagtaagaacgtgactattgagacgaatggctcttcctactatctgacgaagagacgcctcgttccatgtcatatctaaaatgaagatatcattaattgagaaaaaactaataccctcgcctccactagaagagaatacgcatgttttaatgcattctccgttagtgtttgattcttggttaaactcagccaccgccttgattctagtatcttttgttctagatgagaactctatattagagataccaaagactttgaaatatagtaataagatttctattcctgactgattaacaaatggttcaaagactagacatttaccatgggatgctaatattcccaaacatacatctataaatttgacgcttttctcttttaattcagtaaatagagagatatcagccgcactagcatcccctttcaatagttctccctttttaaaggtatctaatgcggatttagaaaactctctatctcttaatgaatttttaaaatcattatatagtgttgctatctcttgcgcgtattcgcccggatcacgattttgtctttcaggaaagctatcgaacgtaaacgtagtagccatacgtctcagaattctaaatgatgatatacctgtttttatttcagcgagtttagccttttgataaatttcttcttgctttttcgacatattaacgtatcgcattaatactgttttcttagcgaatgatgcagacccttctacgtcatcaaaaatagaaaactcgttattaactatatacgaacatagtcctcctagtttggagactaattctttttcatcgactagacgtttattctcaaatagtgattggtgttgtaaggatcctggtcgtagtaagttaaccaacatggtgaattcttgcacactattgacgataggtgtagccgataaacaaatcatcttatggttttttaacgcaatggtcttagataaaaaattatatactgaacgagtaggacggatcttaccatcttctttgattaatgatttagaaatgaagttatgacattcatcaatgatgacgcatattctactcttggaattaatagttttgatattagtaaaaaatttatttctaaaattttgatcatcgtaattaataaaaatacaatccttcgttatctctggagcgtatctgagtatagtgttcatccaaggatcttctatcaaagcctttttcaccaataagataatagcccaattcgtataaatatccttaagatgtttgagaatatatacagtagtcattgttttaccgacacccgtttcatggaacaataaaagagaatgcatactgtctaatcctaagaaaactcttgctacaaaatgttgataatccttgaggcgtactacgtccgaccccatcatttcaacgggcatattagtagttctgcgtaaggcataatcgatataggccgcgtgtgatttactcatttatgagtgataagtaataactatgttttaaaaatcacagcagtagtttaactagtcttctctgatgtttgttttcgatactttttgaatcagaagtcatactagaataaagcaacgagtgaacgtaatagagagcttcgtatactctattcgaaaactctaagaacttattaatgaattccgtatccactggattgtttaaaatactaaattgaacactgttcacatccttccaagaagaagacttagtgacggacttaacatgagacataaataaatccaaattttttttacaaacatcactagccaccataatggcgctatctttcaaccagctatcgcttacgcattttagcagtctaacatttttaaagagactacaatatattctcatagtatcgattacacctctaccgaataaagttggaagtttaataatacaatatttttcgtttacaaaatcaaataatggtcgaaacacgtcgaaggttaacatcttataatcgctaatgtatagattgttttcagtgagatgattattagatttaatagcatctcgttcacgtttgaacagtttattgcgtgcgctgaggtcggcaactacggcgtccgctttagtactcctcccataatactttacgctattaatctttaaaatttcatagactttatctagatcgctttctggtaacatgatatcatgtgtaaaaagttttaacatgtcggtcggcattctatttagatcattaactctagaaatctgaagaaagtaattagctccgtattccagactaggtaatgggcttttacctagagacagattaagttctggcaatgtttcataaaatggaagaaggacatgcgttccctcccggatattttttacaatttcatccatttacaactctatagtttgttttcattattattagttattatctcccataatcttggtaatacttaccccttgatcgtaagataccttatacaggtcattacatacaactaccaattgtttttgtacataatagattggatggttgacatccatggtggaataaactactcgaacagatagtttatctttccccctagatacattagccgtaatagttgtcggcctaaagaatatctttggtgtaaagttaaaagttagggttcttgttccattattgctttttgtcagtagttcattataaattctcgagatgggtccgttctctgaatatagaacatcatttccaaatctaacttctagtctagaaataatatcggtcttattcttaaaatctattcccttgatgaagggatcgttaatgaacaaatccttggcctttgattcggctgatctattatctccgttatagacgttacgttgactagtccaaagacttacaggaatagatgtatcgatgatgttgatactatgtgatatgtgagcaaagattgttctcttagtggcatcactatatgttccagtaatggcggaaaactttttagaaatgttatatataaaagaattttttcgtgttccaaacattagcagattagtatgaagataaacactcatattatcaggaacattatcaatttttacatacacatcagcatcttgaatagaaacgataccatcttctggaacctctacgatctcggcagactccggataaccagtcggtgggccatcgctaacaataactagatcatccaacaatctactcacatatgcatctatataatctttttcatcttgtgagtaccctggatacgaaataaatttattatccgtatttccataataaggtttagtataaacagagagagatgttgccgcatgaacttcagttacagtcgccgttggttggtttatttgacctattactctcctaggtttctctataaacgatggtttaatttgtacattcttaaccatatatccaataaagctcaattcaggaacataaacaaattctttgttgaacgtttcaaagtcgaacgaagagtcacgaataacgatatcggatactggattgaaggttaccgttacggtaatttttgaatcggatagtttaagactgctgaatgtatcttccacatcaaacggagttttaatataaacgtatactgtagatggttctttaatagtgtcattaggagttaggccaatagaaatatcattaagttcactagaatatccagagtgtttcaaagcaattgtattattgatacaattattatataattcttcgccctcaatttcccaaataacaccgttacacgaagagatagatacgtgattaatacatttatatccaacatatggtacgtaactgaatcttcccatacctttaacttctggaagttccaaactcagaaccaaatgattaagcgcagtaatatactgatccctaatttcgaagctagcgatagcctgattgtctggaccatcgtttgtcataactccggatagagaaatatattgcggcatatataaagttggaatttgactatcgactgcgaagacattagaccgtttaatagagtcatccccaccgatcaaagaattaatgatagtattattcattttctatttaaaatggaaaaagcttacaataaactccgtagagaaatatctataatttgtgagttttccttaaagtaacagcttccgtaaacgccgtctttatctcttagtaggtttattgtatttatgaccttttccttatcttcatagaatactaaaggcaacaaagaaatttttggttcttctctaagagctacgtgagacttaaccatagaagccaacgaatccctacatattttagaacagaaataccctacttcaccacccttgtatgtctcaatactaataggtctaaaaaccaaatcttgattacaaaaccaacacttatcaattacactatttgtcttaatagacacatctgccatagatttataatactttggtagtatacaagcgagtgcttcttctttagcgggcttaaagactgctttaggtgctgaaataaccacatctggaaggcttactcgcttagccatttaattacggaactatttttttatacttctaatgagcaagtagaaaacctctcatctacaaaaacgtactcgtgtccataatcctctaccatagttacacgttttttagatctcatatgtgctaaaaagttttcccatactaattggttactattatttttcgtataatttttaacagtttgaggttttagatttttagttacagaagtgatatcgaatattttatccaaaaagaatgaataattaattgtcttagaaggagtgttttcttggcaaaagaataccaagtgcttaaatatttctactacttcattaatcttttctgtactcagattcagtttctcatcttttacttgattgattatttcaaagactaacttataatcctttttatttattctctcgttagccttaagaaaactagatacaaaatttgcatctacatcatccgtggatatttgatttttttccatgatatccaagagttccgagataatttctccagaacattgatgagacaataatctccgcaatacatttctcaaatgaataagtttattagacacgtggaagtttgactttttttgtacctttgtacatttttgaaataccgactcgcaaaaaatacaatattcatatccttgttcagatactataccgttatgtctacaaccgctacataatcgtagattcatgttaacactctacgtatctcgtcgtccaatattttatataaaaacattttatttctagacgttgccagaaaatcctgtaatatttttagttttttgggctgtgaataaagtatcgccctaatattgttaccgtcttccgccaatatagtagttaaattatccgcacatgcagaagaacaccgcttaggcggattcagtacaatgttatatttttcgtaccaactcatttaaatatcataatctaaaatagttctgtaatatgtctagcgctaatatattgatcataatcctgtgcataaattaagatacaacaatgtctcgaaatcatcgacatggcttcttccatagttagaagatcgtcgtcaaagttagcaacgtgattcatcaacatttgctgttttgaggcagcaaatactgaaccgtcgccattcaaccattcataaaaaccatcgtctgaatccattgataatttcttgtactggtttttgagagctcgcatcaatctagcatttctagctcccggattgaaaacagaaagaggatcgtacatccagggtccattttctgtaaatagaatcgtataatgtcccttcaagaagatatcagacgatccacaatcaaagaattggtctccgagtttgtaacaaactgcggactttaacctatacatgataccgtttagcataatttctggtgatacgtcaatcggagtatcatctattagagatctaaagccggtgtaacattctccaccaaacatattcttattctgacgtcgttctacataaaacatcattgctccattaacgataacaggggaatgaacagcactacccatcacattagttcccaatggatcaatgtgtgtaactccagaacatcttccatagcctatgttaggaggagcgaacaccactcttccactattgccatcgaatgccatagaataaatatccttggaattgatagaaatcggactgtcggatgttgtgatcatcttcataggattaacaactatgtatggtgccgcctgaagtttcatatcgtaactgatgccgtttataggtctagccacagaaaccaacgtaggtctaaatccaactatagacaaaatagaagccaatatctgttcctcatctgtcataacttgagagcatccagtatgaataatcttcattagatggggatctaccgcatcatcatcgttacaataaaaaattcccattctaatgttcataattgcttttctaatcatggtatgcatgtttgctctctgaatctctgtggaaattagatctgatacacctgtaatcactatcggattatcctccgtaagacgattaaccaacaacatataattataagactttacttttctaaattcataaagttgctggattaggctataggtgtctccatgtacatacgcgttctcgagcgcaggaagtttaataccgaatagtgccatcagaataggatgaatatagtaattagtttctggttttctataaataaaagacaaatcttgtgaactagacatatcggtaaaatgcatggattggaatcgtgtagtcgacagaagaatatgatgattagatggagagtatattttatctaactctttgagttggtcaccgattctaggactagctcgagaatgaataagtactaaaggatgagtacatttcacagaaacactagcattgttcaatgtgctctttacatgggtaaggagttgaaatagctcgtttctatttgttctgacaatatttagtttattcataatgttaagcatatcctgaatagtaaagttagatgtgtcatacttgttagtagttagatatttagcaattgcattcccatcatttctcaatctcgtactccaatcatgtgtagatgctacttcgtcgatggaaaccatacaatcctttttgataggctgttgagattgatcatttcctgcacgtttaggtttggtacgttgatttctagcccctgcggatataaagtcatcgtctacaatttgggacaatgaattgcatacactacaagacaaagatttatcagaagtgtgaatatgatcttcatctaccaaagaaagagtttgattagtataactagattttagtcctgcgttagatgttaaaaaaacatcgctattgaccacggcttccattatttatattcgtagtttttactcgaaagcgtgattttaatatccaatcttattacttttggaatcgttcaaaacctttgactagttgtagaatttgatctattgccctacgcgtatactcccttgcatcatatacgttcgtcaccagatcgtttgtttcggcctgaagttggtgcatatctctttcaacattcgacatgagatccttaagggccatatcgtctagattttgttgagatgctgctcctggatttggattttgttgtgctgttgtacatactgtaccaccagtaggtgtaggagtacatacagtggccacaataggaggttgagaaagtgtaaccgttggagtagtacaagaaatacttccatccgattgttgtgtacatgtagttgttggtaacgtctgagaaggttgggtagatggcggcgtcgtcgttttttgatctttattaaatttagagataatatcctgaacagcattgctcggcgtcaacgctggaaggagtgaactcgccggcgcatcagtatcttcagacagccaatcaaaaagattagacatatcagatgatgtattagtttgttgtcgtggttttggtgtaggagcagtactactaggtagaagaataggagccgatgtagctgttggaaccggctgtggagttatatgaatagttggttgtagcggttggataggctgtctgctggcggccatcatattatctctagctagttgttctcgcaactgtctttgataatacgactcttgagactttagtcctatttcaatcgcttcatcctttttcgtatccggatccttttcttcagaataatagattgacgactttggtgtagaggattctgccagcctctgtgagaacttgttaaagaagtccatttaaggctttaaaattgaattgcgattataagattaaatggcagacacagacgatattatcgactatgaatccgatgatctcaccgaatacgaggatgatgaagaagaggaagaagatggagagtcactagaaactagtgatatagatcccaaatcttcttataagattgtagaatcagcatccactcatatagaagatgcgcattccaatcttaaacatatagggaatcatatatctgctcttaaacgacgctatactagacgtataagtctatttgaaatagcgggtataatagcagaaagctataacttgcttcaacgaggaagattacctctagtttcagaattttctgacgaaacgatgaagcaaaatatgctacatgtaattatacaagagatagaggagggttcttgtcctatagtcatcgaaaagaacggagaattgttgtcggtaaacgattttgacaaagatggtctaaaattccatctagactatattatcaaaatttggaaacttcaaaaacgatattagaatttatacgaatatcgttctctaaatgtcacaatcaagtctcgcatgttcagcaatttattgtcgtactttatatcgtgttcattaacgatatcttgcaaaatagtaatgattctatcttccttcgatagatattcttcagagattattgtcttatattctttcttgttatcagatatgaatttgataagactttgaacattattgatacccgtctgtttaattttttctacagatattttagttttggcagattctatcgtatctgtcaatagacatccaacatcgacattcgacgtcaattgtctataaatcaacgtataaattttagaaataacattagcgaattgttgtgcgttgatgtcgttattctgaaacagtatgattttaggtagcattttcttaacaaagagaacgtatttattgttactcagttgaacagatgatatatccagattactaacgcatctgattccgtataccaaactttcagaagaaatggtatacaattgtttgtattcattcaatgtctctttttcagaaattagtttagagtcgaatactgcaataattttcaagagatagttttcatcagataagattttatttagtgtagatatgataaaactattgttttgttggagaacttgatacgccgcgttctctgtagtcgacgctctcaaatgggaaacaatctccattatttttttggaatcggatactatatcttcggtatcttgacgcagtctagtatacatagagttaagagagattagagtttgtacattaagcaacatgtctctaaatgtggctacaaacttttcctttttcacatcatctagtttattatataccgatttcacaacggcaccagatttaaggaaccagaatgaaaaactctgataactacaatatttcatcatagttacgattttatcatcttctatagttggtgtaatagcgcatacctttttctccaagactggaaccaacgtcataaaaatgtttaaatcaaaatccatatcaacatctgatgcgctaagaccagtctcgcgttcaagattatctttactaatggtgacgaactcatcgtataaaactctaagtttgtccattatttatttacagatttagttgtttaatttatttgtgctcttccagagttgggatagtatttttctaacgtcggtattatattattaggatctacgttcatatgtatcataatattaatcatccacgttttgataaatctatctttagcttctgaaataacgtatttaaacaaaggagaaaaatatttagctacggcatcagacgcaataacattttttgtaaatgtaacgtatttagacgacagatcttcgttaaaaagttttccatctatgtagaatccatcggttgttaacaccattcccgcgtcagattgaataggagtttgaatagtttgttttggaaatagatccttcaataacttatagttgggtgggaaaaaatcgattttatcactagactctttcttttttactatcattacctcatgaactatttcttgaatgagtatatgtattttctttcctatatcggacgcgttcattggaaaatataccatgtcgttaactataagaatatttttatcctcgtttacaaactgaataatatcagatgtagttcgtaaacgaactatatcatcaccagcacaacatctaactatatgatatccactagtttcctttagccgtttattatcttgttccatattagcagtcattccatcatttaagaaggcgtcaaagataatagggagaaatgacattttggattctgttacgactttaccaaaattaaggatatacggacttactatctttttctcaacgtcaatttgatgaacacacgatgaaaatgtgcttctatgagattgatcatgtagaaaacaacaagggatacaatatttccgcatatcatgaaatatattaagaaatcccaccttattatatttccccaaaggatccatgcacgtaaacattatgccgttatcattaataaagacttctttctcatcggatctgtaaaagttgttactgatttttttcattccaggatctagataattaataatgatgggttttctattcttattctttgtattttggcatatcctagaccagtaaacagtttccactttggtaaaatcagcagacttttgaacgctattaaacatggcattaatggcaataactaaaaatgtaaaatatttttctatgttaggaatatggtttttcactttaatagatatatggtttttggccaaaatgatagatatttttttatccgaggatagtaaaatattattagtcgccgtctctataaaaatgaagctagtctcgatatccaattttattctagaattgataggagtcgccaaatgtaccttatacgttatatctcccttgatgcgttccatttgtgtatctatatcggacacaagatctgtaaatagttttacgttattaatcatcacggtatcgccgtcgctagataacgctaatgtaccatccaagtcccaaatggagagatttaactgttcatcgtttagaataaaatgattaccggtcatattaataaagtgttcatcgtatctagataacaacgacttataattaatgtccaagtcttgaactcgctgaatgatcttttttaacccagttagttttagattggtacgaaatatattgttaaactttgattctacagtaatgtccaaatctagttgtggaaatacttccatcaacattgtttcaaacttgataatattattatctacatcttcgtacgatccaaattccggaatagatgtatcgcacgctctggccacccagataaccaaaaagtcacacgctccaggatatacattgtataaaaagctatcgttttttagtagggtttttttctgcgtgtatacgaagggattaaaaatagtattatcaacgtaactatattccaaattattcttatgagaatagataataatatcgtccttaatatctaacaaatttcctaaatatccctttaattgagtcattcgaagcgtcaatagaatatgtctcttaactatttccggctgttgtatatttaaatgacttcgtaaaaaataatatatgggcgacttctcatctatgtaatcatatggagtgagatatagggctcgttctacctcctgccccttacccacctgtaataccaattgcggacttactatatatcgcatatttatatcgtggggtaaagtgaaaatctactaccgatgatgtaagtcttacaatgttcgaaccagtaccagatcttaatttggaggcctccgtagaactaggggaggtaaatatagatcaaacaacacctatgataaaggagaatagcggttttatatcccgcagtagacgtctattcgcccatagatctaaggatgatgagagaaaactagcactacgattctttttacaaagactttattttttagatcatagagagattcattatttgttcagatgcgttgacgctgtaaaagacgtcactattaccaaaaaaaataacattatcgtggcgccttatatagcacttttaactatcgcatcaaaaggatgcaaacttacagaaacaatgattgaagcattctttccagaactatataatgaacatagtaagaaatttaaattcaactctcaagtatccatcatccaagaaaaactcggataccagtttggaaactatcacgtttatgattttgaaccgtattactctacagtagctctggctattcgagatgaacattcatctggcatttttaatatccgtcaagagagttatctggtaagttcattatctgaaataacatatagattttatctaattaatctaaaatctgatcttgttcaatggagtgctagtacgggcgctgtaattaatcaaatggtaaatactgtattgattacagtgtatgaaaagttacaactggtcatagaaaatgattcacaatttacatgttcattggctgtggaatcaaaacttccaataaaattacttaaagatagaaatgaattatttacaaaattcattaacgagttaaaaaagaccagttcattcaagataagcaaacgcgataaggatacgctactaaaatattttacttaggactggagttagaatttatagacgactcatttcgtttatcattgttactattattactattactatcattattagtgttggcattattagtattcttcttgtcatcttgttcagaaatatacagcaatgctatacctaatactaaatacattatcatgctcgcaatggctctaacaacaacgaaccaaaatgaatttggtcgtagcttttgttcacaaaaatacataaagaaatgtctacataaatctatggcgccattggctacttgaaatagcgccagtcctcctacagattttaatatagctgtataacatgacatttattcatcatcaaaagagacagagtcaccatctgtcatatttagattttttttcatgtgttcaaagtatcctctactcatttcattataatagtttatcatacttagaattttaggacggatcaatgagtaagacttgactagatcgtcagtagtaatttgtgcatcgtctattctgcatccgcttcgtcgaataatgtatagcatcgctttgagattctccatagctatcaagtctttatacaatgacatggaaatatctgtgaatactttatacttctccaacatcgatgccttaacatcatcgcctactttagcattgaaaatacgttctattgtgtagatggatgtagcaagatttttaaacaacaatgccatcttacacgatgattgcctcaagtctccaatcgtttgtttagaacgattagctacagagtccaatgcttggctgactagcatattattatctttagaaattgtattcttcaatgaggcgtttatcatatctgtgatttcgttagtcatattacagtctgactgggttgtaatgttatccaacatatcacctatggatacggtacacgtaccagcatttgtaataatcctatctaagatgttgtatggcattgcgcagaaaatatcttctcctgtaatatctccactctcgataaatctactcagattattcttaaatgccttattctctggagaaaagatatcagtgtccatcatttcattaatagtatacgcagaaaagataccacgagtatcaattctatccaagatacttatcggttccgagtcacagataatggtttcctctccttcgggagatcctgcatagaaatatctaggacaatagtttctatactgtctgtaactctgataatctctaaagtcactaactgataccatgaaattgagaagatcaaacgctgaagtaattaatttttctgcctcgtttttactacaactagttttcatcaatgtagtgacgatgtattgtttagttacttttggtctaatactgatgatagagatattattgcttcccataatggatcttctagtagtcaccttaaagcccattgatgcgaatagcagatagataaagtcttggtatgactcctttctaatatagtacggactacctttgtcacccaactttatacccacataagccataacaacctctttaatagccgtttcatgaggtttatcagccatgagcctgagtagttggaagaatctcatgaatcccgtctcagaaagtcctatatgcatgatagatttatctttcctgggaaactctcgtatagtcatagatgaaatactctttaaagtttctgaaataagattagtaacagtcttacctccgactactctaggtaacaaacaaactctaataggtgttttctctgcggagataatatcagaaaggatagagcaataagtagtattattgtgattataaagaccgaatacataacaggtagaatttataaacatcatgtcctgaaggtttttagacttgtattcctcgtaatccataccgtcccaaaacatggatttggtaactttgatagccgtagatctttgttccttcgccaacaggttaaagaaattaataaagaatttgttgtttctatttatgtccacaaattgcacgtttggaagcgccacggttacattcactgcagcattttgaggatcgcgagtatgaagtacgatgttattgtttactggtatatctggaaagaaatctaccagtctaggaataagagattgatatcgcatagaaatagtaaagtttataatctcatcatcgaagagcattttgttaccattgtaataaatatccactctgtcatatgtataaatgaagtactgttcaaacatgatgagatgtttatatgttggcatagtagtgagatcgacgtttggtaatggcaatgtattaagattaactccataatgtctagcagcatctgcgatgttataagcgtcgtcaaagcggggtcgatcttgtattgttatatattgtctaacacctataagattatcaaaatcttgtctgcttaatacaccgttaacaatttttgccttgaattcttttattggtgcattaataacatccttatagaggatgttaaacaaataagtgttatcaaagttaagatctggatatttcttttctgctagaacatccattgagtcggagccatctggtttaatataaccaccgataaatctagctctgtattctgtatccgtcaatctaatattaagaaggtgttgagtgaaaggtggaagatcgtaaaagctgtgagtattaatgataggattagtttccgaactaatgttaattggggtattaataatatctatatttccagcgttaagtgtaacattaaacagttttaattcacgtgacgtggtatcaattaaataattaatgcccaatttggatatagcagcctgaagctcatcttgtttagttacggatcctaatgagttattaagcaatatatcgaacggatgaacgaaggttgttttaagttggtcacatactttgtaatctagacatagatgcggaagaacggtagaaactatacgaaataaatattcagagtcctctaattgatcaagagtaactattgacttaataggcatcatttatttagtattaaatgacgaccgtaccagtgacggatatacaaaacgatttaattacagagttttcagaagataattatccatctaacaaaaattatgaaataactcttcgtcaaatgtctattctaactcacgttaacaacgtggtagatagagaacataatgccgccgtagtgtcatctccagaggaaatatcctcacaacttaatgaagatctatttccagatgatgattcaccggccactattatcgaacgagtacaacctcatactactattattgacgatactccacctcctacgtttcgtagagagttattaatatcggaacaacgtcaacaacgagaaaaaagatttaatattacagtatcgaaaaatgctgaagcaataatggaatctagatctatgataacttctatgccaacacaaacaccatccttgggagtagtttatgataaagataaaagaattcagatgttagaggatgaagtggttaatcttagaaatcaacgatctaatacaaaatcatctgataatttagataattttaccaaaatactatttggtaagactccgtacaaatcaacagaagttaataagcgtatagccatcgttaattatgcaaatttgaacgggtcccccttatcagtcgaggacttggatgtttgttcggaggatgaaatagatagaatctataaaacgattaaacaatatcacgaaagtagaaaacgaaaaattatcgtcactaacgtgattattattgtcataaacattatcgagcaggcattgctaaaactcggatttgaagaaatcaaaggactgagtaccgatatcacttcagaaattatcgatgtggagatcggagatgactgcgatgctgtagcatctaaactaggaatcggtaacagtccggttcttaatattgtattgtttatactcaagatattcgttaaacgaattaaaattatttaatttaatacattcccatatccagacaacaatcgtctggattaatctgttcctgtcgtctcataccggacgacatattaatctttttattagtgggcatctttttagatggtttctttttcccagcattaactgagtcgatacctagaagatcgtgattgatctctccgaccattccacgaacttctaattggccgtctctgacggtaccataaactattttaccagcattagtaacagcttggacaatctgaccatccatcgcattgtacgatgtagtagtaactgttgttctacgtctaggagcaccagaagtatttttggagcccttggatgttgatgtagaagaagacgaggattttgattttggtttacatgtaatacattttgaactctttgattttgtatcacatgcgccggcagtcacatctgtttgagaattaagattattgttgcctcctttgacggctgcatctccaccgatttgcgctagtagatttttaagctgtggtgtaatcttattaactgtttcgatataatcatcgtaactgcttctaacggctaaattttttttatccgccatttagaagctaaaaatatttttatttatgcagaagatttaactagattatacaatgaactaatatgatccttttccagattatttacaaacttggtattttttggttctggaggaggcgaatttaaattcggacttggattcggattttgtaagttcttgatcttattatacatcgagtataggatggcgacagtaactgctacacaaataccgatcaaaagaagaataccaatcatttattgacaataacttcactattgatcaagtatgcaatatatcatcttttcactaaataagtagtaataatgattcaacaatgtcgagatatatggacgataataatttagttcatggaaatatcgctatgattggtgtgaatgactccgctaactctgtggggtgcgcagtgctttccccacatagaataaattagcattccgactgtgataataataccaagtataaacgccataatactcaatactttccatgtacgagtgggactggtagacttactaaagtcaataaaggcgaagatacacgaaagaatcaaaagaatgattccagcgattagcacgccggaaaaataatttccaatcataagcatcatgtccatttaactaataaaaattttaaatcgccgaatgaacaaagtggaatataaaccatataaaaacaatagtttgtactgcaaaaataatatctatttttgttttcgaagatatggtaaaattaaatagtagtacacagcatgttataactaacagcagcaacggctcgtaattacttatcatttactagacgaaaaggtggtgggatattttcttgctcaaataatacgaatatatcacccatccattttatgcgatgtttatatactctaatctttaatagatctatagacgacgggtttaccaacaatatagattttatcgattcatctaatttaaacccttccttaaacgtgaatgatctattatctggcataacgatgaccctacctgatgaatcggacaatgtactgggccatgtagaataaattatcaacgaattatcgtctacgaacatttatatcatttgttttaattttaggacgcgaataaatggatataaaatagaaaataacagatattacaaccagtgttatggccgcgcccaaccaggtaggcagttttattttatcttttactacaggttctcctggatgtacgtcaccaacggcggacgtagttctagtacaattagacgtaagttccgcttgggaattttttaacgctaaagagttaacgttaatcgtgcacccaacgtatttacatctagttcgttgaacatcttgattataatataaccattttctatctctagattcgtcagtgcactcatgtaaccaacataccctaggtcctaaatatttatctccggaattagattttggataattcgcgcaccaacaatttctatttcctttatgatcgttacaaaagacgtataatgccgtatccccaaaagtaaaataatcaggacgaataattctaataaactcagaacaatatctcgcatccatatgtttggagcaaatatcggaataagtagacatagccggtttccgttttgcacgtaaccattctaaacaattggggtttccaggatcgtttctacaaaatccagtcatgaaatcgtcacaatgttctgtcttgtaattattattaaatatttttggacagtgtttggtatttgtcttagaacaacattttgccacgctatcactatcgcccaggagataatccttttttataaaatgacatcgttgcccggatgctatataatcagtagcgtgttttaaatccttaatatattcaggagttacctcgttctgataatagattaatgatccaggacgaaatttgaaagaactacatggttctccatgaattaatacatattgtttagcaaattcaggaactataaaactactacaatgatctatcgacataccatctatcaaacaaaacttgggtttaatttctcccggagatgtttcataatagtacgtataactttcttctgcaaacttaacagctctattatattcaggataattaaaacctaattccatatatttgtctcgtatatctgctattcctggtgctattttgattctattaagagtaacagctgcccccattcttaataatcgtcagtatttaaactgttaaatgttggtatatcaacatctaccttatttcccgcagtataaggtttgttgcaggtatactgttcaggaatggttacatttatacttcttctatagtcctgtctttcgatgttcatcacatatgcaaagaacagaataaacaaaataatgtaagaaataatattaaatatctgtgaattcgtaaatacattgattgccataataattacagcagctacaatacacacaatagacattcccacagtgttgccattacctccacgatacatttgagttactaagcaataggtaataactaagctagtaagaggcaatagaaaagatgagataaatatcatcaatatagagattagaggagggctatatagagccaagacgaacaaaatcaaaccgagtaacgttctaacatcattatttttgaagattcccaaataatcattcattcctccataatcgttttgcatcatacctccatctttaggcataaacgattgctgctgttcctctgtaaataaatctttatcaagcactccagcacccgcagagaagtcgtcaagcatattgtaatatcttaaataactcatttatatattaaaaaatgtcactattaaagatggagtataatctttatgccgaactaaaaaaaatgacttgtggtcaacccctaagtctttttaacgaagacggggatttcgtagaagttgaaccgggatcatcctttaagtttctgatacctaagggattttacgcctctccttccgtaaagacgagtctagtattcgagacattaacaacgaccgataataaaatcactagtatcaatccaacaaatgcgccaaagttatatcctcttcaacgcaaagtcgtatctgaagtagtttctaatatgaggaaaatgatcgaatcaaaacgtcctctatacattactcttcacttggcgtgtggatttggtaagactattaccacgtgttatcttatggctacacacggtagaaaaaccgtcatttgcgtacccaataaaatgttaatacatcaatggaagacacaggtagaggcagtcggattggaacataagatatccatagatggagtaagtagtctattaaaggaactaaagactcaaagtccggatgtattaatagtagtcagtagacatctgacaaacgatgccttttgtaaatatatcaataagcattatgatttgttcatcttggatgaatcacatacgtataatctgatgaacaatacagcagttacaagatttttagcgtattatcctccgatgatgtgttattttttaactgctacacctagaccatctaaccgaatttattgtaacagtattattaatattgccaagttatccaatctaaaaaaaactatctatgcagtagatagtttttttgagccatattccacagataatattagacatatggtaaaacgactagatggaccatctaataaatatcatatatataccgagaagttattatctgtagacgagcctagaaatcaacttattcttgataccctggtagaagaattcaagtcaggaactattaatcgcattttagttattactaaactacgtgaacatatggtattattctacaaacgattattagattttttcggaccagaggttgtatttataggagacgcccaaaatagacgtactccagatatggtcaaatcaatcaaggaactaaatagatttatattcgtatccaccttattttattccggtactggtttagatattcctagtttggattcgttgttcatttgctcggcagtaatcaacaatatgcaaatagagcaattactagggagggtatgtcgagaaacagaactattagataggacggtatatgtatttcctaacacatccatcaaagaaataaagtacatgataggaaatttcatgcaacgaattattagtctgtctgtagataaactaggatttaaacaaaaaagttatcggaaacatcaagaatccgatcccacttctgcatgtacaacatcatccagagaagaacgtgtattaaatagaatatttaactcgcaaaatcgttaagaagtttaagcgacgatccgcatgctgcgcaggccagtgtattacccctcatagtattaatataatccaatgatacttttgtgatgtcggaaatcttaaccaatttagactgacaggcagaacacgtcatgcaatcatcatcgtcatcgataactgtagtcttgggcttctttttgcgactcttcattccggaacgcacattggtgctatccatttaggtagtaaaaaataagtcagaatatgccctataacacgatcgtgcaaaacctggtatatcgtctctatctttatcacaatatagtgtatcgacatttttattattattgacctcgtttatcttggaacatggaatgggaacatttttgttatcaacggccatctttgccttaattccagatgttgtaaaattataactaaacagtctatcatcgacacaaatgaaattcttgtttagacgtttgtagtttacgtatgcggctcgttcgcgtctcattttttcagatattgcaggtactataatattaaaaataagaatgaaataacataggattaaaaataaagttatcatgacttctagcgctgatttaactaacttaaaagaattacttagtctgtacaaaagtttgagattttcagattctgcggctatagaaaagtataattctttggtagaatggggaacatctacttactggaaaataggcgtgcaaaaggtagctaatgtcgagacgtcaatatctgattattatgatgaggtaaaaaataaaccgtttaatattgatccgggctattacattttcttaccggtatattttgggagcgtctttatttattcgaagggtaaaaatatggtagaacttggatctggaaactcttttcaaataccagatgatatgcgaagtgcgtgtaacaaagtattagacagcgataacggaatagactttctgagatttgttttgttaaacaatagatggataatggaagatgctatatcaaaatatcagtctccagttaatatatttaaactagctagtgagtacggattaaacatacccaaatatttagaaattgaaatagaggaagacacattatttgacgacgagttatactctattatagaacgctctttcgatgataaatttccaaaaatatccatatcgtatattaagttgggagaacttagacggcaagttgtagactttttcaaattctcattcatgtatattgagtccatcaaggtagatcgtataggagataatatttttattcctagcgttataacaaaatcaggaaaaaagatattagtaaaagatgtagaccatttaatacgatccaaggttagagaacatacatttgtaaaagtaaaaaagaaaaacacattttccattttatacgactatgatggaaacggaacagaaactagaggagaagtaataaaacgaattatagacactataggacgagactattatgttaacggaaagtatttctctaaggttggtagtgcaggcttaaagcaattgactaataaattagatattaatgagtgcgcaactgtcgatgagttagttgatgagattaataaatccggaactgtaaaacgaaaaataaaaaaccaatcagcatttgatttaagcagagaatgtttgggatatccagaagcggattttataacgttagttaataacatgcggttcaaaatagaaaattgtaaggttgtaaatttcaatattgaaaatactaattgtttaaataacccgagtattgaaactatatatggaaactttaaccagttcgtctcaatctttaatgtcgtcaccgatgtcaaaaaaagattattcgagtgaaataatatgcgcctttgatataggtgcaaaaaatcctgccagaactgttttagaagtcaaggataactccgttagggtattggatatatcaaaattagactggagttctgattgggaaaggcgcatagctaaagatttgtcacaatatgaatacactacagttcttctagaacgtcagcctagaaggtcgccgtatgttaaatttatctattttattaaaggctttttatatcatacatcggctgccaaagttatttgcgtctcgcctgtcatgtctggtaattcatatagagatcgaaaaaagagatcggtcgaagcatttcttgattggatggacacattcggattgcgagactccgttccggatagacgcaaattagacgatgtagcggatagtttcaatttggctatgagatacgtattagataaatggaatactaattatacaccttataataggtgtaaatctagaaattacataaaaaaaatgtaataacgttagtaacgccattatggataatctatttacctttctacatgaaatagaagatagatatgccagaactatttttaactttcatctaataagttgcgatgaaataggagatatatatggtcttatgaaagaacgcatttcctcagaggatatgtttgataatatagtgtataataaagatatacatcctgccattaagaaactagtgtattgcgacatccaacttactaaacacattattaatcagaatacgtatccggtatttaacgattcttcacaagtgaaatgttgtcattatttcgacataaactcagataatagcaatattagctctcgtacagtagagatatttgagagggaaaagtcatctcttgtatcatatattaaaactaccaataagaagagaaaggtcaattacggcgaaataaagaaaactgttcatggaggcactaatgcaaattacttttccggtaaaaagtctgacgagtatctgagtactacagttagatccaacattaatcaaccttggatcaaaaccatctctaagaggatgagagttgatatcattaatcactctatagtaacgcgtggaaaaagctctatattacaaactatagaaattatttttactaatagaacatgtgtgaaaatattcaaggattctactatgcacattattctatccaaggacaaggatgaaaaggggtgtatacacatgattgacaaattattctatgtctattataatttatttctgttgttcgaagatatcatccaaaacgagtactttaaagaagtagctaatgttgtaaaccacgtactcacggctacggcattagatgagaaattattcctaattaagaaaatggctgaacacgatgtttatggagttagcaatttcaaaatagggatgtttaacctgacatttattaagtcgttggatcataccgttttcccctctctgttagatgaggatagcaaaataaagttttttaaggggaaaaagctcaatattgtagcattacgatctctggaggattgtataaattacgtgactaaatccgagaatatgatagaaatgatgaaggaaagatcgactattttaaatagcatagatatagaaacggaatcggtagatcgtctaaaagaattgcttctaaaatgaaaaaaaacactaattcagaaatggatcaacgactagggtataagtttttggtgcctgatcctaaagccggagttttttatagaccgttacatttccaatatgtatcgtattctaattttatattgcatcgattgcatgaaatcttgaccgtcaagcggccactcttatcgtttaagaataatacagaacgaattatgatagaaattagcaatgttaaagtgactcctccagattactcacctataatcgcgagtattaaaggtaagagttatgacgcattagccacgttcactgtaaatatctttaaagaggtaatgaccaaagagggtatatccatcactaaaataagtagttatgagggaaaagattctcatttgataaaaattccgctactaataggatacgggaataaaaatccacttgatacagccaagtatcttgttcctaatgtcataggtggagtctttatcaataaacaatctgtcgaaaaagtaggaattaatctagtagaaaagattacaacatggccaaaatttagggttgttaagccaaactcattcactttctcgttttcctccgtatcccctcctaatgtattaccgacaagatatcgccattacaagatatctctggatatatcacaattggaagcgttgaatatatcatcgacaaagacatttataacggtcaatattgttttgctgtctcaatatttatctagagtgagtctagaattcattagacgtagtttatcatacgatatgcctccagaagttgtctatctagtaaacgcgataatagatagtgctaaacgaattactgaatctattactgactttaatattgatacatacattaatgacctggtggaagctgaacacattaaacaaaaatctcagttaacgattaacgagttcaaatatgaaatgctgcataactttttacctcatatgaactatacacccgatcaactaaagggattttatatgatatctttactaagaaagtttctctactgtatcttccacacttctagatatccagatagagattcgatggtttgtcatcgcatcctaacgtacggcaaatattttgagacgttggcacatgatgaattagagaattacataggcaacatccgaaacgatatcatgaacaatcacaagaacagaggcacttacgcggtaaacattcatgtactaacaactcccggacttaatcacgcgttttctagcttattgagtggaaagttcaaaaagtcagacggtagttatcgaacacatcctcactattcatggatgcagaatatttctattcctaggagtgttggattttatccggatcaagtaaagatttcaaagatgttttctgtcagaaaataccatccaagtcaatatctttacttttgttcatcagacgttccggaaagaggtcctcaggtaggtttagtatctcaattgtctgtcttgagttccattacaaatatactaacgtctgagtatttggatttggaaaagaaaatttgtgagtatatcagatcatattataaagatgatataagttactttgaaacaggatttccaatcactatagaaaatgctctagtcgcatctcttaatccaaatatgatatgtgattttgtaactgactttagacgtagaaaacggatgggattcttcggtaacttggaggtaggtattactttagttagggatcacatgaatgaaattcgcattaatattggagcgggaagattagtcagaccattcttggttgtggataacggagagctcatgatggatgtgtgtccggagttagaaagcagattagacgacatgacattctctgacattcagaaagagtttccgcatgtcatcgaaatggtagatatagaacaatttacttttagtaacgtatgtgaatcggttcaaaaatttagaatgatgtcaaaggatgaaagaaagcaatacgatttatgtgactttcctgccgaatttagagatggatatgtagcatcttcactagtgggaatcaatcacaattctggacccagagctattcttggatgtgctcaagctaaacaagctatctcttgtctgagttcggatatacgaaataaaatagacaatggaattcatttgatgtatccagagaggccaatcgtgattagtaaggctttagaaacttcaaagattgcggctaattgcttcggccaacatgttactatagcattaatgtcgtacaaaggtatcaatcaagaggatggaattatcatcaaaaaacaatttattcagagaggcggtctcgatattgttacagccaagaaacatcaagtagaaattccattggaaaactttaataacaaagaaagagataggtctaacgcctattcaaaattagaaagtaatggattagttagactgaatgctttcttggaatccggagacgctatggcacgaaatatctcatcaagaactcttgaagatgattttgctagagataatcagattagcttcgatgtttccgagaaatataccgatatgtacaaatctcgcgttgaacgagtacaagtagaacttactgacaaagttaaggtacgagtattaaccatgaaagaaagaagacccattctaggagacaaatttaccactagaacgagtcaaaagggaacagtcgcgtatgtcgcggatgaaacggaacttccatacgacgaaaatggtatcacaccagatgtcattattaattctacatccatcttctctagaaaaactatatctatgttgatagaagttattttaacagccgcatattctgctaagccgtacaacaataagggagaaaaccgacctgtctgttttcctagtagtaacgaaacatccatcgatacatatatgcaattcgctaaacaatgttatgagcattcaaatccgaaattgtccgatgaagaattatcggataaaatcttttgtgaaaagattctctatgatcctgaaacggataagccttatgcatccaaagtattttttggaccaatttattacttgcgtctgaggcatttaactcaggacaaggcaaccgttagatgtagaggtaaaaagacgaagctcattagacaggcgaatgagggacgaaaacgtggaggaggtatcaagttcggagaaatggagagagactgtttaatagcgcatggtgcagccaatactattacagaagttttgaaagattcggaagaagattatcaagatgtgtatgtttgtgaaaattgtggagacatagcagcacaaatcaagggtattaatacatgtcttagatgttcaaaacttaatctctctcctctcttaacaaaaattgataccacgcacgtatctaaagtatttcttactcaaatgaacgccagaggcgtaaaagtcaaattagatttcgaacgaaggcctccttcgttttataaaccattagataaagttgatctcaagccgtcttttctggtgtaatattctagtttggtagtagatacatatcaatatcatcaaattcgagatccgaattataaaatgggcgtggattgttaactatagaatcggacgtctgatattcgaaaatctgtggagtttcaggttttggtggaggtgtaactgctacttgggatactgaagtctgatattcagaaagctgtggatgttctggttcggcatccaccgatggtgtcacatcactaatcggttcggtaacgtctgtggatggaggtgctacttctacagaacctgtagcctcagttgtcaacggagatacatttttaatgcgagaaaatgtataatttggtaatggtttcttatgtggatctgaagaagaggtaagatatctactagaaagataccgatcacgttctagttctcttttgtagaacttaactttttctttctccgcatctagttgatattccaacctcttcacgttactacgttcagattccaattcacgttcgcatgggttacctccgcagtttttacgagcgatttcacgttcagccttcatgcgtctctccctctctctatcgagtttatcagagcagtctttctgaaggcgatcgaactccataaatttctccaacgctttgattgtttccatagatttccgaagttcagcttttaggactgtgattctttttctttcgaattcacagctggatgtacaaccgtttccattaccgccatctctaagtttcttttctagatcggcaacatttcatccccatgccttttacattcctcgagtctactgtcgtcgaaatatcgttccagctccttttcgacatcaataactttagcacgttgtctctcaagctctcttttgtagttatctgattccctggcacgtttaagatcttcatgcaattgagtcagctcttaacttcctctcttgcttcttcgtcatagtacgcgcaatcactgtgagatccattgttaccacgtctacactcggcgagctcgcgtttaagagattcaatttcccgtttgtattggtccatgtttccattgctaccaccattagatttacaggctgctagttgtcgttcgagatcagaaatacgggttttcttggaattgatttcgtcgatgtacttggcatcgaaacacttattaagttctttttccaattctacgattttatttctttcgcgagtcaattccctcctgtagtaactatctgttttgtcagattcacgctctctacgtagactttcttgcaagttactaatttgttccctagcacgtccgagtttagttttatatgctgaatagagttctgattcatcctttgagcagatctctagcgatcgtttaagattcctaattctagtctttagcctatttacctcctcagaagatgttccgttaccgttgcgtttacactcgttaagctgtctatcaagatccatgattctatctctaagacgttgcatctctctttccatatcagcattgctttcattattacgtctgcagtcactcaactgtctttcaatatctgagattctatctctaagacgtcgcatctctctctgtttcggcattggtttcattattacgtctacagtcgttcaactgtctttcaagatctgatattctagattggagtctgctaatctctgtagcattttcacggcattcactcagttgtctttcaagatctgaaattttagattggagtctgctaatctctgtaagatttcctcctccgctctcgatgcagtcggtcaacttattctctagttctctaatacgcgaacgcagtgcatcaacttcttgcgtgtcttcctggttgcgtgtacattcatcgagtctagattcgagatctctaacgcgtcgtcgttcttcctcaagttctctgcgtactacagaaagcgtgtccttatcttgttgatatttagcaatttctgattctagagtactgattttgcttacgtagttactaatatttgtcttggccttatcaagatcctccttgtatttgtcgcattccttgatatccctacgaagtctggacagttcccattcgacattacgacgtttatcgatttcagctcggagatcgtcatcgcgttgttttagccacatacgactgagttcaagttctcgttgacaagatccatctacttttccattcctaatagtatccagttccttttctagttctgaacgcatttctcgttccctatcaagcgattctctcaattctcggatagtcttcttatcaatttctaataaatctgaaccatcatctgtcccattttgaatatccctgtgttctttgatctcttttgtaagtcggtcgattctttcggttttataaacagaatccctttccaaagtcctaatcttactgagtttatcactaagttctgcattcaattcggtgagttttctcttggcttcttccaactctgttttaaactctccactatttccgcattcttcctcgcatttatctaaccattcaattagtttattaataactagttggtaatcagcgattcctatagccgttcttgtaattgtgggaacataattaggatcttctaatggattgtatggcttgatagcatcatctttatcattattagggggatggacaaccttaattggttggtcctcatctcctccagtagcgtgtggttcttcaataccagtgttagtaataggcttaggcaaatgcttgtcgtacgcgggcacttcctcatccatcaagtatttataatcgggttctacttcagaatattcttttctaagagacgcgacttcgggagttagtagaagaactctgtttctgtatctatcaacgctggaatcaatactcaagttaaggatagcgaatacctcatcgtcatcatccgtatcttctgaaacaccatcatatgacatttcatgaagtctaacgtattgataaatagaatcagatttagtattaaacagatccttaacctttttagtaaacgcatatgtatattttagatctccagatttcataatatgatcacatgccttaaatgtcagtgcttccatgatataatctggaacactaatgggtgacgaaaaagatacagcaccatatgctacgttgataaataaatctgaaccactaagtagataatgattaatgttaagaaagaggaaatattcagtgtataggtatgtcttggcgtcatatcttgtactaaacacgctaaacagtttgttaatgtgatcaatttccaatagattaattagagcagcgggaataccaacaaacatattaccacatccgtattttctatgaatatcacatatcatgttaaaaaatcttgatagaagagcgaatatctcgtctgacttaatgagtcgtagttcagcagcaacataagtcataactgtaaatagaacatactttcctgtagtgttgattctagactccacatcaacaccattattaaaaatagttttatatacatctttaatctgctctccgttaatcgtcgaacgttctagtatacggaaacactttgatttcttatctgtagttaatgacttagtgatatcacgaagaatattacgaattacatttcttgtttttcttgagagacctgattcagaactcaactcatcgttccatagtttttctacctcagtggcgaaatctttggagtgcttggtacatttttcaataaggttcgtgacctccatttattataaaaaatttattcaaaacttaactacaatcgggtaattataaaatcgtagatctcccatgtggcggaatactaccatctatcgcatgtggatggacagtaggtaatggccatgggaacagtaatgtttgcatatttatctttcttgccagtattactgcatattgtcccaatgtttcgatgtgatgttctaacctatcaactgccgctgtatcacaacaatagtgtccgatgaaattaagattatgatccaatgtgtttaatatatgattatcaagtcttatacgatccgcgtcttttttgacaggatcaggttcttctacaggaagaagtttcggcctcttatgatattcatgtctgggaaacggtggtctagggtgaggctccggtatcggagtgggttttggattataatcatcatcgtctatgacatcatcttcgacttcgatatttattttgctatcttgatgatgtcctgtatcagttgcattttcagcactcgactgaatattagcgcattcattgtctattattaccatatttctaaacccaaaatgtatgtgttgaacatcagtactatcgttgatgagtcttatagcatgaattcgcttatcgttatcgggtttatcttctgtcaccttagcaattccttttttattaaactctacataatcatatccatttctattgtttgttctaatataaacgagtatagcatcattgctaaatttttcaatagtatcaaaaacagaatatcctaaaccatataatatatattcaggaacactcaaactaaatgtccaggattctcctaaatacgtaaactttaatagtgcgaaatcattcaaaaatctaccacttatagatagatagtacataaatgcgtatagtagtctacctatctctttattatgaaaaccggcattacgatcatatatgtcgtgatatacctgtgatccgtttacgttaaaccataaatacatgggtgatcctataaacatgaatttatttctaattctcagagctatagttaattgaccgtgtaatatttgcttacatgcatacttgatacgcttattaataagatttttatcattgctcgttatttcagaatcgtatatataaggagtaccatcgtgattcttaccagatattatacaaaatactatatataaaatatattgacccacgttagtaatcatataaatgtttaacgttttaaattttgtattcaatgatccattatcatacgctatcatggtcttgtaatattcattctttaaaatataatattgtgttagccattgcattggagctcctaatggagattttctattctcatccattttaggataggctttcataaagtccctaataacttcgtgaataatgtttctatgttttctactgatgcatgtatttgcttcgatttttttatcccatgtttcatctatcatagatttaaacgcagtaatgctcgcaacattaacatcttgaaccgttggtacaattccgttccataaatttataatgttcgccatttatataactcattttttgaatatacttttaattaacaaaagagttaagttactcatatggacgccgtccagtctgaacatcaatctttttagccagagatatcatagccgctcttagagtttcagcgtgattttccaacctaaatagaacttcatcgttgcgtttacaacacttttctatttgttcaaactttgttgttacattagtaatctttttttccaaattagttagccgttgtttgagagtttcctcattgtcgtcttcatcggctttaacaattgcttcgcgtttagcctctggctttttagcagcctttgtagaaaaaaattcagttgctggaattgcaagatcgtcatctccggggaaaagagttccgtccatttaaagtacagattttagaaactgacactctgcgttatttatatttggtacaacacatggattataaatattgatgttaataacatcagaaaatgtaaagtctatacattgttgcatcgtgttaaattttctaatggatctagtattattgggtccaacttctgcctgaaatccaaatatggaagcggatacaaaaccgtttcctggataaaccacacatctccacttttgctttacatcagaaattgtgtcgttgacatcttgaactctcctatctaatgccggtgttccacctatagattttgaatattcgaatgctgcatgagtagcattaaattccttaatattgccataattttcatatattgagtaaccctggataaaaagtaaacacaccgcagccgtcgctaccacaataaaaaaaattgatagagagttcatttataatctattagaagctgacaaaatttttttacacgcatcagacaatgctttaataaatagttcaacatctacttttgtcatatcgaaccgatggtatgattctaacctagaattacatccgaaaaagttgactatgttcatagtcattaagtcattaacaaacaacattccagactctggattataagacgatactgtttcgtcacaattacctaccttaatcatgtgattatgaatattggctattagagcaccttctaagaaatctataatatctttgaaacacgatttaaaatcaaaccacgaatatacttctacgaagaaagttagtttacccataggagaaataactataaatggagatctaaatacaaaatccggatctatgatagttttaacattattatattctctattaaatacctccacatctaaaaatgttaattttgaaactatgtcttcgtttattaccgtacctgaactaaacgctataagctctattgtttgagaactctttaaacgatattcttgaaatacatgtaacaaagtttcctttaactcggtcggtttatctaccatagttacagaatttgtatccttatctataatataataatcaaaatcgtataaagttatataattatcgcgttcagattgggatcttttcaaatagactaaaaaccccatttctctagtaagtatcttatgtatatgtttgtaaaatatcttcatggtgggaatatgctctaccgcagttagccattcctcattgacagcggtagatgtattagacaaaactattccaatgtttaacaagggccattttacgagattattaaatccttgtttgataaatgtagccaatgagggttcgagttcaacgacgattgaattctcttcccgcggatgctgcatgatgaacgacgggatgttgttcgattgatttggaattctttttcgactttttgtttatattaaatattttaaaatttatagcggatagcaattcatgtaccacggataatgtagacgcgtattgcgcatcgatatctttattattagataaatttatcaataaatgtgagaagtttgcctcgttaaggtcttccatttaaatattatataaacatttgtgtttgtaacttattcgtcttttatggaatagttttttactagtaaagctgcaattacacactttgtccgtaaaacataaatataaacaccagcttttatcaatcgttccaaaaagtcgacggcggacatttttaacatggcatctattttaaatacacttaggtttttggaaaaaacatcattttataattgtaacgattcaataactaaagaaaagattaagattaaacataagggaatgtcatttgtattttataagccaaagcattctaccgttgttaaatacttgtctggaggaggtatatatcatgatgatttggttgtattggggaaggtaacaattaataatctaaagatgatgctattttacatggatttatcatatcatggagtgacaagtagtggagcaatttacaaattgggatcgtctatcgatagactttctctaaataggactattgttacaaaagttaataattatgatgatacattttttgacgacgatgattgatcgctattgcacaattttgtttttgtactttctaatatagtgtttaggttctttttcatatgagaatattgatttactaaaatatctatgtttaacttttgttctatgacgtccttatcggcggtatcggtacatatacgtaattcaccttcacaaaatacggagtcttcgataataatagccaatcgattattggatctagctgtctgtatcatattcaacatgtttaatatatcctttcgtttcccctttacaggcatcgatcgtagcatattttccgcgtctgatatggaaatgttaaaactacaaaaatgcgtaatgttagcccgtcctaatattggtacgtgtctataagtttggcatagtagaataatagacgtgtttaaatgccttccaaagtttaagaattctattagagtattgcattttgatagtttatcgcctacatcatcaaaaataagtaaaaagtgtgctgattttttatgattttgtgcgacagcaatacatttttctatgttacttttagttcgtatcagattatattctagagattcctgactactaacgaaattaatatgatttggccaaatgtatccatcataatctgggttataaacgggtgtaaacaagaatatatgtttatattttttaactagtgtagaaaacagagatagtaaatagatagtttttccagatccagatcctcctgttaaaaccattctaaacggcatttttaataaattttctcttgaaaattgtttttcttggaaacaattcataattatatttacagttactaaattaatttgataataaatcaaaatatggaaaactaaggttgttagtagggaggagaacaaagaaggcacatcgtgatataaataacatttattatcatgatgacaccagaaaacgacgaagagcagacatctgtgttctccgctactgtttacggagacaaaattcagggaaagaataaacgcaaacgcgtgattggtctatgtattagaatatctatggttatttcactactatctatgattaccatgtccgcgtttctcatagtgcgcctaaatcaatgcatgtctgctaacgaggctgctattactgacgccgctgttgccgttgctgctgcatcatctactcatagaaaggttgcgtctagcactacacaatatgatcacaaagaaagctgtaatggtttatattaccagggttcttgttatatattacattcagactaccagttattctcggatgctaaagcaaattgcactgcggaatcatcaacactacccaataaatccgatgtcttgactacctggctcattgattatgttgaggatacatggggatctgatggtaatccaattacaaaaactacatccgattatcaagattctgatgtatcacaagaagttagaaagtatttttgtgttaaaacaatgaactaatatttatttttgtacattaataaatgaaatcgcttaatagacaaactgtaagtaggtttaagaagttgtcggtgccggccgctataatgatgatactctcaaccattattagtggcataggaacatttctgcattacaaagaagaactgatgcctagtgcttgcgccaatggatggatacaatacgataaacattgttatttagatactaacattaaaatgtctacagataatgcggtttatcagtgtcgtaaattacgagctagattgcctagacctgatactagacatctgagagtattgtttagtattttttataaagattattgggtaagtttaaaaaagaccaatgataaatggttagatattaataatgataaagatatagatattagtaaattaacaaattttaaacaactaaacagtacgacggatgctgaagcgtgttatatatacaagtctggaaaactggttaaaacagtatgtaaaagtactcaatctgtactatgtgttaaaaaattctacaagtgacaacaaaaaatgaattaataataagtcgttaacgtacgccgccatggacgccgcgtttgttattactccaatgggtgtgttgactataacagatacattgtatgatgatctcgatatctcaatcatggactttataggaccatacattataggtaacataaaaactgtccaaatagatgtacgggatataaaatattccgacatgcaaaaatgctactttagctataagggtaaaatagttcctcaggattctaatgatttggctagattcaacatttatagcatttgtgccgcatacagatcaaaaaataccatcatcatagcatgcgactatgatatcatgttagatatagaagataaacatcagccattttatctattcccatctattgatgtttttaacgctacaatcatagaagcgtataacctgtatacagctggagattatcatctaatcatcaatccttcagataatctgaaaatgaaattgtcgtttaattcttcattctgcatatcagacggcaatggatggatcataattgatgggaaatgcaatagtaattttttatcataaaagttgtaaagtaaataataaaacaataaatattgaactagtagtacgtatattgagcaatcagaaatgatgctggtacctcttatcacggtgaccgtagttgcgggaacaatattagtatgttatatattatatatttgtaggaaaaagatacgtactgtctataatgacaataaaattatcatgacaaaattaaaaaagataaagagttctaattccagcaaatctagtaaatcaactgatagcgaatcagactgggaggatcactgtagtgctatggaacaaaacaatgacgtagataatatttctaggaatgagatattggacgatgatagcttcgctggtagtttaatatgggataacgaatccaatgttatggcgcctagcacagaacacatttacgatagtgttgctggaagcacgctgctaataaataatgatcgtaatgaacagactatttatcagaacactacagtagtaattaatgaaacggagactgttgaagtacttaatgaagataccaaacagaatcctaactattcatccaatcctttcgtaaattataataaaaccagtatttgtagcaagtcaaatccgtttattacagaacttaacaataaatttagtgagaataatccgtttagacgagcacatagcgatgattatcttaataagcaagaacaagatcatgaacacgatgatatagaatcatcggtcgtatcattggtgtgattagtttcctttttataaaattgaagtaatatttagtattattgctgccgtcacgttgtacaaatggagatattccctgtattcggcatttctaaaattagcaattttattgctaataatgactgtagatattatatagatacagaacatcaaaaaattatatctgatgagatcaatagacagatggatgaaacggtacttcttaccaacatcttaagcgtagaagttgtaaatgacaatgagatgtaccatcttattcctcatagattatcgacgattatactctgtattagttctgtcggaggatgtgttatctctatagataatgacatcaatggcaaaaatattctaacctttcccattgatcatgctgtaatcatatccccactgagtaaatgtgtcgtagttagcaagggtcctacaaccatattggttgttaaagcggatatacctagcaaacgattggtaacatcgtttacaaacgacatactatatgtaaacaatctgtcactgattaattatttgccgttgtctgtattcattattagacgagtcaccgactatttggatagacacatatgcgatcagatatttgctaataataagtggtattcccttataaccatcgacgataagcaatatcctattccatcaaactgtataggtatgtcctctgccaagtacataaattctagcatcgagcaagatactttaatccatgtttgtaacctcgagcatccgttcgactcagtatacaaaaaaatgcagtcgtacaattctctacctatcaaggaacaaatattgtacggtagaattgataatataaatatgagcattagtatttctgtggattaatagatttctagtatggggatcattaatcatctctaatctctaaatacctcataaaacgaaaaaaaagctattatcaaatactgtacggaatggattcattctcttctctttttatgaaactctgttgtatatctactgataaaactggaagcaaaaaatctgatagaaagaataagaataagatcaaggattatatggaacacgattattataaaataacaatagttcctggttcctcttccacgtctactagctcgtggtattatacacatgcctagtaatagtctctttgcgttgacggaaagcagactagaaataacaggctaaaatgttcagacaccataatagttcccaacccagataataacagagttccatcaacacattcctttaaactcaatcccaaacccaaaaccgttaaaatgtatccggccaattgatagtagataatgaggtgtacagcgcatgataatttacacagtaaccaaaatgaaaatactttagtaattataagaaatatagacggtaatgtcatcatcaacaatccgataatatgcctgagagtaaacattgacggataaaacaaaaatgctccgcataactctatcatggcaataacacaaccaaatacttgtaagattcctaaattagtagaaaatacaacgaatatcgatgtataagtgatctcgagaaataataagaataaagtaatgcccgtaaagataaacatcaacattgtttggtaatcattaaaccaattagtatgaagttgaactaatttcacagtagattttattccagtgttatcctcgcatgtataagtacctggtaagatatctttatattccataatcaatgagacatcactatctgataacgaatgaagtctagcactagtatgccatttacttaatattgtcgtcttggaagttttattataagttaaaatatcatggttatccaatttccatctaatatactttgtcggattatctatagtacacggaataatgatggtatcattacatgctgtatactctatggtctttgtagttgttataacaaccaacgtatagaggtatatcaacgatattctaactcttgacattttttatttatttaaaatgatacctttgttatttattttattctattttgctaacggtattgaatggcataagtttgaaacgagtgaagaaataatttctacttacttattagacgacgtattatacacgggtgttaatggggcggtatacacattttcaaataataaactaaacaaaactggtttaactaataataattatataacaacatctataaaagtagaggatgcggataaggatacattagtatgcggaaccaataacggaaatcccaaatgttggaaaatagacggttcagacgacccaaaacatagaggtagaggatacgctccttatcaaaatagcaaagtaacgataatcagtcacaacggatgtgtactatctgacataaacatatcaaaagaaggaattaaacgatggagaagatttgacggaccatgtggttatgatttattcacggcggataacgtaattccaaaagatggtttacgaggagcattcgtcgataaagacggtacttatgacaaagtttacattcttttcactgatactatcggctcaaagagaattgtcaaaattccgtatatagcacaaatgtgcctaaacgacgaaggtggtccatcatcattgtctagtcatagatggtcgacgtttctcaaagtcgaattagaatgtgatatcgacggaagaagttatagacaaattattcattctagaactataaaaacagataatgatacgatactatatgtattcttcgatagtccttattccaagtccgcattatgtacctattctatgaataccattaaacaatctttttctacgtcaaaattggaaggatatacaaagcaattgccgtctccagctcctggtatatgtttaccagctggaaaagttgttccacataccacgtttgaagtcatagaacaatataatgtactagatgatattataaagcctttatctaaccaacctatcttcgaaggaccgtctggtgttaaatggttcgatataaaggagaaggaaaatgaacatcgggaatatagaatatacttcataaaagaaaattctatatattcgttcgatacaaaatctaaacaaactcgtagctcgcaagtcgatgcgcgactattttcagtaatggtaactgcgaaaccgttatttatagcagatatagggataggagtaggaatgccacaaatgaaaaaaatacttaaaatgtaatcttaatcgagtacaccacacgacaatgaacaaacataagacagattatgctggttatgcttgctgcgtaatatgcggtctaattgtcggaattatttttacagcgacactattaaaagttgtagaacgtaaattagttcatacaccattaatagataaaacgataaaagatgcatatattagagaagattgtcctactgactggataagctataataataaatgtatccatttatctactgatcgaaaaacctgggaggaaggacgtaatgcatgcaaagctctaaattcaaattcggatctaattaagatagagactccaaacgagttaagttttttaagaagccttagacgaggctattgggtaggagaatccgaaatattaaaccagacaaccccatataattttatagctaagaatgccacgaagaatggaactaaaaaacggaaatatatttgtagcacaacgaatactcccaaactgcattcgtgttacactatataacaattacactacatttttatcataccactacttcggttagatgttttagaaaaaaataaatatcgccgtaccgttcttgtttttataaaaataacaattaacaattatcaaattttttctttaatattttacgtggttgaccattcttggtggtaaaataatctcttagtgttggaatggaatgctgtttaatgtttccacactcatcgtatattttgacgtatgtagtcacatcgtttacgcaatagtcagactgtagttctatcatgcttcctacatcagaaggaggaacagttttaaagtctcttggttttaatctattaccgttagttttcatgaaatcctttgttttatccacttcacattttaaataaatgtccactatacattcttttgttaattttactagatcgtcatgggtcatagaatttataggttccgtagtccatggatccaaactagcaaacttcgcgtatacggtatcgcgattagtgtatacaccaactgtatgaaaattaagaaaacagtttaataaatcaacagaaatatttaatcctccgtttgatacagatgcgccatatttatggatttcggattcacacgttgtttgtctgaggtgttcgtctagtgttgcttctacgtaaacttcgattcccatatattctttattgtcagaatcgcataccgatttatcatcatacactgtttgaaaactaaatggtatacacatcaaaataataaataataacgagtacattctgcaatattgttatcgtaattggaaaaatagtgttcgagtgagttggattatgtgagtattggattgtatattttattttatattttgtaataagaataaaatgctaatgtcaagtttattccaatagatgtcttattaaaaacatatataataaataacaatggctgaatggcataaaattatcgaggatatctcaaaaaataataagttcgaggatgccgccatcgttgattacaagactacaaagaatgttctagctgctattcctaacagaacatttgccaagattaatccgggtgaaattattcctctcatcactaatcgtaatattctaaaacctcttattggtcagaaatattgtattgtatatactaactctctaatggatgagaacacgtatgctatggagttgcttactgggtacgcccctgtatctccgatcgttatagcgagaactcataccgcacttatatttttgatgggtaagccaacaacatccagacgtgacgtgtatagaacgtgtagagatcacgctacccgtgtacgtgcaactggtaattaaaataaaaagtaatattcatatgtagtgtcaattttaaatgatgatgatgaaatggataatatccatattgacgatgtcaataatgccggtattggcatacagttcatcgatttttagatttcattcagaggatgtggaattatgttatgggcatttgtattttgataggatctataatgtagtaaatataaaatataatccgcatattccatatagatataattttattaatcgcacgttaaccgtagatgaactagacgataatgtcttttttacacatggttattttttaaaacacaaatatggttcacttaatcctagtttgattgtctcattatcaggaaacttaaaatataatgatatacaatgctcagtaaatgtatcgtgtctcattaaaaatttggcaacgagtacatctactatattaacatctaaacataagacttattctctacatcggtccacgtgtattactataataggatacgattctattatatggtataaagatataaatgacaagtataatgacatctatgattttactgcaatatgtatgctaatagcgtctacattgatagtgaccatatacgtgtttaaaaaaataaaaatgaactcttaattatgctatgctattagaaatggataaaatcaaaattacggttgattcaaaaattggtaatgttgttaccatatcgtataacttggaaaagataactattgatgtcacacctaaaaagaaaaaagaaaaggatgtattattagcgcaatcagttgctgtcgaagaggcaaaagatgtcaaggtagaagaaaaaaatattatcgatattgaagatgacgatgatatggatgtagaaagcgcataatacgatctataaaaataagtatataaatactttttatttactgtactcttactgtgtagtggtgataccctactcgattatttttttaaaaaaaaaatacttattctgattcttctaaccatttccgtgttcgttcgaatgccacatcgacgtcaaagataggggagtagttaaaatctagttctgcattgttggtacacaccttaaatgtagtgttggatatcttcaacgtatagttgttgagtagtgatggttttctaaatagaattctcttcatatcattcttgcacgcgtacatttttagcatccatcttggaaaccttaactttcgaggttattggttgtggatcttctacaatatctatgactctgatttcttgaacatcatctgcactaattaacagttttactatatacctgcctagaaatccggcaccaccagtaaccgcgtacacggccattgctgccactcataatatcagactacttattctattttactaaataatggctgtttgtataatagaccacgataatatcagaggagttatttactttgaaccagtccatggaaaagataaagttttaggatcagttattggattaaaatccggaacgtatagtttgataattcatcgttacggagatattagtcaaggatgtgattccataggcagtccagaaatatttatcggtaacatctttgtaaacagatatggtgtagcatatgtttatttagatacagatgtaaatatatctacaattattggaaaggcgttatctatttcaaaaaatgatcagagattagcgtgtggagttattggtatttcttacataaatgaaaagataatacattttcttacaattaacgagaatggcgtttgatatatcagttaatgcgtctaaaacaataaatgcattagtttacttttctactcagcaaaataaattagtcatacgtaatgaagttaatgatacacactacactgtcgaatttgatagggacaaagtagttgacacgtttatttcatataatagacataatgacaccatagagataagaggggtgcttccagaggaaactaatattggttgcgcggttaatacgccggttagtatgacttacttgtataataagtatagttttaaactgattttagcagaatatataagacacagaaatactatatccggcaatatttattcggcattgatgacactagatgatttggctattaaacagtatggagacattgatctattatttaatgagaaacttaaagtagactccgattcgggactatttgactttgtcaactttgtaaaggatatgatatgttgtgattctagaatagtagtagctctatctagtctagtatctaaacattgggaattgacaaataaaaagtataggtgtatggcattagccgaacatatatctgatagtattccaatatctgagctatctagactacgatacaatctatgtaagtatctacgcggacacactgagagcatagaggataaatttgattattttgaagacgatgattcgtctacatgttctgccgtaaccgacagggaaacggatgtataattttttttatagcgtgaaggatatgataaaaaatataattgttgtatttatcccattccaatcaccttatatgattctgtaacacaataaaggagtcttatagatgtatagaggtcagatactggtttgataaactgtttattccacataagtatgtttgactttatggttagacccgcatactttaacaaatcactgaaaattggagttaggtattgacctctcagaatcagttgccgttctggaacattaaatgtattttttatgatatactccaacgcatttatgtgggcatacaacaagtcattactaatggaatattccaagagttttagttgtctagtatttaacaagagaagagatttcaacagactgtttatgaactcgaatgccgcctcattgtcgcttatattgatgatgtcgaattctcccaatatcatcaccgatgagtagctcatcttgttatcgggatccaagttttctaaagatgtcattaaaccctcgatcatgaatggatttatcatcatcgtttttatgttggacatgagcttagtccgtttgtccacatctatagaagatgatttctgaattatttcatatatctctctctttaactccaggaacttgtcaggatggtctactttaatatgttctcgtctaagagatgaaaatctttggatggttgcacgcgacttttctctaaaggatgacgttgcccaagatcctctcttaaatgaatccatcttatccttggacaagatggacagtctattttccttagatggtttaatatttttgttacccatgatctataaaggtagacctaatcgtctcggatgaccatatatttattttcagttttattatacgcataaattgtaaaaaatatgttaggtttacaaaaatgtctcgtggggcattaatcgtttttgaaggattggacaaatctggaaaaacaacacaatgtatgaacatcatggaatctataccggcaaacacgataaaatatcttaactttcctcagagatccactgtcactggaaaaatgatagatgactatctaactcgtaaaaaaacctataatgatcatatagttaatctattattttgtgcaaatagatgggagtttgcatcttttatacaagaacaactagaacagggaattactttaatagttgatagatacgcattttctggagtagcgtatgccgccgctaaaggcgcgtcaatgactctcagtaagagttatgaatctggattgcctaaacccgacttagttatattcttggaatctggtagcaaagaaattaatagaaacgtcggcgaggaaatttatgaagatgttacattccaacaaaaggtattacaagaatataaaaaaatgattgaagaaggagatattcattggcaaattatttcttctgaattcgaggaagatgtaaagaaggagttgattaagaatatagttatagaggctatacacacggttactggaccagtggggcaactgtggatgtaatagtgaaattacattttttataaatagatgttagtacagtgttataaatggatgaagcatattactctggcaacttggaatcagtactcggatacgtgtccgatatgcataccgaactcgcatcaatatctcaattagttattgccaagatagaaactatagataatgatatattaaacaaggacattgtaaattttatcatgtgtagatcaaacttggataatccatttatctctttcctagatactgtatatactattaaaaataactagttataagtttgaatccgtcaattttgattccaaaattgaatggactggggatggtctatacaatatatcccttaaaaattatggcatcaagacgtggcaaacaatgtatacaaatgtaccagaaggaacatacgacatatccgcatttccaaagaatgatttcgtatctttctgggttaaatttgaacaaggcgattataaagtggaagagtattgtacgggactatgcgtcgaagtaaaaattggaccaccgactgtaacattaactgaatacgacgaccatatcaatttgtacatcgagcatccgtatgctactagaggtagcaaaaagattcctatttacaaacgcggtgacatgtgtgatatctacttgttgtatacggctaacttcacattcggagattctaaagaaccagtaccatatgatatcgatgactacgattgcacgtctacaggttgcagcatagactttgtcacaacagaaaaagtgtgcgtgacagcacagggagccacagaagggtttctcgaaaaaattactccatggagttcgaaagtatgtctgacacctaaaaagagtgtatatacatgcgcaattagatccaaagaagatgttcccaatttcaaggacaaaatggccagagttatcaagagaaaatttaatacacagtctcaatcttatttaactaaatttctcggtagcacatcaaatgatgttaccacttttcttagcatgcttaacttgactaaatattcataattattttttattaatgatacaaaaacgaaataaaactgcatattatacactggttaacgcccttataggctctaaccattttcaagatgaggtccctgattatagtccttctgttcccctctatcatctactccatgtctattagacgatgtgagaagactgaagaggaaacatggggattgaaaatagggttgtgtataattgccaaagatttctatcccgaaagaactgattgcagtgttcatctcccaactgcaagtgaaggattgataactgaaggcaatggattcagggatatacgaaacaccgataaattataaaaaaagcaatgtgtccgctgtttccgttaataatactattttcgtaactggcggattattcataaataactctaatagcacgatcgtggacatttataaagacaaacaatggtcgattatagaaatggctagggtatatcacggcatcgactcgacatttggaatgttatattttgccggaggtctatccgttaccgaacaatatggtaatttagagaaaaacaacgagatatcttgttacaatcctagaacgaataagtggtttgatatttcatatactatttataagatatccatatcatcattgtgtaaactaaataacgtcttctatgtatttagtaaggacattggatatgtggaaaagtatgatggtgcatggaagttagtacatgatcgtctccccgctataaaggcattatcaacttctccttattgattgaaaatgaaaatataaatagtttttatgtatagcagtattaccctatagttttattgcttactactaacatggatacagatgttacaaatgtagaagatatcataaatgaaatagatagagagaaagaagaaatactaaaaaatgtagaaattgaaaataataaaaacattaacaagaatcatcccaatgaatatattagagaagcactcgttattaataccagtagtaatagtgattccattgataaagaagttatagaatgtatcagtcacgatgtaggaatatagatcatatctactaatttttataatcgatacaaaacataaaaaacaactcgttattacatagcaggcatggaatccttcaagtattgttttgataacgatggcaagaaatggattatcggaaatactttatattctggtaattcaatactctataaggtcagaaaaaatttcactagttcgttctacaattacgtaatgaagatagatcacaaatcacacaagccattgttgtctgaaatacgattctatatatctgtattggatcctttgactatcgacaactggacacgggaacgtggtataaagtatttggctattccagatctgtatggaattggagaaaccgatgattatatgttcttcgttataaagaattcgggaagagtattcgccccaaaggatactgaatcagtcttcgaagcatgcgtcactatgataaacacgttagagtttatacactctcgaggatttacccatggaaaaatagaaccgaggaatatactgattagaaataaacgtctttcactaattgactattctagaactaacaaactatacaagagtggaaactcacatatagattacaacgaggacatgataacttcaggaaatatcaattatatgtgtgtagacaatcatcttggagcaacagtttcaagacgaggagatttagaaatgttgggatattgcatgatagaatggttcggtggcaaacttccatggaaaaacgaaagtagtataaaagtaataaaacaaaaaaaagaatataaaaaatttatagctactttctttgaggactgttttcctgaaggaaatgaacctctggaattagttagatatatagaattagtatacacgttagattattctcaaactcctaattatgacagactacgtaaactgtttatacaagattgaaattatattcttttttttatagagtgtggtagtgttacggatatctaatattaatattagactatctctatcgcgctacacgaccaatatcgattactatggatatcttctatgaaaggagagaatgtatttatttctccagcgtcaatctcgtcagtattgacaatactgtattatggagctaatggatccactgctgaacagctatcaaaatatgtagaaacggaggagaacacggataaggttagcgctcagaatatctcattcaaatccatgaataaagtatatgggcgatattctgccgtgtttaaagattcctttttgagaaaaattggcgataagtttcaaactgttgacttcactgattgtcgcactatagatgcaatcaacaagtgtgtagatatctttactgaggggaaaatcaatccactattggatgaaccattgtctcctagcaattagtgccgtatactttaaagcaaaatggttgacgccattcgaaaaggaatttaccagtgattatcccttttacgtatctccgacggaaatggtagacgtaagtatgatgtctatgtacggcaaggcatttaatcacgcatctgtaaaagaatcattcggcaacttttcaatcatagaactgccatatgttggagatactagtatgatggtcattcttccagacaagattgatggattagaatccatagaacaaaatctaacagatacaaattttaagaaatggtgtgactttatggatgctatgtttatagatgttcacattcccaagtttaaggtaacaggctcgtataatctggtggatactctagtaaagtcaggactgacagaggtgttcggttcaactggagattatagcaatatgtgtaatttagatgtgagtgtcgacgctatgatccacaaaacgtatatagatgtcaatgaagagtatacagaagcagctgcagcaacttctgtactagtggcagactgtgcatcaacaattacaaatgagttctgtgcagatcatccgttcatctatgtgattaggcatgttgatggaaaaattcttttcgttggtagatattgctctccgacaactaattgttaaccattttttttaaaaaaaacaatgggtgatggatacacttgatggtataatgatgaatgaacgcgatgtttctgtaagcgttggcaccggaatactattcatggaaatgtttttccgttacaataaaaatagtatcaacaatcaactaatgtatgatataattaatagcgtatctataagtgtagctaattatagatatagaagctgcttttaacgacgatggtatatacatccgtagaaatatgattaacaagttgtacggatacgcatctctaactactattggcacgatcgctggaggtgtttgttattatctgttgatgcatctagttagtttgtataaataattatttcaatatactagttaaaattttaagattttaaatgtataaaaaactaataacgtttttatttgtaataggtgcattagcatcctattcgaataatgagtacactccgtttaataaactgagtgtaaaactctatatagatggagtagataatatagaaaattcatatactgatgataataatgaattggtgttaaattttaaagagtacacaatttctattattacagagtcatgcgacgtcggatttgattccatagatatagatgttataaacgactataaaattattgatatgtataccattgactcgtctactattcaacgcagaggtcacacgtgtagaatatctaccaaattatcatgccattatgataagtacccttatattcacaaatatgatggtgatgagcgacaatattctattactgcagagggaaaatgctataaaggaataaaatatgaaataagtatgatcaacgatgatactctattgagaaaacatactcttaaaattggatctacttatatatttgatcgtcatggacatagtaatacatattattcaaaatatgatttttaaaaatttaaaatatattatcacttcagtgacagtagtcaaataacaaacaacaccatgagatatattataattctcgcagttttgttcattaatagtatacacgctaaaataactagttataagtttgaatccgtcaattttgattccaaaattgaatggactggggatggtctatacaatatatcccttaaaaattatggcatcaagacgtggcaaacaatgtatacaaatgtaccagaaggaacatacgacatatccgcatttccaaagaatgatttcgtatctttctgggttaaatttgaacaaggcgattataaagtggaagagtattgtacgggactatgcgtcgaagtaaaaattggaccaccgactgtaacattgactgaatacgacgaccatatcaatttgtacatcgagcatccgtatgctactagaggtagcaaaaagattcctatttacaaacgcggtgacatgtgtgatatctacttgttgtatacggctaacttcacattcggagattctaaagaaccagtaccatatgatatcgatgactacgattgcacgtctacaggttgcagcatagactttgtcacaacagaaaaagtgtgcgtgacagcacagggagccacagaagggtttctcgaaaaaattactccatggagttcgaaagtatgtctgacacctaaaaagagtgtatatacatgcgcaattagatccaaagaagatgttcccaatttcaaggacaaaatggccagagttatcaagagaaaatttaatacacagtctcaatcttatttaactaaatttctcggtagcacatcaaatgatgttaccacttttcttagcatgcttaacttgactaaatattcataactaatttttattaatgatacaaaaacgaaataaaactgcatattatacactggttaacgcccttataggctctaaccattttcaagatgaggtccctgattatagtccttctgttcccctccatgtctattagacgatgtgagaagactgaagaggaaacatggggattgaaaatagggttgtgtataattgccaaagatttttatcccgaaagaactgattgcagtgttcatctcccaactgcaagtgaaggattgataactgaaggcaatggattcagggatatacgaaacaccgataaattataaaaaaagcaatgtgtccgctgtttccgttaataatactattttcgtaactggcggattattcataaataactctaatagcacgatcgtggacatttataaagacaaacaatggtcgattatagaaatggctagggtatatcacggcatcgactcgacatttggaatgttatattttgccggaggtctatccgttaccgaacaatatggtaatttatagaaaaacaacgagatatcttgttacaatcctagaacgaataagtggtttgatatttcatatactatttataagatatccatatcatcattgtgtaaactaaataacgtcttctatgtatttagtaaggacattggatatgtggaaaagtatgatggtgcatggaagttagtacatgatcgtctccccgctataaaggcattatcaacttctccttattgattgaaaatgaaaatataaatagtttttatgtatagcagtattaccctatagttttattgcttactactaacatggatacagatgttacaaatgtagaagatatcataaatgaaatagatagagagaaagaagaaatactaaaaaatgtagaaattgaaaataataaaaacattaacaagaatcatcccaatgaatatattagagaagcactcgttattaataccagtagtaatagtgattccattgataaagaagttatagaatgtatcagtcacgatgtaggaatatagatcatatctactaatttttataatcgatacaaaacataaaaaacaactcgttattacatagcaggcatggaatccttcaagtattgttttgataacgatggcaagaaatggattatcggaaatactttatattctggtaattcaatactctataaggtcagaaaaaatttcactagttcgttctacaattacgtaatgaagatagatcacaaatcacacaagccattgttgtctgaaatacgattctatatatctgtattggatcctttgactatcgacaactggacacgggaacgtggtataaagtatttggctattccagatctgtatggaattggagaaaccgatggattatatgttcttcgttataaagaattcgggaagagtattcgccccaaaggatactgaatcagtcttcgaagcatgcgtcactatgataaacacgttagagtttatacactctcgaggatttacccatggaaaaatagaaccgaggaatataatattaaaacttaccacgtaaaacttaaaatttaaaatgatatttcattgacagatagatcacacattatgaactttcaaggacttgtgttaactgacaattgcaaaaatcaatgggtcgttggaccattaataggaaaaggtggatttggtagtatttatactactaatgacaataattatgtagtaaaaatagagcccaaagctaacggatcattatttaccgaacaggcattttatactagagtacttaaaccatccgttatcgaagaatggaaaaaatctcacaatataaagcacgtaggtcttatcacgtgcaaggcatttggtctatacaaatccattaatgtggaatatcgattcttggtaattaatagattaggtgcagatctagatgcggtgatcagagccaataataatagactaccaaaaaggtcggtgatgttgatcggaatcgaaatcttaaataccatacaatttatgcacgagcaaggatattctcacggagatattaaagcgagtaatatagtcttagatcaaatagataagaataaattatatctagtggattacggattggtttctaaattcatgtctaatggcgaacatgttccatttataagaaatccaaataaaatggataacggtactctagaatttacacctatagattcgcataaaggatacgttgtatctagacgtggagatctagaaacacttggatattgtatgattagatggttgggaggtatcttaccatggactaagatatctgaaacaaagaattgtgcattagtaagtgccacaaaacagaaatatgttaacaatactgcgactttgttaatgaccagtttgcaatatgcacctagagaattgctgcaatatattaccatggtaaactctttgacatattttgaggaacccaattacgacaagtttcggcacatattaatgcagggtgtatattattaagtgtggtgtttggtcgataaaaattaaaaaataacttaatttattattgatctcgtgtgtacaaccgaaatcatggcgatgttttacgcacacgctctcggtgggtacgacgagaatcttcatgcctttcctggaatatcatcgactgttgccaatgatgtcaggaaatattctgttgtgtcagtttataataacaagtatgacattgtaaaagacaaatatatgtggtgttacagtcaggtgaacaagagatatattggagcactgctgcctatgtttgagtgcaatgaatatctacaaattggaaatccgatccatgatcaagaaggaaatcaaatctctatcatcacatatcgccacaaaaactactatgctctaagcggaatcgggtacgagagtctagacttgtgtttggaaggagtagggattcatcatcacgtacttgaaacaggaaacgctgtatatggaaaagttcaacatgattattctactatcaaagagaaggccaaagaaatgagtgcacttagtccaggacctatcatcgattaccacgtctggataggagattgtatctgtcaagttactgctgtggacgtacatggaaaggaaattatgaaaatgagattcaaaaagggtgcggtgcttccgatcccaaatctggtaaaagttaaacttggggagaatgatacagaaaatctttcttctactatatcggcgacaccatcgaggtaaccacctctctggaagacagcgtgaataatgtactcatgaaacgtttggaaactatacgccatatgtggtctgttgtatatgatcattttgatattgtgaatggtaaagaatgctgttatgtgcatacgcatttgtctaatcaaaatcttataccgagtactgtaaaaacaaatttgtacatgaagactatgggatcatgcattcaaatggattccatggaagctctagagtatcttagcgaactgaaggaatcaggtggatggagtcccagaccagaaatgcaggaatttgaatatccagatggagtggaagacactgaatcaattgagagattggtagaggagttcttcaatagatcagaacttcaggctggtgaatcagtcaaatttggtaattctattaatgttaaacatacatctgtttcagctaagcaactaagaacacgtatacggcagcagcttccttctatactctcatcttttaccaacacaaagggtggatatttgttcattggagttgataataatacacacaaagtatttggattcacggtgggttacgactacctcagactgatagagaatgatatagaaaagcatatcaaaagactttgtgttgtgtatttctgtgagaagaaagaggacatcaagtacgcgtgtcgattcatcaaggtatataaacctggggatgaggctacctcgacatacgtgtgcgctatcaaagtggaaagatgctgttgtgctgtgtttgcagattggccagaatcatggtatatggatactaatggtatcaagaagtattctccagatgaatgggtgtcacatataaaattttaattaatgtaactatagagaacaaataataaggttgtaatatcatatagacaataactaacaattaattagtaactgttatctcttttttaattaaccaactaactatatacctattaatacatcgtaattatagttcttaacatctattaatcattaattcgcttctttaattttttataaactaacattgttaattgaaaagggataacatgttacagaatataaattatatatggatttttttaaaaaggaaatacttgactggagtatatatttatctcttcattatatagcacgcgtgttttccaatttttccacatcccatataatacaggattataatctcgttcgaacatacgagaaagtggataaaacaatagttgattttttatctaggttgccaaatttattccatattttagaatatggggaaaatattctacatatttattctatggatgatgctaatacgaatattataattttttttctagatagagtattaaatattaataagaacgggtcatttatacacaatctcgggttatcatcatccattaatataaaagaatatgtatatcaattagttaataatgatcatccagataataggataagactaatgcttgaaaatggacgtagaacaagacattttttgtcctatatatcagatacagttaatatctatatatgtattttaataaatcatggattttatatagatgccgaagacagttacggttgtacattattacatagatgtatatatcactataagaaatcagaatcagaatcatacaatgaattaattaagatattgttaaataatggatcagatgtagataaaaaagatacgtacggaaacacaccttttatcctattatgtaaacacgatatcaacaacgtggaattgtttgagatatgtttagagaatgctaatatagactctgtagactttaatagatatacacctcttcattatgtctcatgtcgtaataaatatgattttgtaaagttattaatttctaaaggagcaaatgttaatgcgcgtaataaattcggaactactccattttattgtggaattatacacggtatctcgcttataaaactatatttggaatcagacacagagttagaaatagataatgaacatatagttcgtcatttaataatttttgatgctgttgaatctttagattatctattatccagaggagttattgatattaactatcgtactatatacaacgaaacatctatttacgacgctgtcagttataatgcgtataatacgttggtctatctattaaacaaaaatggtgattttgagacgattactactagtggatgtacatgtatttcggaagcagtcgcaaacaacaacaaaataataatggaagtactattgtctaaacgaccatctttgaaaattatgatacagtctatgatagcaattactaaacataaacagcataatgcagatttattgaaaatgtgtataaaatatactgcgtgtatgaccgattatgatactcttatagatgtacagtcgctacagcaatataaatggtatattttaagatgtttcgatgaaatagatatcatgaagagatgttatataaaaaataaaactgtattccaattagttttttgtatcaaagacattaatactttaatgagatacggtaaacatccttctttcgtgaaatgcactagtctcgacgtatacggaagtcgtgtacgtaatatcatagcatctattagatatcgtcagagattaattagtctattatccaagaagctggatcctggagataaatggtcgtgttttcctaacgaaataaaatataaaatattggaaaactttaacgataacgaactatccacatatctaaaaatcttataaacattattaaaatataaaatctaagtaggataaaatcacactacatcattgtttccttttagtgctcgacagtgtatactatttttaacgctcataaataaaaatgaaaacgatttccgttgttacgttgttatgcgtactacctgctgttgtttattcaacatgtactgtacccactatgaataacgctaaattaacgtctaccgaaacatcgtttaatgataaccagaaagttacgtttacatgtgatcagggatatcattctttggatccaaatgctgtctgtgaaacagataaatggaaatacgaaaatccatgcaaaaaaatgtgcacagtttctgattatgtctctgaactatataataaaccgctatacgaagtgaattccaccatgacactaagttgcaacggcgaaacaaaatattttcgttgcgaagaaaaaaatggaaatacttcttggaatgatactgttacgtgtcctaatgcggaatgtcaacctcttcaattagaacacggatcgtgtcaaccagttaaagaaaaatactcatttggggaatatatgactatcaactgtgatgttggatatgaggttattggtgcttcgtacataagttgtacagctaattcttggaatgttattccatcatgtcaacaaaaatgtgatatgccgtctctatctaacggattaatttccggatctacattttctatcggtggcgttatacatcttagttgtaaaagtggttttacactaacggggtctccatcatccacatgtatcgacggtaaatggaatcccatactcccaatatgtgtacgaactaacgaaaaatttgatccagtggatgatggtcccgacgatgagacagatttgagcaaactctcgaaagacgttgtacaatatgaacaagaaatagaatcgttagaagcaacttatcatataatcatagtggcgttgacaattatgggcgtcatatttttaatctccgttatagtattagtttgttcctgtgacaaaaataatgaccaatataagttccataaattgctaccgtaaatataaatccgttaaaataattaataatttaataacaaacaagtatcaaaagattaaagacttatagctagaatcaattgagatgtcttcttcagtggatgttgatatctacgatgccgttagagcatttttactcaggcactattataacaagagatttattgtgtatggaagaagtaacgccatattacataatatatacaggctatttacaagatgcgccgttataccgttcgatgatatagtacgtactatgccaaatgaatcacgtgttaaacaatgggtgatggatacacttaatggtataatgatgaatgaacgcgatgtttctgtaagcgttggcaccggaatactattcatggaaatgtttttcgattacaataaaaatagtatcaacaatcaactaatgtatgatataattaatagcgtatctataattctagctaatgagagatatagaagcgcttttaacgacgatggtatatacatccgtagaaatatgattaacaagttgtacggatacgcatctctaactactattggcacgatcgctggaggtgtttgttattatctgttgatgcatctagttagtttgtataaataattatttcaatatactagttaaaattttaagattttaaatgtataaaaaactaataacgtttttatttgtaataggtgcattagcatcctattcgaataatgagtacactccgtttaataaactgagtgtaaaactctatatagatggagtagataatatagaaaattcatatactgatgataataatgaattggtgttaaattttaaagagtacacaatttctattattacagagtcatgcgacgtcggatttgattccatagatatagatgttataaacgactataaaattattgatatgtataccattgactcgtctactattcaacgcagaggtcacacgtgtagaatatctaccaaattatcatgccattatgataagtacccttatattcacaaatatgatggtgatgagcgacaatattctattactgcagagggaaaatgctataaaggaataaaatatgaaataagtatgatcaacgatgatactctattgagaaaacatactcttaaaattggatctacttatatatttgatcgtcatggacatagtaatacatattattcaaaatatgatttttaaaaatttaaaatatattatcacttcagtgacagtagtcaaataacaaacaacaccatgagatatattataattctcgcagttttgttcattaatagtatacatgctaaaataactagttataagtttgaatccgtcaattttgattccaaaattgaatggactggggatggtctatacaatatatcccttaaaaattatggcatcaagacgtggcaaacaatgtatacaaatgtaccagaaggaacatacgacatatccgcatttccaaagaatgatttcgtatctttctgggttaaatttgaacaaggcgattataaagtggaagagtattgtacgggactatgcgtcgaagtaaaaattggaccaccgactgtaacattgactgaatacgacgaccataaacagaaaaagtgtgcgtgacagcacagggagccacagaagggtttctcgaaaaaattactccatggagttcgaaagtatgtctgacacctaaaaagagtgtatatacatgcgcaattagatccaaagaagatgttcccaatttcaaggacaaaatggccagagttatcaagagaaaatttaatacacagtctcaatcttatttaactaaatttctcggtagcacatcaaatgatgttaccacttttcttagcatgcttaacttgactaaatattcataactaatttttattaatgatacaaaaacgaaataaaactgcatattatacactggttaacgcccttataggctctaaccattttcaagatgaggtccctgattatagtccttctgttcccctctatcatctactccatgtctattagacgatgtgagaagactgaagaggaaacatggggattgaaaatagggttgtgtataattgccaaagatttctatcccgaaagaactgattgcagtgttcatctcccaactgcaagtgaaggattgataactgaaggcaatggattcagggatatacgaaacaccgataaattataaaaaaagcaatgtgtccgctgtttccgttaataatactattttcgtaactggcggattattcataaataactctaatagcacgatcgtggttaacaatatggaaaaacttgacatttataaagacaaacaatggtcgattatagaaatgcctatggctagggtatatcacggcattgactcgacatttggaatgttatattttgccggaggtctatccgttaccgaacaatatggtaatttagagaaaaacaacgagatatcttgttacaatcctagaacgaataagtggtttgatatttcatatactatttataagatatccatatcatcattgtgtaaactaaataacgtcttctatgtatttagtaaggacattggatatgtggaaaagtatgatggtgcatggaagttagtacatgatcgtctccccgctataaaggcattatcaacttctccttattgattgaaaatataaatagtttttatgtatagcagtattaccctatagttttattgcttactactaacatggatacagatgttacaaatgtagaagatatcataaatgaaatagatagagagaaagaagaaatactaaaaaatgtagaaattgaaaataataaaaacattaacaagaatcatcccaatgaatatattagagaagcactcgttattaataccagtagtaatagtgattccattgataaagaagttatagaatgtatcagtcacgatgtaggaatatagatcatatctactaatttttataatcgatacaaaacataaaaaacaactcgttattacatagcaggcatggaatccttcaagtattgttttgataacgatggcaagaaatggattatcggaaatactttatattctggtaattcaatactctataaggtcagaaaaaatttcactagttcgttctacaattacgtaatgaagatagatcacaaatcacacaagccattgttgtctgaaatacgattctatatatctgtattggatcctttgactatcgacaactggacacgggaacgtggtataaagtatttggctattccagatctgtatggaattggagaaaccgatgattatatgttcttcgttataaagaattcgggaagagtattcgccccaaaggatactgaatcagtcttcgaagcatgcgtcactatgataaacacgttagagtttatacactctcgaggatttacccatggaaaaatagaaccgaggaatatactgattagaaataaacgtctttcactaattgactattctagaactaacaaactatacaagagtggaaactcacatatagattacaacgaggacatgataacttcaggaaatatcaattatatgtgtgtagacaatcatcttggagcaacagtttcaagacgaggagatttagaaatgttgggatattgcatgatagaatggttcggtggcaaacttccatggaaaaacgaaagtagtataaaagtaataaaacaaaaaaaagaatataaaaaatttatagctactttctttgaggactgttttcctgaaggaaatgaacctctggaattagttagatatatagaattagtatacacgttagattattctcaaactcctaattatgacagactacgtaaactgtttatacaagattgaaattatattcttttttttatagagtgtggtagtgttacggatatctaatattaatattagactatctctatcgcgctacacgaccaatatcgattactatggatatcttctatgaaaggagagaatgtatttatttctccagcgtcaatctcgtcagtattgacaatactgtattatggagctaatggatccactgctgaacagctatcaaaatatgtagaaacggaggagaacacggataaggttagcgctcagaatatctcattcaaatccatgaataaagtatatgggcgatattctgccgtgtttaaagattcctttttgagaaaaattggcgataagtttcaaactgttgacttcactgattgtcgcactatagatgcaatcaacaagtgtgtagatatctttactgaggggaaaatcaatccactattggatgaaccattgtctcctagcaattagtgccgtatactttaaagcaaaatggttgacgccattcgaaaaggaatttaccagtgattatcccttttacgtatctccgacggaaatggtagacgtaagtatgatgtctatgtacggcaaggcatttaatcacgcatctgtaaaagaatcattcggcaacttttcaatcatagaactgccatatgttggagatactagtatgatggtcattcttccagacaagattgatggattagaatccatagaacaaaatctaacagatacaaattttaagaaatggtgtgactttatggatgctatgtttatagatgttcacattcccaagtttaaggtaacaggctcgtataatctggtggatactctagtaaagtcaggactgacagaggtgttcggttcaactggagattatagcaatatgtgtaatttagatgtgagtgtcgacgctatgatccacaaaacgtatatagatgtcaatgaagagtatacagaagcagctgcagcaacttctgtactagtggcagactgtgcatcaacaattacaaatgagttctgtgcagatcatccgttcatctatgtgattaggcatgttgatggaaaaattcttttcgttggtagatattgctctccgacaactaattgttaaccattttttttaaaaaaaatagaaaaaacatgtggtattagtgcaggtcgttgttcttccaattgcaattggtaagatgacggccaactttagtacccacgtcttttcaccacagcactgtggatgtgacagactgaccagtattgatgacgtcaaacaatgtttgactgaatatatttattggtcgtcctatgcataccgcaacaggcaatgcgctggacaattgtattccacactcctctcttttagagatgatgcggaattagtgttcatcgacattcgcgagctggtaaaaaatatgccgtgggatgatgtcaaagattgtacagaaatcatccgttgttatataccggatgagcaaaaaaccatcagagagatttcggccatcatcggactttgtgcatatgctgctacttactggggaggtgaagaccatcccactagtaacagtctgaacgcattgtttgtgatgcttgagatgctaaattacgtggattataacatcatattccggcgtatgaattgatgagttgtacatcttgacattttctttcttctcttctccctttcttctcttctcccttcctccctcttctccctttcccagaaacaaacttttttacccactataaaataaaatgagtatactacctgttatatttctttctatatttttttattcttcattcgttcagacttttaacgcgtctgaatgtatcgacaaagggcaatattttgcatcattcatggagttagaaaacgagccagtaatcttaccatgtcctcaaataaatacgctatcatccggatataatatattagatattttatgggaaaaacgaggagcggataatgatagaattataccgatagataatggtagcaatatgctaattctgaacccgacacaatcagactctggtatttatatatgcattaccacgaacgaaacctactgtgacatgatgtcgttaaatttgacaatcgtgtctgtctcagaatcaaatatagattttatctcgtatccacaaatagtaaatgagagatctactggcgaaatggtatgtcccaatattaatgcatttattgctagtaacgtaaacgcagatattatatggagcggacatcgacgccttagaaataagagacttaaacaacggacacctggaattattaccatagaagatgttagaaaaaatgatgctggttattatacatgtgttttagaatatatatacggtggcaaaacatataacgtaaccagaattgtaaaattagaggtacgggataaaataataccttctactatgcaattaccagatggcattgtaacttcaataggtagtaatttgactattgcatcgttgagacctcccacaacggatgcagacgtcttttggataagtaatggtatgtattacgaagaagatgatggggacggaaacggtagaataagtgtagcaaataaaatctatatgaccgataagagacgtgttattacatcccggttaaacattaatcctgtcaaggaagaagatgctacaacgtttacgtgtatggcgtttactattcctagcatcagcaaaacagttactgttagtataacgtgaatgtatgttgttacatttccatgtcaattgagtttataagaatttttatacattatcttccaacaaacaattgacgaacgtattgctatgattaactcccacgatactatgcatattattaatcattaacttgcagactatacctagtgctattttgacatactcatgttcttgtgtaattgcggtatctatattattaaagtacgtaaatctagctatagttttattatttaattttagataatataccgtctccttatttttaaaaattgccacatcctttattaaatcatgaatgggaatttctatgtcatcgttagtatattgtgaacaacaagagcagatatctataggaaagggtggaatgcgatacattgatctatgtagttttaaaacacacgcgaactttgaagaatttatataaatcattccatcgatacatccttctatgttgagatgtatatatccaggaattcgtttattaatatcgggaaatgtataaactaaaacattgcccgaaagcggtgcctctatctgcgttatatccgttcttaacttacaaaatgtaaccaatacctttgcatgacttgttttgttcggcaacgttagtttaaacttgacgaatggattaattacaatagcatgatccgcgcatctattaagtttttttactttaacgcccttgtatgtttttacagagactttatctaaatttctagtgcttgtatgtgttataaatataacgggatatagaaccgaatcacctaccttagatacccaattacattttatcagatccagataataaacaaattttgtcgccctaactaattctatattgttatatattttacaattggttatgatatcatgtaataacttggagtctaacgcgcatcgtcgtacgtttatacaattgtgatttagtgtagtatatctacacatgtatttttccgcactatagtattctggactagtgataaaactatcgttatatctatcttcaatgaactcatcgagatattgctctctgtcatattcatacacctgcataaactttctagacatcttacaatccgtgttattttaggatcatatttacatatttacgggtatatcaaagatgttagattagttaatgggaatcgtctataataatgaatattaaacaattatatgaggacttttaccacaaagcatcataaaaatgagtcgtcgtctgatttatgttttaaatatcaaccgcaaatcaactcataaaatacaagagaatgaaatatatacatattttagtcattgcaatatagaccatacttctacagaacttgattttgtagttaaaaactatgatctaaacagacgacaacctgtaactgggtatactgcactacactgctatttgtataataattactttacaaacgatgtactgaagatattattaaatcatggagtggatgtaacgatgaaaaccagtagcggacgtatgcctgtttatatattgcttactagatgttgtaatatttcacatgatgtagtgatagatatgatagacaaagataaaaaccacttattacatagagactattccaacctattactagagtatataaaatctcgttacatgttattaaaggaagaggatatcgatgagaacatagtatccactttattagataagggaatcgatcctaactttaaacaagacggatatacagcgttacattattattatttgtgtctcgcacacgtttataaaccaggtgagtgtagaaaaccgataacgataaaaaaggccaagcgaattatttctttgtttatacaacatggagctaatctaaacgcgttagataattgtggtaatacaccattccatttgtatcttagtattgaaatgtgtaataatattcatatgactaaaatgctgttgacttttaatccgaatttcgaaatatgtaataatcatggattaacgcctatactatgttatataacttccgactacatacaacacgatattcttgttatgttaatacatcactatgaaacaaatgttggagaaatgccgatagatgagcgtcgtatgatcgtattcgagtttatcaaaacatattctacacgtccggcagattcgataacttatttgatgaataggtttaaaaatataaatatttatacccgctatgaaggaaagacattattacacgtagcatgtgaatataataatacacacgtaatagattatcttatacgtatcaacggagatataaatgcgttaaccgacaataacaaacacgctacacaactcattatagataacaaagaaaattccccatataccattaattgtttactgtatatacttagatatattgtagataagaatgtgataagatcgttggtggatcaacttccatctctacctatcttcgatataaaatcatttgagaaattcatatcctactgtatacttttagatgacacattttacgataggcacgttaagaatcgcgattctaaaacgtatcgatacgcattttcaaaatacatgtcgtttgataaatacgatggtataataactaaatgtcacgacgaaacaatgttactcaaactgtccactgttctagacactacactatatgcagttttaagatgtcataattcgagaaagttaagaagatacctcaacgagttaaaaaaatataataacgataagtcctttaaaatatattctaatattatgaatgagagataccttaatgtatattataaagatatgtacgtgtcaaaggtatatgataaactatttcctgttttcacagataaaaattgtctactaacattactaccttcagaaattatatacgaaatattatacatgctgacaattaacgatctttataatatatcgtatccacctaccaaagtatagttgtatttttctcatgcgatgtgtgtaaaaaaactgatattatataaatattttagtgccgtataataaagatgacgatgaaaatgatggtacatatatatttcgtatcattattgttattgctattccacagttacgccatagacatcgaaaatgaaatcacagaattcttcaataaaatgagagatactctaccagctaaagactctaaatggttgaatccagcatgtatgttcggaggcacaatgaatgatatagccgctctaggagagccattcagcgcaaagtgtcctcctattgaagacagtcttttatcgcacagatataaagactatgtggttaaatgggagaggctagaaaagaatagacggcgacaggtttctaataaacgtgttaaacatggtgatttatggatagccaactatacatctaaattcagtaaccgtaggtatttgtgcaccgtaactacaaagaatggtgactgtgttcagggtatagttagatctcatattaaaaaacctccttcatgcattccaaaaacatatgaactaggtactcatgataagtatggcatagacttatactgtggaattctttacgcaaaacattataataatataacttggtataaagataataaggaaattaatatcgacgacattaagtattcacaaacgggaaaggaattaattattcataatccagagttagaagatagcggaagatacgactgttacgttcattacgacgacgttagaatcaagaatgatatcgtagtatcaagatgtaaaatacttacggttataccgtcacaagaccacaggtttaaactaatactagatccgaaaatcaacgtaacgataggagaacctgccaatataacatgcactgctgtgtcaacgtcattattgatcgacgatgtactgattgaatgggaaaatccatccggatggcttataggattcgattttgatgtatactctgttttaactagtagaggcggtatcaccgaggcgaccttgtactttgaaaatgttactgaagaatatataggtaatacatataaatgtcgtggacacaactattattttgaaaaaacccttacaactacagtagtattggagtaaatatacaatgcatttttatatacattactgaattattattactgaattattattactgaattattattaattatatcgtatttgtgctatagaatggatgaagatacgcgactatctaggtatttgtatctcaccgatagagaacatataaatgtagactctattaaacagttgtgtaaaatatcagatcctaatgcatgttatagatgtggatgtacggctttacatgagtacttttataattatagatcagtcaacggaaaatacaagtatagatacaacggttactatcaatattattcatctagcgattatgaaaattataatgaatattattatgatagaactggtatgaacagtgagagtgataatatatcaatcaaaacagaatatgaattctatgatgaaacacaagatcaaagtacacaactagtaggttacgacattaaactcaaaaccaatgaggatgattttatggctatgatagatcagtgggtgtccatgattatatagatgaatcaattaataaagtagtatatggaagagagtctcacgtaagatggcgggatatatggcaagaacataatgatggcgtatacagtataggaaaggagtgcatagataatatatacgaagacaaccataccgtagacgaattctacaagatagacagcgtatcagatgtagatgacgcggaacacatatctccgataactaaaaaaccatagaatcagttgatgataatacctacatttctaatcttccgtataccatcaaatacaaaatattcgagcaacaataagtattttttatacctttaaaactgataaataaattttttctagtgatattttggcaagatgagaatcctatttctcatcgctttcatgtatgggtgtgttcactcatatgttaacgcggttgaaaccaaatgtccaaatctagacattgtaacatcttctggagaatttcattgttcaggatgtgtggaacatatgcctgagtttagctatatgtattggttggcaaaggatatgaaatcggacgaggataccaagtttatagaacatctgggtgatggcatcaaagaagatgaaaccgttcgtaccacagatagtggaatcgtcactctacgtaaagtccttcatgtaaccgatactaataaatttgataattataggttcacttgtgtcctcactacgatagatggcgtttcaaaaaagaatatttggctgaagtagtgcgtgctactatttttatttatgatataatctaatggaattaatttgaattgatatttatccaatactaaagattatattagaatcaaattaatcttttatacgagaaaaaataacgacatacgtcgtcaacaaattaaactttttatttattagttaactagcttatagaacttgctcattgttatgtttctaaaacgggtacggcatataggacaattatccgacgcaccggtttctcttcgtgttctatgccatatattgatgcatgttatgcaaaatatatgagtacacgaatccaataaaccaaagtatctatcgttttgagtaaacaacttcatagcaaattccacattctttttctttacttactctatacacgtcctcgtatttatttagtattttgatgatatccaactcagaaatggttgttgtattattgggtgtataggtattattagctatgtaccaatttaccaaccctcttaatattgattgataatcacatcggttatccaatcaataaccacattaataactaaattgtagtgtatatatagaccatatatgtttctatttttttgacagttacgtatagtttcagtaagttttgattgttgtattcctgtatctctagataagttagtcatatagtcccttccggcgatacgttttttccaagcccgaaattgattagccaaatgtgtatttatttttgtgatattgatataatatttcggataatgcatactgttagtcttatatcatttggttcatctatgtattgtaatattgttacatgatctatagatgatgtattgattttggcaggatcgaattccatatccgcgactaaacagtgaaaaaaatgtaaatactttttaaattttaaattagtaaaacttttttttattttttatgattccaaaaatactgaatacaaagtcctaaattataaatatggagatcatactaccacaacttattattatgtatacaaggccggtgtaatagatagatatatataattctattacaccggcagacaattaccgaccggtatttgtcgttaccaacataccgtataatatgtaatatacaattccataacccattgacagttgttatacatcaaaattgcaattcttttgattacgatgttataagaatgtagttaattgatgtatgatgttaatgtgtcctctttcctcttataacatcgtaatcaaaaacttttttataatatatacctaataatgtgtcttaatagttctcgtgattcgtcaaacaatcattcttataaaatataataaagcaacgtaaaaacacataaaaataagcgtaactaataagacaatggatatttacgacgataaaggtctacagactattaaactgtttaataatgaatttgattgtataaggaatgacatcagagaattatttaaacatgtaactgattccgatagtatacaacttccgatggaagacaattctgatattatagaaaatatcagaaaaatactatatagacgattaaaaaatgtagaatgtgttgacatcgataacacaataacttttatgaaatacgatccaaatgatgataataagcgtacgtgttctaattgggtacccttaactaataactatatggaatattgtctagtaatatatttggaaacaccgatatgtggaggcaaaataaaattataccaccctacaggaaatataaagtcggataaggatattatgtttgcaaagactctagactaagatagacagcgtatcagatgtagatgacgcggaacacatatctcctataactaatgatgtatctacacaaacatgggaaaagaaatcagagttagatagatacatggaatcgtatcctcgtcatagatatagtaaacattctgtatttaagggattttctgataaagttagaaaaaatgatttagacatgaatgtggtaaaagaattactttctaacggtgcatctctaacaatcaaggatagcagtaataaggatccaattgctgtttattttagaagaacgataatgaatttagaaatgattgatattattaacaaacatacaactattgatgaacgaaagtatatagtacactcctatctaaaaaattatagaaatttcgattatccatttttcaggaagttagttttgactaataaacattgtctcaacaattattataatataagcgacagcaaatatggaacaccgctacatatattggcgtctaataaaaaattaataactcctaattacatgaagttattagtgtataacggaaatgatataaacgcacgaggtgaagatacacaaatgcgaaccaactcagaaatggttgttgtattattgggtgtataggtattattagctatgtaccaatttaccaaccctcttaatattgattgataatcacatcggttatccaattaataactaaattgtagtgtatatatagaccatatatgtttctatttttttgacagttacgtatagtttcagtaagttttgattgttgtattcctgtatctctagataagttagtcatatagtcccttccggcgatacgttttttccaagcccgaaattgattagccaaatgtgtatttatttttgtgatattgatataatatttcggataatgcatactgttagtcttatatcatttggttcatctatgtattgtaatattgttacatgatctatagatgatgtattgattttggcaggatcgaattccatatccgcgactaaacagtgaaaaaaatgtaaatactttttaaattttaaattagtaaaacttttttttattttttatgattccaaaaatactgaatacaaagtcctaaattataaatatggagatcatactaccacaacttattattatgtatacaaggccggtgtaatagatagatatatataattctattacaccggcagacaattaccgaccggtatttgtcgttaccaacataccgtataatatgtaatatacaattccataacccattgacagttgttatacatcaaaattgcaattcttttgattacgatgttataagaatgtagttaattgatgtatgatgttaatgtgtcctctttcctcttataacatcgtaatcaaaaacttttttataatatatacctaataatgtgtcttaatagttctcgtgattcgtcaaacaatcattcttataaaatataataaagcaacgtaaaaacacataaaaataagcgtaactaataagacaatggatatttacgacgataaaggtctacagactattaaactgtttaataatgaatttgattgtataaggaatgacatcagagaattatttaaacatgtaactgattccgatagtatacaacttccgatggaagacaattctgatattatagaaaatatcagaaaaatactatatagacgattaaaaaatgtagaatgtgttgacatcgataacacaataacttttatgaaatacgatccaaatgatgataataagcgtacgtgttctaattgggtacccttaactaataactatatggaatattgtctagtaatatatttggaaacaccgatatgtggaggcaaaataaaattataccaccctacaggaaatataaagtcggataaggatattatgtttgcaaagactctagactttaaatcaacgaaagtgttaactggacgtaaaacaattgccgttctagacatatccgtttcatataatagatcaatgactactattcactacaacgacgacgttgatatagatatacatactgataaaaatggaaaagagttatgttattgttatataacaatagatgatcattacttggttgatgtggaaactataggagttatagtcaatagatctggaaaatgtctgttagtaaataaccatctaggtataggtatcgttaaagataaacgtataagcgatagttttggagatgtatgtatggatacaatatttgacttttctgaagcacgagagttattttcattaactaatgatgataacaggaatatagcatgggacactgataaactagacgatgatacagatatatggactcccgtcacagaagatgattacaaatttctttctagactagtattgtatgcaaaatctcaatcggatactgtatttgactattatgttcttactggtgatacggaaccacccactgtattcattttcaaggtaactagattttactttaatatgccgaaataaaaaatttttgtataatatctagaggtagaggtattgtttagataaatacaaataacatagatacatcgcatacttagcatttttataaatatacataagacatacactttatacatttttgtaaaaatactcataaaaaaatttataaaaattatggcacaaccatatcttgtataggtagtttagttcgtcgagtgaacctataaacagataatagacaacacataataatgcctactaatacaagcataataccgggagatgggatatatgacgttgtagtgtttgggttttctgaacgttgatagtctactaatactacatgctgacatctaatgcctgtataaccatgagagcatctacaatacataccgtcaatatctctagcgtggatacagtcaccgtgtaaacaatatccatctccctctggaccgcataatctgatagctggaatatctgttgtagcgtttgtaatttctggcaatgtcgtttcgatagcgttaccactatcggcgaatgatctgattatcatagcagcgaacaacaacatcagataatttatcaacatttttgatggattctgtgtttatgctgtttctcagtgtgtgtttatgacaagattgggaattttatattattaattcagtaatataaactaataatatattgttaattgtgtaaataatataaaaataacaatacaatattgaatgtgttgctgttaaaaatgtatgtgttaatataatagaataaaataaatgagtatgatcattttagataacgattgattttatcattaccgcttcattcttatattctttgcttacggaacctatatttagaaacatctactaacaattttttatgcttgcattattaatggtatgtaatatgattgattgtgtacgcaataccaatttgttaagtatgaatacggggtacaaacataaattgaaatttaacattatttatttatgatatatatcgttatcgttaggtctataccatggatatctttaaagaactaatcttaaaacaccctgatgaaaatgttttgatttctccagtttccattttatctactttatctattctaaatcatggagcagctggttctacagctgaacaactatcaaaatatatagagaatatgaatgagaatacacccgatgacaataatgatgacatggaggtagatattccgtattgtgcgacactagctaccgcaaataaaatatacggtagcgatagtatcgagttccacgcctccttcctacaaaaaataaaagacgattttcaaactgtaaactttaataatgctaaccaaacaaaggaactaatcaacgaatgggttaagacaatgacaaatggtaaaattaattccttattgactagtccgctatccattaatactcgtatgacagttgttagcgccgtccattttaaagcaatgtggaaatatccattttctaaacatcttacatatacagacaagttttatatttctaagaatatagttaccagcgttgatatgatggtgggtaccgagaataacttgcaatatgtacatattaatgaattattcggaggattctctattatcgatattccatacgagggaaactctagtatggtaattatactaccggacgacatagaaggtatatataacatagaaaaaaatataacagatgaaaaatttaaaaaatggtgtggtatgttatctactaaaagtatagacttgtatatgccaaagtttaaagtggaaatgacagaaccgtataatctggtaccgattttagaaaatttaggacttactaatatattcggatattatgcagattttagcaagatgtgtaatgaaactatcactgtagaaaaatttctacatacgacgtttatagatgttaatgaggagtatacagaagcatcggccgttacaggagtatttacgattaacttttcgatggtatatcgtacgaaggtctacataaaccatccattcatgtacatgattaaagacaccacaggacgtatactttttatagggaaatactgctatccgcaataaatataaacaaatagacttttataaagagtcttcaacgataagtatatcgacatactacttatgctgcgaaagattctgaacgagaacgactatctcaccctcttggatcatatccgcactgctaaatactaaatctccactacactttttatcatcttatgaggaatgattgccttcgtgaaataggaataattagcaccagaatagctatggattattgtggtagagagtgcactattctatgtcgtctactggatgaagatgtgacgtacaaaaaaataaaactagaaattgaaacgtgtcacaacttatcaaaacatatagatagacgaggaaacaatgcgctacattgttacgtctccaataaatgcgatacagacattaagattgttctctcgcggagtcgagagactttgtagaaacaacgaaggattaactccgctaggagtatacagtaagcatagatacgtaaaatctcagattgtgcatctactgatatccagctattcaaattcctctaacgaactcaagtcgaatataaatgatttcgatctgtattcggataatatcgacttacgtctgctaaaatacctaattgtggataaacggatacgtccgtccaagaatacgaattatgcaatcaatggtctcggattggtggatatatacgtaacgacgcctaatccgagaccagaagtattgctatggcttcttaaatcagaatgttacagcaccggttacgtatttcgtacctgtatgtacgacagtgatatgtgtaagaactctcttcattactatatatcgtctcatagagaatctcaatctctatccaaggatgtaattaaatgtttgatcgataacaatgtttccatccatggcagagacgaaggaggatctttacccatccaatactactggtctttctcaaccatagatatagagattgttaaattattattaataaaggatgtggacacgtgtagagtatacgacgtcagccctatattagaggcgtattatctaaacaagcgatttagagtaaccccatataatgtagacatggaaatcgttaatcttcttattgagagacgtcatactcttgtcgacgtaatgcgtagtattacttcgtacgattccagagaatataaccactacatcatcgataacattctaaagagatttagacaacaggatgtacaagccatgttgataaactacttacattacggcgatatggtcgttcgatgcatgttagataacggacaacaactatcctctgcacgactactttgttaataataatctcgtcgatgtaaacgtcgtaaggtttatcgtggaaaatatggacacgcggctgtaaatcacgtatcgaacaatggccgtctatgtatgtacggtctgatattatcgagatttaataattgcgggtatcactgttatgaaaccatactgatagatgtatttgatatactaagcaagtacatggatgatatagatatgatcgataactctactatattacgcggtcgatgtcaataatatacaatttgcaaagcggttattggaatatggagcgagtgtcacgctcgataatcaatacggccatccagaaaagcagttaccaaagagaaaacaaaacgaagctagttgatttattactgagttaccatcccactctagagactatgattgacgcatttaatagagatatacgctatctatatcctgaaccattattcgcctgtatcagatacgccttaatcctagatgatgattttccttctaaagtaaagtatgatatcgccggtcgtcataaggaactaaagcgctatagagtagacattaatagaatgaagaatgtctacatatcaggcgtctccatgtttgatatattatttaaacgaagcaaacgccacaaattgagatacgcaaagaatccgacatcaaatggtacaaaaaagaactaacgtccatcattacagaaactgtaaagaacaatgagaggatcgactccatagtggacaacattaatacagacgataacttgatttcgaaattacccatggagatactttattactccattaaataatttatcatggagcgataatgtcctgtttcatttgtttccatgacatattacaaaatcgattccgtccaagatgataaaaacatttaccggcatcataaacacggagtttattttatatgtctcgcataaacattactaaaaaaatatattgtcgataacttgatttcgaaattacccatggagatactttattactccattaaataatttatcatggagcgataatgtcctgtttcatttgtttccatgacatattacaaaatcgattccgtccaagatgataaaaacatttaccggcatcataaacacggagtttattttatatgtctcgcataaacattactaaaaaaatatattgttctgtttttctttcacatctttaattatgaaaaagtaaatcattatgagatggacgagattgtacgcatcgttcgcgacagtatgtggtacatacctaacgtatttatggacgacggtaagaatgaaggtcacgtttctgtcaacaatgtctgtcatatgtattttacgttctttgatgtggatacatcgtctcatctgtttaagctagttattaaacactgcgatctgaataaacgaggtaactctccattacattgctatacgatgaatacacgatttaatccatctgtattaaagatattgttacaccacggcatgcgtaactttgatagcaaggatgaccactatcaatcgataacaagatctttgatatactaacggacaccattgatgactttagtaaatcatccgatctattgctgtgttatcttagatataaattcaatgggagcttaaactattacgttctgtacaaaggatccgaccctaattgcgccgacgaggatgaactcacttctcttcattactactgtaaacacatatccacgttctacgaaagcaattattacaagttaagtcacactaagatgcgagccgagaagcgattcatctacgcgataatagattatggagcaaacattaacgcggttacacacttaccttcaacagtataccaaacatagtcctcgtgtggtgtatgctcttttatctcgaggagccgatacgaggatacgtaataatcttgattgtacacccatcatggaacgattgtgcaacaggtcatattctcataatgttactcaattggcacgaacaaaaggaagaaggacaacatctactttatctattcataaaacataatcaaggatacactctcaatatactacggtatctattagataggttcgacattcagaaagacgaatactataataccgcctttcaaaattgtaacaacaatgttgcctcatacatcggatacgacatcaaccttccgactaaagacggtattcgacttggtgtttgaaaacagaaacatcatatacaaggcggatgttgtgaatgacatcatccaccacagactgaaagtatctctacctatgattaaatcgttgttctacaagatgtctctccctacgacgattactacgtaaaaaagatactagcctactgcctattaagggacgagtcattcgcggaactacatagtaaattctgtttaaacgaggactataaaagtgtatttatgaaaaatatatcattcgataagatagattccatcatcgtgacataagtcgcctcaaagagattcgaatctccgacaccgacctgtatacggtatcacagctatcttaaagccatacattcagacagtcacatttcatttcccatgtacgacgatctcatagaacagtgccatctatcgatggagcgtaaaagtaaactcgtcgacaaagcactcaataaattagagtctaccatcggtcaatctagactatcgtatttgcctccggaaattatgcgcaatatcatctaaacagtatgttgtacggaaagaaccattacaaatattatccatgatagaaagaaaatatctatatgattggagaagtaggaaacaggaacaagacaacgattactacattattaaatcatgaagtccgtattatactcgtatatattgtttctctcatgtataataataaacggaagagatatagcaccgcatgcaccatccgatggaaagtgtaaagacaacgaatacaaacgccataatttgtgtccgggaacatacgcttccagattatgcgatagcaagactaacacacgatgtacgccgtgtggttcgggtaccttcacatctcgcaataatcatttacccgcttgtctaagttgtaacggaagacgcgatcgtgtaacacgactcacaatagaatctgtgaatgctctcccggatattattgtcttctcaaaggatcatccggatgcaaggcatgtgtttcccaaacaaaatgtggaataggatacggagtatccggagacgtcatctgttctccgtgtggtctcggaacatattctcacaccgtctcttccgcagataaatgcgaacccgtacccagaaatacgtttaactatatcgatgtggaaattaacctgtatccagttaacgacacgtcgtgtactcggacgaccactaccggtctcagcgaatccatctcaacgtcggaactaactattactatgaatcataaagactgtaatcccgtatttcgtgatggatacttctccgttcttaataaggtagcgacttcaggtttctttacaggagaaaggtgtgcactctgaatttcgagattaaatgcaataacaaagattcttcctccaaacagttaacgaaagcaaagaatgatactatcatgccgcattcggagacagtaactctagtgggcgacatctatatactatatagtaataccaatactcaagactacgaaactgatacaatctcttatcatgtgggtaatgttctcgatgtcgatagccatatgcccggtagttgcgatatacataaactgatcactaattccaaacccacccactttttatagtaagtttttcacccataaataataaatacaataattaatttctcgtaaaagtagaaaatatattctaatttattgcacggtaaggaagtagaatcataaagaacagtactcaatcaatagcaattatgaaacaatatatcgtcctggcatgcatgtgcctggcggcagctgctatgcctgccagtcttcagcaatcatcctcatcctcctcctcgtgtacggaagaagaaaacaaacatcatatgggaatcgatgttattatcaaagtcacaaagcaagaccaaacaccgaccaatgataagatttgccaatccgtaacggaaattacagagtccgagtcagatccagatcccgaggtggaatcagaagatgattccacatcagtcgaggatgtagatcctcctaccacttattactccatcatcggtggaggtctgagaatgaactttggattcaccaaatgtcctcagattaaatccatctcagaatccgctgatggaaacacagtgaatgctagattgtccagcgtgtccccaggacaaggtaaggactctcccgcgatcactcatgaagaagctcttgctatgatcaaagactgtgaagtgtctatcgacatcagatgtagcgaagaagagaaagacagcgacatcaagacccatccagtactcgggtctaacatctctcataagaaagtgagttacgaagatatcatcggttcaacgatcgtcgatacaaaatgcgtcaagaatctagagtttagcgttcgtatcggagacatgtgcaaggaatcatctgaacttgaggtcaaggatggattcaagtatgtcgacggatcggcatctgaaggtgcaaccgatgatacttcactcatcgattcaacaaaactcaaagcgtgtgtctgaatcgataactctattcatctgaaattggatgagtagggttaatcgaacgattcaggcacaccacgaattaaaaaagtgtaccggacactatattccggtttgcaaaacaaaaatgttcttaactacattcacaaaaagttacctctcgcgacttcttctttttctgtctcaatagtgtgatacgattatgacactattcctattcctattcctatttcctttcagagtatcacaaaaatattaaacctctttctgatggtctcataaaaaaagttttacaaaaatatttttattctctttctctctttgatggtctcataaaaaaagttttacaaaaatatttttattctctttctctctttgatggtctcataaaaaaagttttacaaaaatatttttattctctttctctctttgatggtctcataaaaaaagttttacaaaaatatttttattctctttctctctttgatggtctcataaaaaaagttttacaaaaatatttttattctctttctctctttgatggtctcataaaaaaagttttacaaaaatatttttattctctttctctctttgatggtctcataaaaaaagttttacaaaaatatttttattctctttctctctttgatggtctcataaaaaaagttttacaaaaatatttttattctctttctctctttgatggtctcataaaaaaagttttacaaaaatatttttattctctttctctctttgatggtctcataaaaaaagttttacaaaaatatttttattctctttctctctttgatggtctcataaaaaaagttttacaaaaatatttttattctctttctctctttgatggtctcataaaaaaagttttacaaaaatatttttattctctttctctctttgatggtctcataaaaaaagttttacaaaaatatttttattctctttctctctttgatggtctcataaaaaaagttttacaaaaatatttttatt

SEQ ID NO: 3 - DNA, 201446 bp, Artificial Sequence
  GLV-1h188 genome
ttatgagaccatcaaagagagaaagagaataaaaatatttttgtaaaactttttttatgagaccatcaaagagagaaagagaataaaaatatttttgtaaaacttttttatgagaccatcaaagagagaaagagaataaaaatatttttgtaaaacttttttatgagaccatcaaagagagaaagagaataaaaatatttttgtaaaactttttttatgagaccatcaaagagagaaagagaataaaaatatttttgtaaaactttttttatgagaccatcaaagagagaaagagaataaaaatatttttgtaaaactttttttatgagaccatcaaagagagaaagagaataaaaatatttttgtaaaactttttttatgagaccatcaaagagagaaagagaataaaaatatttttgtaaaactttttttatgagaccatcaaagagagaaagagaataaaaatatttttgtaaaactttttttatgagaccatcaaagagagaaagagaataaaaatatttttgtaaaactttttttatgagaccatcaaagagagaaagagaataaaaatatttttgtaaaactttttttatgagaccatcaaagagagaaagagaataaaaatatttttgtaaaactttttttatgagaccatcaaagagagaaagagaataaaaatatttttgtaaaactttttttatgagaccatcaaagagagaaagagaataaaaatatttttgtaaaactttttttatgagaccatcaaagagagaaagagaataaaaatatttttgtaaaactttttttatgagaccatcagaaagaggtttaatatttttgtgatactctgaaaggaaataggaataggaataggaatagtgtcataatcgtatcacactattgagacagaaaaagaagaagtcgcgagaggtaactttttgtgaatgtagttaagaacatttttgttttgcaaaccggaatatagtgtccggtacacttttttaattcgtggtgtgcctgaatcgttcgattaaccctactcatccaatttcagatgaatagagttatcgattcagacacacgctttgagttttgttgaatcgatgagtgaagtatcatcggttgcaccttcagatgccgatccgtcgacatacttgaatccatccttgacctcaagttcagatgattccttgcacatgtctccgatacgaacgctaaactctagattcttgacgcattttgtatcgacgatcgttgaaccgatgatatcttcgtaactcactttcttatgagagatgttagacccgagtactggatgggtcttgatgtcgctgtctttctcttcttcgctacatctgatgtcgatagacacttcacagtctttgatcatagcaagagcttcttcatgagtgatcgcgggagagtccttaccttgtcctggggacacgctggacaatctagcattcactgtgtttccatcagcggattctgagatggatttaatctgaggacatttggtgaatccaaagttcattctcagacctccaccgatgatggagtaataagtggtaggaggatctacatcctcgactgatgtggaatcatcttctgattccacctcgggatctggatctgactcggactctgtaatttccgttacggattggcaaatcttatcattggtcggtgtttggtcttgctttgtgactttgataataacatcgattcccatatgatgtttgttttcttcttccgtacacgaggaggaggatgaggatgattgctgaagactggcaggcatagcagctgccgccaggcacatgcatgccaggacgatatattgtttcataattgctattgattgagtactgttctttatgattctacttccttaccgtgcaataaattagaatatattttctacttttacgagaaattaattattgtatttattatttatgggtgaaaaacttactataaaaagtgggtgggtttggaattagtgatcagtttatgtatatcgcaactaccgggcatatggctatcgacatcgagaacattacccacatgataagagattgtatcagtttcgtagtcttgagtattggtattactatatagtatatagatgtcgcccactagagttactgtctccgaatgcggcatgatagtatcattctttgctttcgttaactgtttggaggaagaatctttgttattgcatttaatctcgaaattcagagtgcacacctttctcctgtaaagaaacctgaagtcgctaccttattaagaacggagaagtatccatcacgaaatacgggattacagtctttatgattcatagtaatagttagttccgacgttgagatggattcgctgagaccggtagtggtcgtccgagtacacgacgtgtcgttaactggatacaggttaatttccacatcgatatagttaaacgtatttctgggtacgggttcgcatttatctgcggaagagacggtgtgagaatatgttccgagaccacacggagaacagatgacgtctccggatactccgtatcctattccacattttgtttgggaaacacatgccttgcatccggatgatcctttgagaagacaataatatccgggagagcattcacagattctattgtgagtcgtgttacacgatcgcgtcttccgttacaacttagacaagcgggtaaatgattattgcgagatgtgaaggtacccgaaccacacggcgtacatcgtgtgttagtcttgctatcgcataatctggaagcgtatgttcccggacacaaattatggcgtttgtattcgttgtctttacactttccatcggatggtgcatgcggtgctatatctcttccgtttattattatacatgagagaaacaatatatacgagtataatacggacttcatgatttaataatgtagtaatcgttgtcttgttcctgtttcctacttctccaatcatatagatattttctttctatcatggataatatttgtaatggttctttccgtacaacatactgtttagatgatattgcgcataatttccggaggcaaatacgatagtctagattgaccgatggtagactctaatttattgagtgctttgtcgacgagtttacttttacgctccatcgatagatggcactgttctatgagatcgtcgtacatgggaaatgaaatgtgactgtctgaatgtatggctttaagatagctgtgataccgtatacaggtcggtgtcggagattcgaatctctttgaggcgacttatgtcacgatgatggaatctatcttatcgaatgatatatttttcataaatacacttttatagtcctcgtttaaacagaatttactatgtagttccgcgaatgactcgtcccttaataggcagtaggctagtatcttttttacgtagtaatcgtcgtagggagagacatcttgtagaacaacgatttcgttttgttttctcttctgtaactgcttttctggatggccgtattgattatcgagcgtgatactcgctccatattccaataaccgctttgcaaattgtatattattgacatcgaccgcgtaatatagtagagttatcgatcatatctatatcatccatgtacttgcttagtatatcaaatacatctatcagtatggtttcataacagtgatacccgcaattattaaatctcgataatatcagaccgtacatacatagacggccattgttcgatacgtgatttacagccgcgtgtccatattttccacgataaaccttacgacgtttacatcgacgagattattattaacaaagtagtcgtgtagaggatagttgttgtccgttatctaacatgcatcgaacgaccatatcgccgtaatgtaagtagtttatcagtatggcttgtacgatggattcatcctgttgtctaaatctctttagaatgttatcgatgatgtagtggttatattctctggaatcgtacgaagtaatactacgcattacgtcgacaagagtatgacgtctctcaataagaagattaacgatttccatgtctacattatatggggttactctaaatcgcttgtttagataatacgcctctaatatagggctgacgtcgtatactctacacgtgtccacatcctttattaataataatttaacaatctctatatctatggttgagaaagaccagtagtattggatgggtaaagatcctccttcgtctctgccatggatggaaacattgttatcgatcaaacatttaattacatccttggatagagattgagattctctatgagacgatatatagtaatgaagagagttcttacacatatcactgtcgtacatacaggtacgaaatacgtaaccggtgctgtaacattctgatttaagaagccatagcaatacttctggtctcggattaggcgtcgttacgtatatatccaccaatccgagaccattgattgcataattcgtattcttggacggacgtatccgtttatccacaattaggtattttagcagacgtaagtcgatattatccgaatacagatcgaaatcatttatattcgacttgagttcgttagaggaatttgaatagctggatatcagtagatgcacaatctgagattttacgtatctatgcttactgtatactcctagcggagttaatccttcgttgtttctacaaagtctctcgactccgcgagagaacaatcttaatgtctgtatcgcatttattggagacgtaacaatgtagcgcattgtttcctcgtctatctatatgttttgataagttgtgacacgtttcaatttctagttttatttttttgtacgtcacatcttcatccagtagacgacatagaatagtgcactctctaccacaataatccatagctattctggtgctaattattcctatttcacgaaggcaatcattcctcataagatgataaaaagtgtagtggagatttagtatttagcagtgcggatatgatccaagagggtgagatagtcgttctcgttcagaatctttcgcagcataagtagtatgtcgatatacttatcgttgaagactctttataaaagtctatttgtttatatttattgcggatagcagtatttccctataaaaagtatacgtcctgtggtgtctttaatcatgtacatgaatggatggtttatgtagaccttcgtacgatataccatcgaaaagttaatcgtaaatactcctgtaacggccgatgcttctgtatactcctcattaacatctataaacgtcgtatgtagaaatttttctacagtgatagtttcattacacatcttgctaaaatctgcataatatccgaatatattagtaagtcctaaattttctaaaatcggtaccagattatacggttctgtcatttccactttaaactttggcatatacaagtctatacttttagtagataacataccacaccattttttaaatttttcatctgttatatttttttctatgttatatataccttctatgtcgtccggtagtataattaccatactagagtttccctcgtatggaatatcgataatagagaatcctccgaataattcattaatatgtacatattgcaagttattctcggtacccaccatcatatcaacgctggtaactatattcttagaaatataaaacttgtctgtatatgtaagatgtttagaaaatggatatttccacattgctttaaaatggacggcgctaacaactgtcatacgagtattaatggatagcggactagtcaataaggaattaattttaccatttgtcattgtcttaacccattcgttgattagttcctttgtttggttagcattattaaagtttacagtttgaaaatcgtcttttattttttgtaggaaggaggcgtggaactcgatactatcgctaccgtatattttatttgcggtagctagtgtcgcacaatacggaatatctacctccatgtcatcattattgtcatcgggtgtattctcattcatattctctatatattttgatagttgttcagctgtagaaccagctgctccatgatttagaatagataaagtagataaaatggaaactggagaaatcaaaacattttcatcagggtgttttaagattagttctttaaagatatccatggtatagacctaacgataacgatatatatcataaataaataatgttaaatttcaatttatgtttgtaccccgtattcatacttaacaaattggtattgcgtacacaatcaatcatattacataccattaataatgcaagcataaaaaattgttagtagatgtttctaaatataggttccgtaagcaaagaatataagaatgaagcggtaatgataaaatcaatcgttatctaaaatgatcatactcatttattttattctattatattaacacatacatttttaacagcaacacattcaatattgtattgttatttttatattatttacacaattaacaatatattattagtttatattactgaattaataatataaaattcccaatcttgtcataaacacacactgagaaacagcataaacacagaatccatcaaaaatgttgataaattatctgatgttgttgttcgctgctatgataatcagatcattcgccgatagtggtaacgctatcgaaacgacattgccagaaattacaaacgctacaacagatattccagctatcagattatgcggtccagagggagatggatattgtttacacggtgactgtatccacgctagagatattgacggtatgtattgtagatgctctcatggttatacaggcattagatgtcagcatgtagtattagtagactatcaacgttcagaaaacccaaacactacaacgtcatatatcccatctcccggtattatgcttgtattagtaggcattattatgtgttgtctattatctgtttataggttcactcgacgaactaaactacctatacaagatatggttgtgccataatttttataaatttttttatgagtatttttacaaaaatgtataaagtgtatgtcttatgtatatttataaaaatgctaagtatgcgatgtatctatgttatttgtatttatctaaacaatacctctacctctagatattatacaaaaattttttatttcggcatattaaagtaaaatctagttaccttgaaaatgaatacagtgggtggttccgtatcaccagtaagaacataatagtcaaatacagtatccgattgagattttgcatacaatactagtctagaaagaaatttgtaatcatcttctgtgacgggagtccatatatctgtatcatcgtctagtttatcagtgtcccatgctatattcctgttatcatcattagttaatgaaaataactctcgtgcttcagaaaagtcaaatattgtatccatacatacatctccaaaactatcgcttatacgtttatctttaacgatacctatacctagatggttatttactaacagacattttccagatctattgactataactcctatagtttccacatcaaccaagtaatgatcatctattgttatataacaataacataactcttttccatttttatcagtatgtatatctatatcaacgtcgtcgttgtagtgaatagtagtcattgatctattatatgaaacggatatgtctagaacggcaattgttttacgtccagttaacactttcgttgatttaaagtctagagtctttgcaaacataatatccttatccgactttatatttcctgtagggtggtataattttattttgcctccacatatcggtgtttccaaatatattactagacaatattccatatagttattagttaagggtacccaattagaacacgtacgcttattatcatcatttggatcgtatttcataaaagttattgtgttatcgatgtcaacacattctacattttttaatcgtctatatagtatttttctgatattttctataatatcagaattgtcttccatcggaagttgtatactatcggaatcagttacatgtttaaataattctctgatgtcattccttatacaatcaaattcattattaaacagtttaatagtctgtagacctttatcgtcgtaaatatccattgtcttattagttacgcttatttttatgtgtttttacgttgctttattatattttataagaatgattgtttgacgaatcacgagaactattaagacacattattaggtatatattataaaaaagtttttgattacgatgttataagaggaaagaggacacattaacatcatacatcaattaactacattcttataacatcgtaatcaaaagaattgcaattttgatgtataacaactgtcaatgggttatggaattgtatattacatattatacggtatgttggtaacgacaaataccggtcggtaattgtctgccggtgtaatagaattatatatatctatctattacaccggccttgtatacataataataagttgtggtagtatgatctccatatttataatttaggactttgtattcagtatttttggaatcataaaaaataaaaaaaagttttactaatttaaaatttaaaaagtatttacatttttttcactgtttagtcgcggatatggaattcgatcctgccaaaatcaatacatcatctatagatcatgtaacaatattacaatacatagatgaaccaaatgatataagactaacagtatgcattatccgaaatattatatcaatatcacaaaaataaatacacatttggctaatcaatttcgggcttggaaaaaacgtatcgccggaagggactatatgactaacttatctagagatacaggaatacaacaatcaaaacttactgaaactatacgtaactgtcaaaaaaatagaaacatatatggtctatatatacactacaatttagttattaattggataaccgatgtgattatcaatcaatattaagagggttggtaaattggtacatagctaataatacctatactccaaatacacccaataatacaacaaccatttctgagttggatatcatcaaaatactaaataaatacgaggacgtgtatagagtaagtaaagaaaaagaatgtggaatttgctatgaagttgtttactcaaaacgatagatactttggtttattggattcgtgtactcatatattttgcataacatgcatcaatatatggcatagaacacgaagagaaaccggtgcgtcggataattgtcctatatgccgtacccgttttagaaacataacaatgagcaagttctataagctagttaactaataaataaaaagtttaatttgttgacgacgtatgtcgttattttttctcgtataaaagattaatttgattctaatataatctttagtattggataaatatcaattcaaattaattccattagattatatcataaataaaaatagtagcacacaactacttcagcaaacattctttttataaatgccatctagcgtagcgaggacacaagtgaacctataattatcaaatttattagtatcagtcacatgaaggactttacgtagagtgacgattccactatctgtggtacgaacggtttcatcttctttgatgccatcacccagatgttctataaacttggtatcctcgtccgatttcatatcctttgccaaccaatacatatagctaaactcaggcatatgttccacacatcctgaacaatgaaattctccagaagatgttacaatgtctagatttggacatttggtttcaaccgcgttaacatatgagtgaacacacccatacatgaaagcgatgagaaataggattctcatcttgccaaaatatcactagaaaaaatttatttatcagttttaaaggtataaaaaatacttattgttgctcgaatattttgtatttgatggtatacggaagattagaaatgtaggtattatcatcaactgattctatggttttatgtattctatcatgtttcactattgcgttggaaataatatcatatgcttccacatatattttattttgttttaactcataatactcacgtaattctggattattggcatatctatgaataattttagctccatgatcagtaaatattaatgagaacatagtattaccacctaccattatttttttcatctcattcaattcttaattgcaaagatctatataatcattatagcgttgacttatggactctggaatcttagacgatgtacagtcatctataatcatggcatatttaatacattgttttatagcatagtcgttatctacgatgttagatatttctctcaatgaatcaatcacacaatctaatgtaggtttatgacataatagcattttcagcagttcaatgtttttagattcgttgatggcaatggctatacatgtatatccgttatttgatctaatgttgacatctgaaccggattctagcagtaaagatactagagattgtttattatatctaacagccttgtgaagaagtgtttctcctcgtttgtcaatcatgttaatgtctttaagataaggtaggcaaatgtttatagtactaagaattgggcaagcataagacatgtcacaaagacccttttttgtatgtataagtgtaaaaattataacatccatagttggatttacataggtgtccaatcgggatctctccatcatcgagataattgatggcatctcccttccttttttagtagatatttcatcgtgtaagaatcaatattaatatttctaaagtatccgtgtatagcctctttatttaccacagctccatattccactagagggatatcgccgaatgtcatatactcaattagtatatgttggaggacatccgagttcattgttttcaatatcaaagagatggtttccttatcatttctccatagtggtacaatactacacattattccgtgcggctttccattttccaaaaacaatttgaccaaatctaaatctacatctttattgtatctataatcactatttagataatcagccataattcctcgagtgcaacatgttagatcgtctatatatgaataagcagtgttatctattcctttcattaacaatttaacgatgtctatatctatatgagatgacttaatataatattgaagagctgtacaatagtttttatctataaaagacggcttgattccgtgattaattagacatttaacaacttccggacgcacatatgctctcgtatccgactctgaatacagatgagagatgatatacagatgcaatacggtaccgcaatttcgtagttgataatcatcatacgcgtatcagtactcgtcctcataaagaacactgcagccattttctatgaacaaatcaataattttagaaacaggatcattgtcattacataattttctataactgaacgatggttttcacatttaacactcaagtcaaatccatgttctaccaacacctttatcaagtcaacgtctacatttttggatttcatatagctgaatatattaaagttatttatgttgctaaatccagtggcttctagtagagccatcgctatatccttattaactttaacatgtctactatttgtgtattcttctaatggggtaagctgtctccaatttttgcgtaatggattagtgccactgtctagtagtagtttgacgacctcgacattattacaatgctcattaaaaaggtatgcgtgtaaagcattattcttgaattggttcctggtatcattaggatctctgtctttcaacatctgtttaagttcatcaagagccacctcctcattttccaaatagtcaaacattttgactgaatgagctactgtgaactctatacacccacacaactaatgtcattaaatatcatgtcaaaaacttgtacaattattaataaaaataatttagtgtttaaattttaccagttccagattttacacctccgttaatacctccattaaccccactggacgatcctcctccccacattccaccgccaccagatgtataagttttagatcctttattactaccatcatgtccatggataaagacactccacatgccgccactaccccctttagaagacatattaataagacttaaggacaagtttaacaataaaattaatcacgagtaccctactaccaacctacactattatatgattatagtttctatttttacagtaccttgactaaagtttctagtcacaagagcaatactaccaacctacactattatatgattatagtttctatttttataggaacgcgtacgagaaaatcaaatgtctaatttctaacggtagtgttgataaacgattgttatccgcggatacctcctctatcatgtcgtctattttcttactttgttctattaacttattagcattatatattatttgattataaaacttatattgcttattagcccaatctgtaaatatcggattattaacatatcgtttctttgtaggtttatttaacatgtacatcactgtaagcatgtccttaccatttattttaatttgacgcatatccgcaatttctttttcgcagtcggttataaattctatatatgatggatacatgctacatgtgtacttataatcgactaatatgaagtacttgatacatattttcagtaacgatttattattaccacctatgaataagtacctgtgatcgtctaggtaatcaactgttttcttaatacattcgatggttggtaatttactcagaataatttccaatatcttaatatataattctgctatttctgggatatatttatctgccagtataacacaaatagtaatacatgtaaacccatattttgttattatattaatgtctgcgccattatctattaaccattctactaggctgacactatgcgactcaatacaatgataaagtatactacatccatgtttatctattttgtttatatcatcaatatacggcttacaaagttttagtatcgataacacatccaactcacgcatagagaaggtagggaataatggcataatatttattaggttatcatcattgtcattatctacaactaagtttccattttttaaaatatactcgacaactttaggatctctattgccaaatttttgaaaatatttatttatatgcttaaatctatataatgtagctccttcatcaatcatacatttaataacattgatgtatactgtatgataagatacatattctaacaatagatcttgtatagaatctgtatatcttttaagaattgtggatattaggatattattacataaactattacacaattctaaaatataaaacgtatcacggtcgaataatagttgatcaactatataattatcgattttgtgatttttcttcctaaactgtttacgtaaatagttagatagaatattcattagttcatgaccactatagttactatcgaataacgcgtcaaatatttcccgtttaatatcgcatttgtcaagataataatagagtgtggtatgttcacgataagtataataacgcatctctttttcgtgtgaaattaaatagtttattacgtccaaagatgtagcataaccatcttgtgacctagtaataatataataatagagaactgttttacccattctatcatcataatcagtggtgtagtcgtaatcgtaatcgtctaattcatcatcccaattataatattcaccagcacgtctaatctgttctattttgatcttgtatccatactgtatgttgctacatgtaggtattcctttatccaataatagtttaaacacatctacattgggatttgatgttgtagcgtatttttctacaatattaataccatttttgatactatttatttctatacctttcgaaattagtaatttcaataagtctatattgatgttatcagaacatagatattcgaatatatcaaaatcattgatatttttatagtcgactgacgacaataacaaaatcacaacatcgtttttgatattattatttttcttggtaacgtatgcctttaatggagtttcaccatcatactcatataatggatttgcaccactttctatcaatgattgtgcactgctggcatcgatgttaaatgttttacaactatcatagagtatcttatcgttaaccatgattggttgttgatgctatcgcattttttggtttctttcatttcagttatgtatggatttagcacgtttgggaagcatgagctcatatgatttcagtactgtagtgtcagtactattagtttcaataagatcaatctctagatctatagaatcaaaacacgataggtcagaagataatgaatatctgtaggcttcttgttgtactgtaacttctggttttgttagatggttgcatcgtgctttaacgtcaatggtacaaattttatcctcgctttgtgtatcatattcgtccctactataaaattgtatattcagattatcatgcgatgtgtatacgctaacggtatcaataaacggagcacaccatttagtcataaccgtaatccaaaaatttttaaagtatatcttaacgaaagaagttgtgtcattgtctacggtgtatggtactagatcctcataagtgtatatatctagagtaatgtttaatttattaaatggttgataatatggatcctcgtgacaatttccgaagatggaaataagacataaacacgcaataaatctaattgcggacatggttactccttaaaaaaatacgaataatcaccttggctatttagtaagtgtcatttaacactatactcatattaatccatggactcataatctctatacgggattaacggatgttctatatacggggatgagtagttctcttctttaactttatactttttactaatcatatttagactgatgtatgggtaatagtgtttgaagagctcgttctcatcatcagaataaatcaatatctctgtttttttgttatacagatgtattacagcctcatatattacgtaatagaacgtgtcatctaccttattaactttcaccgcatagttgtttgcaaatacggttaatcctttgacctcgtcgatttccgaccaatctgggcgtataatgaatctaaactttaattgcttgtaatcattcgaaataatttttagtttgcatccgtagttatcccctttatgtaactgtaaatttctcaacgcgatatctccattaataatgatgtcgaattcgtgctgtatacccatactgaatggatgaacgaataccgacggcgttaatagtaatttactttttcatctttacatattgggtactagttttactatcataagtttataaattccacaagctactatggaataagccaaccatcttagtataccacacatgtcttaaagtttattaattaattacatgttgttttatatatatcgctacgaatttaaagagaaattagtttaggaagaaaaattatctatctacatcatcacgtctctgtattctacgatagagtgctactttaagatgcgacagatccgtgtcatcaaatatatactccattaaaatgattattccggcagcgaacttgatattggatatatcacaacctttgttaatatctacgacaatagacagcagtcccatggttccataaacagtgagtttatctttctttgaagagatattttgtagagatcttataaaactgtcgaatgacatcgcatttatatctttagctaaatcgtatatgttaccatcgtaatatctaaccgcgtctatcttaaacgtttccatcgctttaaagacgtttccgatagatggtctcatttcatcagtcatactgagccaacaaatataatcgtgtataacatctttgatagaatcagactctaaagaaaacgaatcggctttattatacgcattcatgataaacttaatgaaaaatgtttttcgttgtttaagttggatgaatagtatgtcttaataattgttattatttcattaattaatatttagtaacgagtacactctataaaaacgagaatgacataactaatcataactagttatcaaagtgtctaggacgcgtaattttcatatggtatagatcctgtaagcattgtctgtattctggagctattttctctatcgcattagtgagttcagaatatgttataaatttaaatcgaataacgaacataactttagtaaagtcgtctatattaactcttttattttctagccatcgtaataccatgtttaagatagtatattctctagttactacgatctcatcgttgtctagaatatcacatactgaatctacatccaattttagaaattggtctgtgttacatatctcttctatattattgttgatgtattgtcgtagaaaactattacgtagaccattttctttataaaacgaatatatagtactccaattatctttaccgatatatttgcacacataatccattctctcaatcactacatctttaagattttcgttgttaagatatttggctaaactatataattctattagatcatcaacagaatcagtatatatttttctagatccaaagacgaactctttggcgtcctctataatattcccagaaaagatattttcgtgttttagtttatcgagatctgatctgttcatatacgccatgattgtacggtacgttatgataaccgcataaaataaaaatccattttcatttttaaccaatactattcataattgagattgatgtaatactttgttactttgaacgtaaagacagtacacggatccgtatctccaacaagcacgtagtaatcaaatttggtgttgttaaacttcgcaatattcatcaatttagatagaaacttatactcatcatctgttttaggaatccatgtattattaccactttccaacttatcattatcccaggctatgtttcgtccatcatcgttgcgcagagtgaataattcttttgtattcggtagttcaaatatatgatccatgcatagatcggcaaagctattgtagatgtgatttttcctaaatctaatataaaactcgtttactagcaaacactttcctgatttatcgaccaagacacatatggtttctaaatctatcaagtggtggggatccatagttatgacgcagtaacatatattattacattcttgactgtcgctaatatctaaatatttattgttatcgtattggattctgcatatagatggcttgtatgtcaaagatatagaacacataaccaatttatagtcgcgctttacattctcgaatctaaagttaagagatttagaaaacattatatcctcggatgatgttatcactgtttctggagtaggatatattaaagtctttacagatttcgtccgattcaaataaatcactaaataatatcccacattatcatctgttagagtagtatcattaaatctattatattttatgaaagatatatcactgctcacctctatatttcgtacatttttaaactgtttgtataatatctctctgatacaatcagatatatctattgtgtcggtagacgataccgttacatttgaattaatggtgttccattttacaacttttaacaagttgaccaattcatttctaatagtatcaaactctccatgattaaatattttaatagtatccattttatatcactacggacacaaagtagctgacataaaccattgtataatttttatgttttatgtttattagcgtacacattttggaagttccggcttccatgtatttcctggagagcaagtagatgatgaggaaccagatagtttatatccgtacttgcacttaaagtctacattgtcgttgtatgagtatgatcttttaaacccgctagacaagtatccgtttgatattgtaggatgtggacatttaacaatctgacacgtgggtggatcggaccattctcctcctgaacacaggacactagagttaccaatcaacgaatatccactattgcaactataagttacaacgctcccatcggtataaaaatcctcgtatccgttatgtcttccgttggatatagatggaggggattggcatttaacagattcacaaataggtgcctcgggattccataccatagatccagtagatcctaattcacaatacgatttagattcaccgatcaactgatatccgctattacaagagtacgttatactagagccaaagtctactccaccaatatcaagttggccattatcgatatctcgaggcgatgggcatctccgtttaatacattgattaaagagtgtccatccagtacctgtacatttagcatatataggtcccattttttgctttctgtatccaggtagacatagatattctatagtgtctcctatgttgtaattagcattagcatcagtctccacactattcttaaatttcatattaatgggtcgtgacggaatagtacagcatgatagaacgcatcctattcccaacaatgtcaggaacgtcacgctctccaccttcatatttatttatccgtaaaaatgttatcctggacatcgtacaaataataaaaagcccatatatgttcgctattgtagaaattgtttttcacagttgctcaaaaacgatggcagtgacttatgagttacgttacactttggagtctcatctttagtaaacatatcataatattcgatattacgagttgacatatcgaacaaattccaagtatttgattttggataatattcgtattttgcatctgctataattaagatataatcaccgcaagaacacacgaacatctttcctacatggttaaagtacatgtacaattctatccatttgtcttccttaactatatatttgtatagataattacgagtctcgtgagtaattccagtaattacatagatgtcgccgtcgtactctacagcataaactatactatgatgtctaggcatgggagacttttttatccaacgatttttagtgaaacattccacatcgtttaatactacatatttctcatacgtggtataaactccacccattacatatatatcatcgtttacgaataccgacgcgcctgaatatctaggagtaattaagtttggaagtcttatccatttcgaagtgccgtgtttcaaatattctgccacacccgttgaaatagaaaattctaatcctcctattacatataactttccatcgttaacacaagtactaacttctgattttaacgacgacatattagtaaccgttttccattttttcgttttaagatctacccgcgatacggaataaacatgtctattgttaatcatgccgccaataatgtatagacaattatgtaaaacatttgcattatagaattgtctatctgtattaccgactatcgtccaatattctgttctaggagagtaatgggttattgtggatatataatcagagtttttaatgactactatattatgttttataccatttcgtgtcactggctttgtagatttggatatagttaatcccaacaatgatatagcattgcgcatagtattagtcataaacttgggatgtaaaatgttgatgatatctacatcgtttggatttttatgtatccactttaataatatcatagctgtaacatcctcatgatttacgttaacgtcttcgtgggataagatagttgtcagttcatcctttgataattttccaaattctggatcggatgtcaccgcagtaatattgttgattatttctgacatcgacgcattatatagttttttaattccatatcttttagaaaagttaaacatccttatacaatttgtgaaattaatattatgaatcatagtttttacacatagatctactacaggcggaacatcaattattatggcagcaactagtatcatttctacattgtttatggtgatgtttatcttcttccagcgcatatagtctaatagcgattcaaacgcgtgatagtttataccattcaatataatcgcttcatcctttagatggtgatcctgaatgcgtttaaaaaaattatacggagacgccgtaataatttccttattcacttgtataatttccccattgatagaaaatattacgctttccattcttaaagtactataagtaattatagtataatgtaaacgtttatatattcaatatttttataaaaatcattttgacattaattcctttttaaatttccgtctatcatctatagaaacgtattctatgaatttataaaatgcttttacgtgtcctatcgtaggcgatagaaccgctaaaaagcctatcgaatttctacaaaagaatctgttatatggtatagggagagtataaaacattaaatgtccgtacttattaaagtattcagtagccaatcctaactctttcgaatacttattaatggctcttgttctgtacgaatctatttttttgaacaacggacctagtggtatatcttgttctatgtatctaaaataatgtctgactagatccgttagtttaatatccgcagtcatcttgtctagaatggcaaatctaactgcgggtttaggctttagtttagtttctatatctacatctatgtctttatctaacaccaaaaatataatagctaatattttattacaatcatccggatattcttctacgatctcactaactaatgtttctttggttatactagtatagtcactatcggacaaataaagaaaatcagatgatcgatgaataatacatttaaattcatcatctgtaagatttttgagatgtctcattagaatattattagggttagtactcattatcattcggcagctattacttattttattatttttcaccatatagatcaatcattagatcatcaaaatatgtttcaatcatcctaaagagtatggtgaatgactcttcccatctaatttctgaacgttcaccaatgtctctagccactttggcactaatagcgatcattcgcttagcgtcttctatattattaactggttgatttaatctatctagcaatggaccgtcggacagcgtcattctcatgttcttaatcaatgtacatacatcgccgtcatctaccaattcatccaacaacataagctttttaaaatcatcattataataggtttgatcgttgtcatttctccaaagaatatatctaataagtagagtcctcatgcttagttaacaactattttttatgttaaatcaattagtacaccgctatgtttaatacttattcatattttagtttttaggattgagaatcaatacaaaaattaatgcatcattaattttagaaatacttagtttccacgtagtcaatgaaacatttgaactcatcgtacaggacgttctcgtacaggacgtaactataaaccggtttatatttgttcaagatagatacaaatccgataactttttttacgaattctacgggatccactttaaaagtgtcataccgggttctttttatttttttaaacagatcaatggtgtgatgttgattaggtcttttacgaatttgatatagaatagcgtttacatattctccataatggtcaatcgccatttgttcgtatgtcataaattctttaattatatgacactgtgtattatttagttcatccttgttcattgttaggaatctatccaaaatggcaattatactagaactataggtgcgttgtatacacatattgatgtgtctgtttatacaatccatgatatttggatccatgctactaccttcgggtaaaattgtagcatcatataccatttctagtactttaggttcattattatccattgcagaggacgtcatgatcgaatcataaaaaaatatattatttttatgttattttgttaaaaataatcatcgaatacttcgtaagatactccttcatgaacataatcagttacaaaacgtttatatgaagtaaagtatctacgatttttacaaaagtccggatgcataagtacaaagtacgcgataaacggaataataatagatttatctagtctatctttttctatagctttcatagttagatacatggtctcagaagtaggattatgtaacatcagcttcgataaaatgactgggttatttagtcttacacattcgctcatacatgtatgaccgttaactacagagtctacactaaaatgattgaacaatagatagtctaccattgtttcgtattcagatagtacagcgtagtacatggcatcttcacaaattatatcattgtctaatagatatttgacgcatcttatggatcccacttcaacagccatcttaaaatcatattgctttcctttatcattaataatttctagaacatcatctctatcataaaagatacaaatattaactgtttgatccgtaataacattgctagtcaatagcaatttgttaataagatgcgctgggctcaatgtcttaataagaagtgtaagaggactatctccgaatttgttttgtttattaacatccgttgatggaagtaaaagatctataatgtctacattcttgactgttttagagcatacaatatggagaggtgtatttccatcatgatctggttttgagggactaattcctagtttcatcatccatgagattgtagaagcttttggattgtctgacataagatgtctatgaatatgatttttgccaaatttatccactatcctggcttcgaatccgatggacattatttttttaaacactctttctgaaggatctgtacacgccaacaacggaccacatccttcttcatcaaccgagttgttaatcttggctccatactgtaccaataaatttattctctctatgacttcatcatctgttcccgagagataatatagaggtgttttatgctgtttatcacacgcgtttggatctgcgccgtgcgtcagcagcatcgcgactattctattattattaattttagaagctatatgcaatggataatttccatcatcatccgtctcatttggagagtatcctctatgaagaagttcttcgacaaatcgttcatctagtcctttaattccacaatacgcatgtagaatgtgataattatttccagaaggttcgatagcttgtagcatattcctaaatacatctaaatttttactattatatttggcataaagagatagataatactcggccgacataatgttgtccattgtagtataaaaattaatatttctatttctatttctgtatatttgcaacaatttactctctataacaaatatcataacttagtttttttatgtcaagaaggcactggtttagttcatctataaatgtcacgccataactaccacgcatgccatactcagaattatgataaagatatttatccttggggtgtaggtaatggggattaatctttgttggatcagtctctaagttaacacatgtcacacatgatccatttatagttatatcacacgatgatgatttatgaattgattccggaagatcgctatcgtattttgtggttccacaattcatttccatacatgttattgtcacactaatattatgatgaactttatctagccgctgagtggtaaacaacagaacagatagtttattatctttaccaacaccctcagccgctgccacaaatctctgatccgtatccatgatggtcatgtttatttctagtccgtatccagtcaacactatgttagcatttctgtcgatatagctttcactcatatgacactcaccaataatagtagaattaatgtcgtaatttacaccaatagtgagttcggcggcaaagtaccaataccggtaatcttgtcgaggaggacatatagtattcttgtattctaccgaatacccgagagatgcgatacaaaagagcaagactaatttgtaaaccatcttactcaaaatatgtaacaatagtacgatgcaatgagtaagacaataggaaatctatcttatatacacataattattctatcaattttaccaattagttagtgtaatgttaacaaaaatgtgggagaatctaattagtttttctttacacaattgacgtacatgagtctgagttccttgtttttgctaattatttcatccaatttattattcttgacgatatcgagatcttttgtataggagtcaaacttgtattcaacatgcttttctataatcattttagctatttcggcatcatccaatagtacattttccagattagcagaatagatattaatgtcgtatttgaacagagcctgtaacatctcaatgtctttattatctatagccaatttaatgtccggaatgaagagaagggaattattggtgtttgtcgacgtcatatagtcgagcaagagaatcatcatatccacgtgtccattttttatagtgatgtgaatacaactaaggagaatagccagatcaaaagtagatggtatctctgaaagaaagtaggaaacaatacttacatcattaagcatgacggcatgataaaatgaagttttccatccagttttcccatagaacatcagtctccaatttttcttaacaaacagttttaccgtttgcatgttaccactatcaaccgcataatacaatgcggtgtttcccttgtcatcaaattgtgaatcatccagtccactgaatagcaaaatctttactattttggtatcttccaatgtggctgcctgatgtaatggaaattcattctctagaagatttttcaatgctccagcgttcaacaacgtacatactagacgcacgttattatcagctattgcataatacaaggcactatgtccatggacatccgccttaaatgtatctttactagagagaaagcttttcagctgcttagacttccaagtattaattcgtgacagatccatgtctgaaacgagacgctaattagtgtatattttttcattttttataattttgtcatattgcaccagaattaataatatctttaatagatctgattagtagatacatggctatcgcaaaacaacatatacacatttaataaaaataatatttattaagaaaattcagatttcacgtacccatcaatataaataaaataatgattccttacaccgtacccatattaaggagattccaccttacccataaacaatataaatccagtaatatcatgtctgatgatgaacacaaatggtgtattaaattccagtttttcaggagatgatctcgccgtagctaccataatagtagatgcctctgctacagttccttgttcgtcgacatctatctttgcattctgaaacattttataaatatataatgggtccctagtcatatgtttaaacgacgcattatctggattaaacatactaggagccatcatttcggctatcgacttaatatccctcttattttcgatagaaaatttagggagtttaagattgtacactttattccctaattgagacgaccaatagtctaattttgcagccgtgatagaatctgtgaaatgggtcatattatcacctattgccaggtacatactaatattagcatccttatacggaaggcgtaccatgtcatattctttgtcatcgattgtgattgtatttccttgcaatttagtaactacgttcatcatgggaaccgttttcgtaccgtacttattagtaaaactagcattgcgtgttttagtgatatcaaacggatattgccatatacctttaaaatatatagtattaatgattgcccatagagtattattgtcgagcatattagaatctactacattagacataccggatctacgttctactatagaattaattttattaaccgcatctcgtctaaagtttaatctatataggccgaatctatgatattgttgataatacgacggtttaatgcacacagtattatctacgaaactttgataagttagatcagtgtacgtatatttagatgttttcagcttagctaatcctgatattaattctgtaaatgctggacccagatctctttttctcaaatccatagtcttcaataattctattctagtattacctgatgcaggcaatagcgacataaacatagaaaacgaataaccaaacggtgagaagacaatattatcatcttgaatatttttatacgctactataccggcattggtaaatccttgtagacgataggcggacgctgaacacgctaacgatagtatcaataacgcaatcatgattttatggtattaataattaaccttatttttatgttcggtataaaaaaattattgatgtctacacatccttttgtaattgacatctatatatccttttgtataatcaactctaatcactttaacttttacagttttccctaccagtttatccctatattcaacatatctatccatatgcatcttaacactctctgccaagatagcttcagagtgaggatagtcaaaaagataaatatatagagcataatcattctcgtatactctgccctttattacatcacccgcattgggcaacgaataacaaaatgcaagcatcttgttaacgggctcgtaaattgggataaaaattatgtttttattgtcttatatctattttattcaagagaatattcaggaatttctttttccggttgtatctcgtcgcagtatatatcatttgtacattgtttcatattttttaatagtttacaccttttagtaggactagtatcgtacaattcatagctgtattttgaattccaatcacgcataaaaatatcttccaattgttgacgaagacctaatccatcatccggtgtaatattaatagatgctccacatgtatccgtaaagtaatttcctgtccaatttgaggtacctatataggccgttttatcggttaccatatatttggcatggtttaccctagaatacggaatgggaggatcagcatctggtacaataaatagctttacttctatatttatgtttttagattttagcatagcgatagatcttaaaaagtttctcatgataaacgaagatcgttgccagcaactaatcaatagcttaacggatacttgtctgtctatagcggatcttcttaattcatcttctatataaggccaaaacaaaattttacccgccttcgaataaataatagggataaagttcataacagatacataaacgaatttactcgcatttctaatacatgacaataaagcggttaaatcattggttctttccatagtacatagttgttgcggtgcagaagcaataaatacagagtgtggaacgccgcttacgttaatactaagaggatgatctgtattataatacgacggataaaagtttttccaattatatggtagattgttaactccaagataccagtatacctcaaaaatttgagtgagatccgctgccaagttcctattattgaagatcgcaatacccaattccttgacctgagttagtgatctccaatccatgttagcgcttcctaaataaatatgtgtattatcagatatccaaaattttgtatgaagaactcctcctaggatatttgtaatatctatgtatcgtacttcaactccggccatttgtagtctttcaacatcctttaatggtttgttagatttattaacggctactctaactcgtactcctcttttgggtaattgtacaatctcgtttaatattatcgtgccgaaattcgtacccacttcatccgataaactccaataaaaagatgatatatctagtgtttttgtggtattggatagaatttccctccacatgttaaatgtagacaaatatactttatcaaattgcatacctataggaatagtttctgtaatcactgcgattgtattatccggattcattttatttgttaaaagaataatcctatatcacttcactctattaaaaatccaagtttctatttctttcatgactgattttttaacttcatccgtttccttatgaagatgatgtttggcaccttcataaatttttatttctctattacaatttgcatgttgcatgaaataatatgcacctaaaacatcgctaatcttattgtttgttccctggagtatgagagtcggggggtgttaatcttggaaattatttttctaaccttgttggtagccttcaagacctgactagcaaatccagccttaattttttcatgattgactaatgggtcgtattggtatttataaactttatccatatctctagatactgattctggacatagctttccgactggcgcatttggtgtgatggttcccataagtttggcagctagcagattcagtcttgaaacagcatctgcattaactagaggagacattagaatcattgctgtaaacaagtttggattatcgtaagaggctagctcccatggaatgacccaataagtagatttaatagttaccacgtgctgtaccaaagtcatcaatcatcattttttcaccattacttcttccatgtccaatatgatcatgtgagaatactaaaattcctaacgatgatatgttttcagctagttcgtcataacgtccagaatgtttaccagctccatgacttatgaatactaatgccttaggatatgtaataggtttccaatatttacaatatatgtaatcattgtccagattgaacatacagtttgcactcatgattcacgttatataactatcaatattaacagttcgtttgatgatcatattatttttatgttttattgataattgtaaaaacatacaattaaatcaatatagaggaaggagacggctactgtcttttgtaagatagtcatggcgactaaattagattatgaggatgctgttttttactttgtggatgatgataaaatatgtagtcgcgactccatcatcgatctaatagatgaatatattacgtggagaaatcatgttatagtgtttaacaaagatattaccagttgtggaagactgtacaaggaattgatgaagttcgatgatgtcgctatacggtactatggtattgataaaattaatgagattgtcgaagctatgagcgaaggagaccactacatcaattttacaaaagtccatgatcaggaaagtttattcgctaccataggaatatgtgctaaaatcactgaacattggggatacaaaaagatttcagaatctagattccaatcattgggaaacattacagatttgatgaccgacgataatataaacatcttgatactttttctagaaaaaaaattgaattgatgatataggggtcttcataacgcataattattacgttagcattctatatccgtgttaaaaaaaattatcctatcatgtatttgagagttttatatgtagcaaacatgatagctgtgatgccaataagctttagatattcacgcgtgctagtgttagggatggtattatctggtggtgaaatgtccgttatataatctacaaaacaatcatcgcatatagtatgcgatagtagagtaaacatttttatagtttttactggattcatacatcgtctacccaattcggttataaatgaaattgtcgccaatcttacacccaaccccttgttatccattagcatagtattaacttcgttatttatgtcataaactgtaaatgattttgtagatgccatatcatacatgatattcatgtccctattataatcattactaactttatcacaatatatgttgataatatctatatatgatctagtctttgtgggcaactgtctatacaagtcgtctaaacgttgtttactcatatagtatcgaacagccatcattacatggtcccgttccgttgatagataatcgagtatgttagtggacttgtcaaatctatataccatattttctggaagtggatatacatagtcgtgatcaacattattgctagcctcatcttctatatcctgtactataccattatctatatcatctacataatctatgatattattacacataaacatcgacaacatactattgtttattatctaagtcctgttgatccaaacccttgatctcctctatttgtactatctagagattgtacttcttccagttctggataatatatacgttgatagattagctgagctattctatctccagtatttacattaaacgtacattttccattattaataagaatgactcctatgtttcccctataatcttcgtctattacaccacctcctatatcaatgccttttagtgacagaccagacctaggagctattctaccatagcagaacttaggcatggacatactaatatctgtcttaattaactgtctttctcctggagggatagtataatcgtaagcgctatacaaatcatatccggcagcacccggcgattgcctagtaggagatttagctctgttagtttccttaacaaatctaactggtgagttaatattcatgttgaacataaaactaatattttatttcaaaattatttaccatcccatatattccatgaataagtgtgatgattgtacacttctatagtatctatatacgatccacgataaaatcctcctatcaatagcagtttattatccactatgatcaattctggattatccctcggataaataggatcatctatcagagtccatgtattgctggattcacaataaaattccgcatttctaccaaccaagaataaccttctaccgaacactaacgcgcatgatttataatgaggataataagtggatggtccaaactgccactgatcatgattgggtagcaaatattctgtagttgtatcagtttcagaatgtcctcccattacgtatataacattgtttatggatgccactgctggattacatctaggtttcagaagactcggcatattaacccaagcagcatccccgtggaaccaacgctcaacagatgtgggatttggtagacctcctactacgtataatttattgttagcgggtatcccgctagcatacagtctggggctattcatcggaggaattggaatccaattgtttgatatataatttacagctatagcattgttatgtatttcattgttcatccatccaccgatgagatatactacttctccaacatgagtacttgtacacatatggaatatatctataatttgatccatgttcataggatactctatgaatggatacttgtatgatttgcgtggttgtttatcacaatgaaatattttggtacagtctagtatccattttacattatttatacctctgggagaaagataatttgacctgattacatttttgataaggagtagcagatttcctaatttatttcttcgcctcatataccacttaatgacaaaatcaactacataatcctcatctggaacatttagttcatcgctttctagaataagtttcatagatagataatcaaaattgtctatgatgtcatcttccagttccaaaaagtgtttggcaataaagtttttagtatgacataagagattggatagtccgtattctatacccatcatgtaacactcgacacaatattcctttctaaaatctcgtaagataaagtttatacaagtgtagatgataaattctacagaggttaatatagaagcacgtaataaattgacgacgttatgactatctatatatacctttccagtatatgagtaaataactatagaagttaaactgtgaatgtcaaggtctagacaaacccttgtaactggatctttatttttcgtgtatttttgacgtaaatgtgtgcgaaagtaaggagataactttttcaatatcgtagaattgactattatattgcctcctatggcatcaataattgttttgaatttcttagtcatagacaatgctaatatattcttacagtacacagtattgacaaatatcggcatttatgtttctttaaaagtcaacatctagagaaaaatgattatctttttgagacataactcccattttttggtattcacccacacgtttttcgaaaaaattagtttttccttccaatgatatattttccatgaaatcaaacggattggtaacattataaatttttttaaatcccaattcagaaatcaatctatccgcgacgaattctatatatgttttcatcatttcacaattcattcctataagtttaactggaagagccgcagtaagaaattcttgttcaatggatactgcatctgttataatagatctaacggtttcttcactcggtggatgcaataaatgtttaaacatcaaacatgcgaaatcgcagtgcagaccctcgtctctactaattagttcgttggaaaacgtgagtccgggcattaggccacgctttttaagccaaaatatggaagcgaatgatccagaaaagaaaattccttctactgcagcaaaggcaataagtctctctccataaccggcgctgtcatgtatccacttttgagcccaatcggccttcttttttacacaaggcatcgtttctatggcattaaagagatagtttttttcattactatctttaacataagtatcgatcaaaagactatacatttccgaatgaatgttttcaatggccatctgaaatccgtagaaacatctagcctcggtaatctgtacttctgtacaaaatcgttccgccaaattttcattcactattccgtcactggctgcaaaaaacgccaatacatgttttataaaatatttttcgtctggtgttagtttattccaatcattgatatctttagatatatctacttcttccactgtccaaaatgatgcctctgcctttttatacatgttccagatgtcatgatattggattgggaaaataacaaatctatttggatttggtgcaaggatgggttccataactaaattaacaataacaataaattttttttcagttatctatatgcctgtacttggattttttgtacatcgatatcgccgcaatcactacaataattacaagtattattgatagcattgttattagtactatcataattaaattatctacattcatgggtgctgaataatcgttattatcatcattatcattttgtaattgtgacatcatactagataaatcgtttgcgagattgttgtgggaagcgggcatggaggatgcattatcattattatttaacgccttccatttggattcacaaatgttacgcacattcaacattttatggaaactataattttgtgaaaacaaataacaagaaaactcgtcatcgttcaaatttttaacgatagtaaaccgattaaacgtcgagctaatttctaacgctagcgactctgttggatatgggtttccagatatatatcttttcagttcccctacgtatctataatcatctgtaggaaatggaagatatttccatttatctactgttcctaatatcatatgtggtggtgtagtagaaccattaagcgcgaaagatgttatttcgcatcgtattttaacttcgcaataatttctggttagataacgcactctaccagtcaagtcaatgatattagcctttacagatatattcatagtagtcgtaacgatgactccatcttttagatgcgatactcctttgtatgtaccagaatcttcgtacctcaaactcgatatatttaaacaagttaatgagatattaacgcgttttatgaatgatgatatataaccagaagttttatcctcggtggctagcgctataaccttatcattataataccaactagtgtgattaatatgtgacacgtcagtgtgggtacaaatatgtacattatcgtctacgtcgtattcgatacatccgcatacagccaacaaatataaaatgacaaatactctaacgccgttcgtacccatcttgatgcggtttaataaatgttttgatttcaatttattgtaaaaaaagattcggttttatactgttcgatattctcattgcttatattttcatctatcatctccacacagtcaaatccgtggttagcatgcacctcatcaaccggtaaaagactatcggactcttctatcattataactctagaatatttaatttggtcattattaatcaagtcaattatcttatttttaacaaacgtgagtattttactcattttttataaaaacttttagaaatatacagactctatcgtgtgtctatatcttctttttatatccaatgtatttatgtctgatttttcttcatttatcatatataatggtccaaattctacacgtgcttcggattcatccagatcattaaggttcttataattgtaacatccttctcttccctcttctacatcttccttcttattcttattcttagcgtcacagaatctaccacagcaggatcccatgacgagcgtcatattaaactaatccattttcaattataatatatgattagtaatgaccattaaaataaaaaatattcttcataaccggcaagaaagtgaaaagttcacattgaaactatgtcagtagtatacatcatgaaatgatgatatatatatactctattttggtggaggattatatgatataattcgtggataatcatttttaagacacatttctttattcgtaaatcttttcacgttaaatgagtgtccatattttgcaatttcttcatatgatggcggtgtacgtggacgaggctgctcctgttcttgttgtggtcgccgactgtcgtgtctgcgtttagatccctccattatcgcgattgcgtagatggagtactattttataccttgtaattaaatttttttattaattaaacgtataaaaacgttccgtatctgtatttaagagccagatttcgtctaatagaacaaatagctacagtaaaaataactagaataattgctacacccactagaaaccacggatcgtaatacggcaatcggttttcgataataggtggaacgtatattttatttaaggacttaacaattgtctgtaaaccacaatttgcttccgcggatcctgtattaactatctgtaaaagcatatgttgaccgggcggagccgaacattctccgatatctaatttctgtatatctataatattattaacctccgcatacgcattacagttcttttctagcttggataccgcactaggtacatcgtctagatctattcctatttcctcagcgatagctcttctatccttttccggaagcaatgaaatcacttcaataaatgattcaaccatgagtgtgaaactaagtcgagaattactcatgcatttgttagttattcggagcgcgcaatttttaaactgtcctataacctctcctatatgaatagcacaagtgacattagtagggatagaatgttgagctaatttttgtaaataactatctataaaaagattatacaaagttttaaactctttagtttccgccatttatccagtctgagaaaatgtctctcataataaatttttccaagaaactaattgggtgaagaatggaaacctttaatctatatttatcacagtctgttttggtacacatgatgaattcttccaatgccgtactaaattcgatatctttttcgatttctggatatgtttttaataaagtatgaacaaagaaatggaaatcgtaataccagttatgtttaactttgaaattgttttttattttcttgttaatgattccagccacttgggaaaagtcaaagtcgtttaatgccgatttaatacgttcattaaaaacaaactttttatcctttagatgaattattattggttcattggaatcaaaaagtaagatattatcgggtttaagatctgcgtgtaaaaagttgtcgcaacagggtagttcgtagattttaatgtataacagagccatctgtaaaaagataaactttatgtattgtaccaaagatttaaatcctaatttgatagctaactcggtatctactttatctgccgaatacagtgctaggggaaaaattataatgtttcctctttcatattcgtagttagttctcttttcatgttcgaaaaagtgaaacatgcggttaaaatagtttataacattaatattactgttaataactgccggataaaagtgggatagtaatttcacgaatttgatactgtcctttctctcgttaaacgcctttaaaaaaactttagaagaatatctcaatgagagttcctgaccatccatagtttgtatcaataatagcaacatatgaagaacacgtttatacagagtatgtaaaaatgttaatttatagtttaatcccatggcccacgcacacacgattaattttttttcatctccctttagattgttgtatagaaatttgggtactgtgaactccgccgtagtttccatgggactatataattttgtggcctcgaatacaaattttactacatagttatctatcttaaagactataccatatcctcctgtagatatgtgataaaaatcgtcgtttataggataaaatcgtttatccttttgttggaaaaaggatgaattaatgtaatcattctcttctatctttagtagtgtttccttattaaaattcttaaaataatttaacaatctaactgacggagcccaattttggtgtaaatctaattgggacattatattgttaaaatacaaacagtctcctaatataacagtatctgataatctatggggagacatccattgatattcaggggatgaatcattggcaacacccatttattgtacaaaaagccccaatttacaaacgaaagtccaggtttgatagagacaaacaattaactattttgtctctgtttttaacacctccacagtttttaatttctttagtaatgaaattattcacaatatcagtatcttctttatctaccagagattttactaacttgataaccttggctgtctcattcaatagggtagtaatatttgtatgtgtgatattgatatctttttgaattgtttcttttagaagtgattctttgatggtgccagcatacgaattacaataatgcagaaactcggttaacatgcaggaattatagtaagccaattccaattgttgcctgtgttgtattagagtgtcaatatgagcaatggtgtccttgcgtttctctgatagaatgcgagcagcgattttggcgttatcatttgacgatatttctggaatgacgaatcctgtttctactaactttttggtaggacaaagtgaaacaatcaagaagatagcttctcctcctatttgtggaagaaattgaactcctctagatgatctactgacgatagtatctccttgacagatattggaccgaattacagaagtacctggaatgtaaagccctgaaaccccctcattttttaagcagattgttgccgtaaatcctgcactatgcccaagatagagagctcctttggtgaatccatctctatgtttcagtttaaccaagaaacagtcagctggtctaaaatttccatctctatctaatacagcatctaacttgatgtcaggaactatgaccggtttaatgttatatgtaacattgagtaaatccttaagttcataatcatcactgtcatcagttatgtacgatccaaacaatgtttctaccggcatagtggatacgaagatgctatccatcagaatgtttccctgattagtattttctatatagctattcttctttaaacgattttccaaatcagtaactatgttcatttttttaggagtaggacgcctagccagtatggaagaggattttctagatcctctcttcaacatctttgatctcgatggaatgcaaaaccccatagtgaaacaaccaacgataaaaataatattgtttttcactttttataattttaccatctgactcatggattcattaatatctttataagagctactaacgtataattctttataactgaactgagatatatacaccggatctatggtttccataattgagtaaatgaatgctcggcaataactaatggcaaatgtatagaacaacgaaattatactagagttgttaaagttaatattttctatgagctgttccaataaattatttgttgtgactgcgttcaagtcataaatcatcttgatactatccagtaaaccgtttttaagttctggaatattatcatcccattgtaaagcccctaattcgactatcgaatatcctgctctgatagcagtttcaatatcgacggacgtcaatactgtaataaaggtggtagtattgtcatcatcgtgataaactacgggaatatggtcgttagtaggtacggtaactttacacaacgcgatatataactttccttttgtaccatttttaacgtagttgggacgtcctgcagggtattgttttgaagaaatgatatcgagaacagatttgatacgatatttgttggattcctgattattcactataatataatctagacagatagatgattcgataaatagagaaggtatatcgttggtaggataatacatccccattccagtattctcggatactctattgatgacactagttaagaacatgtcttctattctagaaaacgaaaacatcctacatggactcattaaaacttctaacgctcctgattgtgtctcgaatgcctcgtacaaggatttcaaggatgccatagattctttgaccaacgatttagaattgcgtttagcatctgatttttttattaaatcgaatggtcggctctctggtttgctaccccaatgataacaatagtcttgtaaagataaaccgcaagaaaatttatacgcatccatccaaataaccctagcaccatcggatgatattaatgtattattatagattttccatccacaattattgggccagtatactgttagcaacggtatatcgaatagattactcatgtaacctactagaatgatagttcgtgtactagtcataatatctttaatccaatctaaaaaatttaaaattagattttttacactgttaaagttaacaaaagtattacccgggtacgtggatatcatatatggcattggtccattatcagtaatagctccataaactgatacggcgatggtttttatatgtgtttgatctaacgaggaagaaattcgcgcccacaattcatctctagatatgtatttaatatcaaacggtaacacatcaatttcgggacgcgtatatgtttctaaatttttaatccaaatataatgatgacctatatgccctattatcatactgtcaactatagtacacctagggaacttacgatacatctgtttcctataatcgttaaattttacaaatctataacatgctaaaccttttgacgacagccattcattaatttctgatatggaatctgtattctcgataccgtatcgttctaaagccagtgctatatctccctgttcgtgggaacgctttcgtataatatcgatcaacggataatctgaagtttttggagaataatatgactcatgatctatttcgtccataaacaatctagacataggaattggaggcgatgatcttaattttgtgcaatgagtcgtcaatcctataacttctaatcttgtaatattcatcatcgacataatactatctatgttatcatcgtatattagtataccatgaccttcttcatttcgtgccaaaatgatatacagtcttaaatagttacgcaatatctcaatagtttcataattgttagctgttttcatcaaggtttgtatcctgtttaacatgatggcgttctataacgtctctattttctatttttaattttttaaatttttaacgatttactgtggctagatacccaatctctctcaaatatttttttagcctcgcttacaagctgtttatctatactattaaaactgacgaatccgtgattttggtaatgggttccgtcgaaatttgccgaagtgatatgaacatattcgtcgtcgactatcaacaattttgtattattctgaatagtgaaaaccttcacagatagatcattttgaacacacaacgcatctagacttttggcggttgccatagaatatacgtcgttcttatcccaattaccaactagaagtctgatcttaactcctctattaatggctgcttctataatggagttgtaaatgtcgggccaatagtagctattaccgtcgacacgtgtagtgggaactatggccaaatgttcaatatctatactagtcttagctgacctgagtttatcaataactacatcggtatctagatctctagaatatcccaataggtgttccggagaatcagtaaagaacactccacctataggattcttaatatgatacgcagtgctaactggcaaacaacaagccgcagagcataaattcaaccatgaattttttgcgctattaaaggctttaaaagtatcaaatcttctacgaagatctgtggccagcgggggataatcagaatatacacctaacgttttaatcgtatgtatagatcctccagtaaatgacgcgtttcctacataacatctttcatcatctgacacccaaaaacaaccgagtagtagtcccacattattttttttatctatattaacggttataaaatttatatccgggcagtgactttgtagctctcccagatttcttttccctcgttcatctagcaaaactattattttaatccctttttcagatgcctcttttagtttatcaaaaataagcgctcccctagtcgtactcagaggattacaacaaaaagatgctatgtatatatatttcttagctagagtgataatttcgttaaaacattcaaatgttgttaaatgatcggatctaaaatccatattttctggtagtgtttctaccagcctacattttgctcccgcaggtaccgatgcaaatggccacatttagttaacataaaaacttatacatcctgttctatcaacgattctagaatatcatcggctatatcgctaaaattttcatcaaagtcgacatcacaacctaactcagtcaatatattaagaagttccatgatgtcatcttcgtctatttctatatccgtatccattgtagattgttgaccgattatcgagtttaaatcattactaatactcaatccttcagaatacaatctgtgtttcattgtaaatttataggcggtgtatttaagttggtagattttcaattatgtattaatatagcaacagtagttcttgctcctccttgattctagcatcctcttcattattttcttctacgtacataaacatgtccaatacgttagacaacacaccgacgatggcggccgcagatctcgagttatgatctacttccttaccgtgcaataaattagaatatattttctacttttacgagaaattaattattgtatttattatttatgggtgaaaaacttactataaaaagcgggtgggtttggaattagtgaaagcttaaaaattgaaattttattttttttttttggaatataaataagctcgaagtcgacagatctaggcctggtaccaggaggaggaattcagcttaaagatgacttcgaaagtttatgatccagaacaaaggaaacggatgataactggtccgcagtggtgggccagatgtaaacaaatgaatgttcttgattcatttattaattattatgattcagaaaaacatgcagaaaatgctgttatttttttacatggtaacgcggcctcttcttatttatggcgacatgttgtgccacatattgagccagtagcgcggtgtattataccagatcttattggtatgggcaaatcaggcaaatctggtaatggttcttataggttacttgatcattacaaatatcttactgcatggtttgaacttcttaatttaccaaagaagatcatttttgtcggccatgattggggtgcttgtttggcatttcattatagctatgagcatcaagataagatcaaagcaatagttcacgctgaaagtgtagtagatgtgattgaatcatgggatgaatggcctgatattgaagaagatattgcgttgatcaaatctgaagaaggagaaaaaatggttttggagaataacttcttcgtggaaaccatgttgccatcaaaaatcatgagaaagttagaaccagaagaatttgcagcatatcttgaaccattcaaagagaaaggtgaagttcgtcgtccaacattatcatggcctcgtgaaatcccgttagtaaaaggtggtaaacctgacgttgtacaaattgttaggaattataatgcttatctacgtgcaagtgatgatttaccaaaaatgtttattgaatcggatccaggattcttttccaatgctattgttgaaggcgccaagaagtttcctaatactgaatttgtcaaagtaaaaggtcttcatttttcgcaagaagatgcacctgatgaaatgggaaaatatatcaaatcgttcgttgagcgagttctcaaaaatgaacaagcggccgccgccaccatgagcaagggcgaggaactgttcactggcgtggtcccaattctcgtggaactggatggcgatgtgaatgggcacaaattttctgtcagcggagagggtgaaggtgatgccacatacggaaagctcaccctgaaattcatctgcaccactggaaagctccctgtgccatggccaacactggtcactaccttcacctatggcgtgcagtgcttttccagatacccagaccatatgaagcagcatgactttttcaagagcgccatgcccgagggctatgtgcaggagagaaccatctttttcaaagatgacgggaactacaagacccgcgctgaagtcaagttcgaaggtgacaccctggtgaatagaatcgagctgaagggcattgactttaaggaggatggaaacattctcggccacaagctggaatacaactataactcccacaatgtgtacatcatggccgacaagcaaaagaatggcatcaaggtcaacttcaagatcagacacaacattgaggatggatccgtgcagctggccgaccattatcaacagaacactccaatcggcgacggccctgtgctcctcccagacaaccattacctgtccacccagtctgccctgtctaaagatcccaacgaaaagagagaccacatggtcctgctggagtttgtgaccgctgctgggatcacacatggcatggacgagctgtacaagtgagcggccgccctgctagcaagcttgctagcggccgctcgagatctgcggccgctacagacacgaatatgactaaaccgatgaccatttaaaaacccctctctagctttcacttaaactgtatcgatcattcttttagcacatgtataatataaaaacattattctatttcgaatttaggcttccaaaaatttttcatccgtaaaccgataataatatatatagacttgttaatagtcggaataaatagattaatgcttaaactatcatcatctccacgattagagatacaatatttacattctttttgctgtttcgaaactttatcaatacacgttaatacaaacccaggaaggagatattgaaactgaggctgttgaaaatgaaacggtgaatacaataattcagataatgtaaaatcatgattccgtattctgatgatattagaactgctaatggatgtcgatggtatgtatctaggagtatctattttaacaaagcatcgatttgctaatatacaattatccttttgattaattgttattttattcatattcttaaaaggtttcatatttatcaattcttctacattaaaaatttccatttttaatttatgtagccccgcaatactcctcattacgtttcattttttgtctataatatccattttgttcatctcggtacatagattatccaattgagaagcgcatttagtagttttgtacattttaagtttattgacgaatcgtcgaaaactagttatagttaacattttattatttgataccctgatattaatacccctgccgttactattatttataactgatgtaatccacgtaacattggaattaactatcgatagtaatgcatcgacgcttccaaaattgtctattataaactcaccgataatttttttattgcatgttttcatattcattaggattatcaaatctttaatcttattacgattgtatgcgttgatattacaagacgtcattctaaaagacggaggatctccatcaaatgccagacaatcacgtacaaagtacatggaaataggttttgttctattgcgcatcatagatttatatagaacacccgtagaaatactaatttgttttactctataaaatactaatgcatctatttcatcgttttgtataacgtctttccaagtgtcaaattccaaatttttttcattgatagtaccaaattcttctatctctttaactacttgcatagataggtaattacagtgatgcctacatgccgttttttgaaactgaatagatgcgtctagaagcgatgctacgctagtcacaatcaccactttcatatttagaatatatatatgtaaaaatatagtagaatttcattttgtttttttctatgctataaatgaattctcattttgcatctgctcatactccgttttatattaataccaaagaaggaagatatctggttctaaaagccgttaaagtatgcgatgttagaactgtagaatgcgaaggaagtaaagcttcctgcgtactcaaagtagataaaccctcatcgcccgcgtgtgagagaagaccttcgtccccgtccagatgcgagagaatgaataaccctggaaaacaagttccgtttatgaggacggacatgctacaaaatatgttcgcggctaatcgcgataatgtagcttctagacttttgtcctaaaatactattatatccttttcgatattaataaatccgtgtcgtccaggttttttatctctttcagtatgtgaatagataggtattttatctctattcatcatcgaatttaagagatccgataaacattgtttgtattctccagatgtcagcatctgatacaacaatatatgtgcacataaacctctggcacttatttcatgtaccttccccttatcactaaggagaatagtatttgagaaatatgtatacatgatattatcatgaattagatatacagaatttgtaacactctcgaaatcacacgatgtgtcggcgttaagatctaatatatcactcgataacacattttcatctagatacactagacattttttaaagctaaaatagtctttagtagtaacagtaactatgcgattattttcatcgatgatacatttcatcggcatattattacgcttaccatcaaagactataccatgtgtatatctaacgtattctagcatggttgccatacgcgcattaaacttttcaggatctttggatagatcttccaatctatctatttgagaaaacatttttatcatgttcaatagttgaaacgtcggatccactatatagatattatctataaagattttaggaactacgttcatggtatcctggcgaatattaaaactatcaatgatatgattatcgttttcatcttttatcaccatatagtttctaagatatgggattttacttaatataatattatttcccgtgataaattttattagaaaggccaaatctataagaaaagtcctagaattagtctgaagaatatctatatcgccgtatagtatatttggattaattagatatagagaatatgatccgtaacatatacaacttttattatggcgtctaagatattcttccatcaacttattaacatttttgactagggaagatacattatgacgtcccattacttttgccttgtctattactgcgacgttcatagaatttagcatatctcttgccaattcttccattgatgttacattataagaaattttagatgaaattacatttggagctttaatagtaagaactcctaatatgtccgtgtatgtggtcactaatacagattgtagttctataatcgtaaataatttacctatattatatgtttgagtctgtttagaaaagtagctaagtatacgatcttttatttctgatgcagatgtattaacatcggaaaaaaatctttttttattcttttttactaaagatacaaatatgtctttgttaaaaacagttattttctgaatatttctagcttgtaattttaacatatgatattcgttcacactaggtactctgcctaaataggtttctataatctttaatgtaatattaggaaaagtattctgatcaggattcctattcattttgaggatttaaaactctgattattgtctaatatggtctctacgcaaactttttcacagagcgatagagtttttgataactcgtttttcttaagaaatataaaactactgtctccagagctcgctctatcttttattttatctaattcgatacaaactcctgatactggttcagaaagtaattcattaattttcagtcctttatagaagatatttaatatagataatacaaaatcttcagtttttgatatcgatctgattgatcctagaactagatatattaataacgtgctcattaggcagtttatggcagcttgataattagatatagtatattccagttcatatttattagataccgcattgcccagattttgatattctatgaattcctctgaaaataaatccaaaataactagacattctattttttgtggattagtgtactctcttccctctatcatgttcactactggtgtccacgatgataaatatctagagggaatataatatagtccataggatgccaatctagcaatgtcgaataactgtaattttattcttcgctcttcattatgaattgattcttgaggtataaacctaacacaaattatattattagacttttcgtatgtaatgtctttcatgttataagtttttaatcctggaatagaatctattttaatgaggcttttaaacgcagagttctccaacgagtcaaagcataatactctgttgtttttcttatatacgatgttacgattttcttctttgaatggaataggtttttgaattagtttataattacaacataatagataaggaagtgtgcaaatagtacgcggaaaaaacataatagctcccctgttttcatccatggttttaagtaaatgatcactggcttctttagtcaatggatattcgaacattaaccgtttcatcatcattggacagaatccatatttcttaatgtaaagagtgatcaaatcattgtgtttattgtaccatcttgttgtaaatgtgtattcggttatcggatctgctcctttttctattaaagtatcgatgtcaatctcgtctaagaattcaactatatcgacatatttcatttgtatacacataaccattactaacgtagaatgtataggaagagatgtaacgggaacagggtttgttgattcgcaaactattctaatacataattcttctgttaatacgtcttgcacgtaatctattatagatgccaagatatctatataattattttgtaagatgatgttaactatgtgatctatataagtagtgtaataattcatgtattttgatatatgttccaactctgtctttgtgatgtctagtttcgtaatatctatagcatcctcaaaaaatatattcgcatatattcccaagtcttcagttctatcttctaaaaaatcttcaacgtatggaatataataatctattttacctcttctgatatcattaatgatatagtttttgacactatcttctgtcaattgattcttattcactatatctaagaaacggatagcgtccctaggacgaactactgccattaatatctctattatagcttctggacataattcatctattataccagaattaatgggaactattccgtatctatctaacatagttttaagaaagtcagaatctaagacttgatgttcatatattggttcatacatgaaatgatctctattgatgatagtgactatttcattctctgaaaattggtaactcattctatatatgctttccttgttgatgaaggatagaatatactcaatagaatttgtaccaacaaactgttctcttatgaatcgtatatcatcatctgaaataatcatgtaaggcatacatttaacaattagagacttgtctcctgttatcaatatactattcttgtgataatttatgtgtgaggcaaatttgtccacgttctttaattttgttatagtagatatcaaatccaatggagctacagttcttggcttaaacagatatagtttttctggaacaaattctacaacattattataaaggactttgggtagataagtgggatgaaatcctattttaattaatgcgatagccttgtcctcgtgcagatatccaaacgcttttgtgatagtatggcattcattgtctagaaacgctctacgaatatctgtgacagatatcatctttagagaatatactagtcgcgttaatagtactacaatttgtattttttaatctatctcaataaaaaaattaatatgtatgattcaatgtataactaaactactaactgttattgataactagaatcagaatctaatgatgacgtaaccaagaagtttatctactgccaatttagctgcattatttttagcatctcgtttagattttccatcggccttatcgaatactcttccgtcgatgtctacacaggcataaaatgtaggagagttactaggcccaactgattcaatacgaaaagaccaatctctcctagtaatttggcagtactcattaataacggtgacagggttagcatctttccaatcaataatttttttagccggaataacatcatcaaaagacttatgatcctctctcattgatttttcgcgggatacatcatctattatgacgtcagccatagcatcagcatccggcttatccgcctccgttgtcataaaccaacgaggaggaatatcgtcggagctgtacaccatagcactacgttgaagatcgtacagagctttattaacttctcgcttctccatattaagttgtctagttagttgtgcagcagtagctccttcgattccaatgtttttaatagccgcacacacaatctctgcgtcagaacgctcgtcaatatagatcttagacatttttagagagaactaacgcaaccagcaataaaactgaacctactttatcatttttttattcatcatcctctggtggttcgtcgttcctatcaaatgtagctctgattaacccgtcatctataggtgatgctggttctggagattctggaggagatggattattatctggaagaatctctgttatttccttgttttcatgtatcgattgcgttgtaacattaagattgcgaaatgctctaaatttgggaggcttaaagtgttgtttgcaatctctacacgcgtgtctaactagtggaggttcgtcagctgctctagtttgaatcatcatcggcgtagtattcctacttttacagttaggacacggtgtattgtatttctcgtcgagaacgttaaaataatcgttgtaactcacatcctttattttatctatattgtattctactcctttcttaatgcattttataccgaataagagatagcgaaggaattctttttcggtgccgctagtacccttaatcatatcacatagtgttttatattccaaatttgtggcaatagacggtttatttctatacgatagtttgtttctggaatcctttgagtattctataccaatattattctttgattcgaatttagtttcttcgatattagattttgtattacctatattcttgatgtagtactttgatgatttttccatggcccattctattaagtcttccaagttggcatcatccacatattgtgatagtaattctcggatatcagtagcggctaccgccattgatgtttgttcattggatgagtaactactaatgtatacattttccatttataacacttatgtattaactttgttcatttatattttttcattattatgttgatattaacaaaagtgaatatatatatgttaataattgtattgtggttatacggctacaattttataatgagtgaaagtcagtgtccgatgatcaatgacgatagctttactctgaaaagaaagtatcaaatcgatagtgcggagtcaacaataaaaatggataagaagaggataaagtttcagaatagagccaaaatggtaaaagaaataaatcagacaataagagcagcacaaactcattacgagacattgaaactaggatacataaaatttaagagaatgattatgactactactctagaagatatagcaccatctattccaaataatcagaaaacttataaactattctcggacatttcagccatcggcaaagcatcacagaatccgagtaagatggtatatgctctgctgctttacatgtttcccaatttgtttggagatgatcatagattcattcgttatagaatgcatccaatgagtaaaatcaaacacaagatcttctctcctttcaaacttaatcttattagaatattagtggaagaaagattctataataatgaatgcagatctaataaatggagaataattggaacacaagttgataaaatgttgatagctgaatctgataaatatacaatagatgcaaggtataacctaaaacccatgtatagaatcaagggagaatctgaagaagataccctctttatcaaacagatggtagaacaatgtgtgacatcccaggaattggtggaaaaagtgttgaagatactgtttagagatttgttcaagagtggagaatacaaagcgtacagatacgatgatgatgtagaaaatggatttattggattggatacactaaaattaaacattgttcatgatatagttgaaccatgtatgcctgttcgtaggccagtggctaagatactgtgtaaagaaatggtaaataaatactttgagaatccgctacatattattggtaaaaatcttcaagagtgcattgactttgttagtgaataggcatttcatctttctccaatactaattcaaattgttaaattaataatggatagtataaatagttattagttataagatagtaaaaataattattagaataagagtgtagtatcatagataactctcttctataaaaatggattttattcgtagaaagtatcttatatacacagtagaaaataatatagattttttaaaggatgatacattaagtaaagtaaacaattttaccctcaatcatgtactagctctcaagtatctagttagcaattttcctcaacacgttattactaaggatgtattagctaataccaatttttttgttttcatacatatggtacgatgttgtaaagtgtacgaagcggttttacgacacgcatttgatgcacccacgttgtacgttaaagcattgactaagaattatttatcgtttagtaacgcaatacaatcgtacaaggaaaccgtgcataaactaacacaagatgaaaaatttttagaggttgccgaatacatggacgaattaggagaacttataggcgtaaattatgacttagttcttaatccattatttcacggaggggaacccatcaaagatatggaaatcatttttttaaaactgtttaagaaaacagacttcaaagttgttaaaaaattaagtgttataagattacttatttgggcatacctaagcaagaaagatacaggcatagagtttgcggataatgatagacaaaatatatacactctatttcaacaaactggtagaatcgtccatagcaatctaacagaaacgtttagagattatatctttcccggagataagactagctattgggtgtggttaaacgaaagtatagctaatgatgcggatatcgttcttaatagacacgccattaccatgtatgataaaattcttagttatatatactctgagataaaacaaggacgcgttaataaaaacatgcttaagttagtttatatctttgagcctgaaaaagatatcagagaacttctgctagaaatcatatatgatattcctggagatatcctatctattattgatgcaaaaaacgacgattggaaaaaatattttattagtttttataaagctaattttattaacggtaatacatttattagtgatagaacgtttaacgaggacttattcagagttgttgttcaaatagatcccgaatatttcgataatgaacgaattatgtctttattctctacgagtgctgcggacattaaacgatttgatgagttagatattaataacagttatatatctaatataatttatgaggtgaacgatatcacattagatacaatggatgatatgaagaagtgtcaaatctttaacgaggatacgtcgtattatgttaaggaatacaatacatacctgtttttgcacgagtcggatcccatggtcatagagaacggaatactaaagaaactgtcatctataaaatccaagagtagacggctgaacttgtttagcaaaaacattttaaaatattatttagacggacaattggctcgtctaggtcttgtgttagatgattataaaggagacttgttagttaaaatgataaaccatcttaagtctgtggaggatgtatccgcattcgttcgattttctacagataaaaaccctagtattcttccatcgctaatcaaaactattttagctagttataatatttccatcatcgtcttatttcaaaggtttttgagagataatctatatcatgtagaagaattcttggataaaagcatccatctaaccaagacggataagaaatatatacttcaattgataagacacggtagatcatagaacagaccaaatatattattaataatttgtatatacatagatataattatcacacatttttgataaatgggaactgctgcaacaattcagactcccaccaaattaatgaataaagaaaatgcagaaatgattttggaaaaaattgttgatcatatagttatgtatattagtgacgaatcaagtgattcagaaaataatcctgaatatattgattttcgtaacagatacgaagactatagatctctcattataaaaagtgatcacgagtttgtaaagctatgtaaaaatcatgcggagaaaagttctccagaaacgcaacaaatgattatcaaacacatatacgaacaatatcttattccagtatctgaagtactattaaaacctataatgtccatgggtgacataattacatataacggatgtaaagacaatgaatggatgctagaacaactctctaccctaaactttaacaatctccgcacatggaactcatgtagcataggcaatgtaacgcgtctgttttatacattttttagttatctgatgaaagataaactaaatatataagtataatcccattctaatactttaacctgatgtattagcatcttattagaatattaacctaactaaaagacataacataaaaactcattacatagttgataaaaagcggtaggatataaatattatggctgccaccgttccgcgttttgacgacgtgtacaaaaatgcacaaagaagaattctagatcaagaaacattttttagtagaggtctaagtagaccgttaatgaaaaacacatatctatttgataattacgcgtatggatggataccagaaactgcaatttggagtagtagatacgcaaacctagatgctagtgactattatcccatttcgttgggattacttaaaaagttcgagtttctcatgtctctatataaaggtcctattcccgtatatgaagaaaaagtaaatactgaattcatagccaatggatcgttctctggtagatacgtatcatatcttcgaaagttttctgcccttccaacaaacgagtttattagttttttgttactgacttccattccaatctataatatcttgttctggtttaaaaacacacagtttgatattactaaacacacattattcagatacgtctatacagataatgccaaacacctggcgttggctaggtatatgcatcaaacaggagactataagcctttgtttagtcgtctcaaagagaattatatatttaccggtcccgttccaataagtatcaaagatatagatcaccctaatcttagtagagcaagaagtccatccgattatgagacattagctaatattagtactatattgtactttaccaagtatgatccggtattaatgtttttattgttttacgtacctgggtattcaattactacaaaaattactccagccgtagaatatctaatggataaactgaatctaacaaagagcgacgtacaactgttgtaaattattttatgcttcgtaaaatgtaggttttgaaccaaacattctttcaaagaatgagatgcataaaactttattatccaatagattgactatttcggacgtcaatcgtttaaagtaaacttcgtaaaatattctttgatcactgccgagtttaaaacttctatcgataattgtctcatatgttttaatatttacaagttttttggtccatggtacattagccggacaaatatatgcaaaataatatcgttctccaagttctatagtttctggattatttttattatattcagtaactaaatacatattagggttatctgcggatttataatttgagtgatgcattctactcaacataaataattctagaggagacgatctactatcaaattcggatcgtaaatctgtttctaaagaacggagaatatctatacatacctgattagaattcatccgtccttcagacaacatctcagacagtctggttttgtacatcttaatcatattcttatgaaacttggaaacatctcttctagtttcactagtacctttattaattctctcaggtacagattttgaattcgacgatgctgagtatttcatcgttgtatatttcttcttcgattgcataatcagattcttatataccgcctcaaactctattttaaaattattaaacaatactctattattaatcagtcgttctaactctttcgctatttctatagacttatctacatcttgactgtctatctctgtaaacacggagtcggtatctccatacacgctacgaaaacgaaatctgtaatctataggcaacgatgttttcacaatcggattaatatctctatcgtccatataaaatggattacttaatggattggcaaaccgtaacataccgttagataactctgctccatttagtaccgattctagatacaagatcattctacgtcctatggatgtgcaactcttagccgaagcgtatgagtatagagcactatttctaaatcccatcagaccatatactgagttggctactatcttgtacgtatattgcatggaatcatagatggccttttcagttgaactggtagcctgttttagcatctttttatatctggctctctctgccaaaaatgttcttaatagtctaggaatggttccttctatcgatctatcgaaaattgctatttcagagatgaggttcggtagtctaggttcacaatgaaccgtaatatatctaggaggtggatatttctgaagcaatagctgattatttatttcttcttccaatctattggtactaacaacgacaccgactaatgtttccggagatagatttccaaagatacacacattaggatacagactgttataatcaaagattaatacattattactaaacattttttgttttggagcaaataccttaccgccttcataaggaaacttttgttttgtttctgatctaactaagatagttttagtttccaacaatagctttaacagtggacccttgatgactgtactcgctctatattcgaataccatggattgaggaagcacatatgttgacgcacccgcgtctgtttttgtttctactccataatactcccacaaatactgacacaaacaagcatcatgaatacagtatctagccatatctaaagctatgtttagattataatccttatacatctgagctaaatcaacgtcatcctttccgaaagataatttatatgtatcattaggtaaagtaggacataatagtacgactttaaatccattttcccaaatatctttacgaattactttacatataatatcctcatcaacagtcacataattacctgtggttaaaacctttgcaaatgcagcggctttgcctttcgcgtctgtagtatcgtcaccgatgaacgtcatttctctaactcctctatttaatactttacccatgcaactgaacgcgttcttggatatagaatccaatttgtacgaatccaatttttcaaatttttgaatgaatgaatatagatcgaaaaatatagttccattattgttattaacgtgaaacgtagtattggccatgccgcctactcccttatgactagactgatttctctcataaatacagagatgtacagcttcctttttgtccggagatctaaagataattttctctcctgttaataactctagacgattagtaatatatctcagatcaaagttatgtccgttaaaggtaacgacgtagtcgaacgttagttccaacaattgtttagctattcgtaacaaaactatttcagaacatagaactagttctcgttcgtaatccatttccattagtgactgtatcctcaaacatcctctatcgacggcttcttgtatttcctgttccgttaacatctcttcattaatgagcgtaaacaataatcgtttaccacttaaatcgatataacagtaacttgtatgcgagattgggttaataaatacagaaggaaacttcttatcgaagtgacactctatatctagaaataagtacgatcttgggatatcgaatctaggtatttttttagcgaaacagttacgtggatcgtcacaatgataacatccattgttaatctttgtcaaatattgctcgtccaacgagtaacatccgtctggagatatcccgttagaaatataaaaccaactaatattgagaaattcatccatggtggcattttgtatgctgcgtttctttggctcttctatcaaccacatatctgcgacggagcattttctatctttaatatctagattataacttattgtctcgtcaatgtctatagttctcatctttcccaacggcctcgcattaaatggaggaggagacaatgactgatatatttcgtccgtcactacgtaataaaagtaatgaggaaatcgtataaatacggtctcgccatttcgacatctggatttcagatataaaaatctgttttcaccgtgactttcaaaccaattaatgcaccgaacatccatttatagaatttagaaatatattttcatttaaatgaatcccaaacattggggaagagccgtatggaccattatttttatagtactttcgcaagcgggtttagacggcaacatagaagcgtgtaaacgaaaactatatactatagttagcactcttccatgtcctgcatgtagacggcacgcgactatcgctatagaggacaataatgtcatgtctagcgatgatctgaattatatttattattttttcatcagattatttaacaatttggcatctgatcccaaatacgcgatcgatgtgacaaaggttaaccctttataaacttaacccattataaaacttatgattagtcacaactgaaataaccgcgtgattattttttggtataattctacacggcatggtttctgtgactatgaattcaacccccgttacattagtgaaatctttaacaaacagcaagggttcgtcaaagacataaaactcattgtttacaatcgaaatagaccccctatcacacttaaaataaaaaatatccttatcctttaccaccaaataaaattctgattggtcaatgtgaatgtattcacttaacagttccacaaatttatttattaactccgaggcacatacatcgtcggtattttttatggcaaactttactcttccagcatccgtttctaaaaaaatattaacgagttccatttatatcatccaatattattgaaatgacgttgatggacagatgatacaaataagaaggtacggtacctttgtccaccatctcctccaattcatgctctattttgtcattaactttaatgtatgaaaacagtacgccacatgcttccatgacagtgtgtaacactttggatacaaaatgtttgacattagtataattgtccaagactgtcaatctataatagatagtagctataatatattctatgatggtattgaagaagatgacaaccttggcatattgatcatttaacacagacatggtatcaacagatagcttgaatgaaagagaatcagtaattggaataagcgtcttctcgatagagtgtccgtataccaacatgtctgatattttgatgtattccattaaattatttagttttttctttttattctcgttaaacagcatttctgtcaacggaccccaacatcgttgaccgattaagttttgattgatttttccgtgtaaggcgtatctagtcagatcgtatagcctatccaataatccatcgtctgtgtgtagatcacatcgtacactttttaattctctatagaagagcgacagacatctggagcaattacagacagcaatttctttattctctacagatgtaagatacttgaagacattcctatgatgatgcagaattttggataacacggtattgatggtatctgttaccataattcctttgatggctgatagtgtcagagcacaagatttccaatctttgacaatttttagcaccattatctttgttttgatatctatatcagacagcatggtgcgtctgacaacacagggattaagacggaaagatgaaatgattctctcaacatcttcaatagataccttgctattttttctggcattatctatatgtgcgagaatatcctctagagaatcagtatcctttttgatgatagtggatctcaatgacatgggacgtttaaaccttcttattctatcaccagattgcatggtgatttgtcttctttcttttatcataatgtaatctctaaattcatcggcaaattgtctatatctaaaatcataatatgagatgtttacctctacaaatatctgttcgtccaatgttagagtatttacatcagttttgtattccaaattaaacatggcaacggatttaattttatattcctctattaagtcctcgtcgataataacagaatgtagataatcatttaatccgtcgtacatggttggaagatgcttgttgacaaaatctttaattgtcttgatgaaggtgggactatatctaacatcttgattaataaaatttataacattgtccataggatactttgtaactagttttatacacatctcttcatcggtaagtttagacagaatatcgtgaacaggtggtatattatattcatcagatatacgaagaacaatgtccaaatctatattgtttaatatattatatagatgtagcgtagctcctacaggaatatctttaactaagtcaatgatttcatcaaccgttagatctattttaaagttaatcatataggcattgatttttaaaaggtatgtagccttgactacattctcattaattaaccattccaagtcattgtgtgtaagaagattatattctatcataagcttgactacatttggtcccgataccattaaagaattcttatgatataaggaaacagattttaggtactcatctactctacaagaattttggagagccttaacgatatcagtgacgtttattatttcaggaggaaagaatctaacattgagaatatcggaattaatagcttccagatacagtgattttggcaatagtccgtgtaatccataatccagtaacacgagctggtgcttgctagacaccttttcaatgtttaatttttttgaaataagctttgataaagccttcctcgcaaattccggatacatgaacatgtcggcgacatgattaagtattgttttttcattatttttatattttctcaacaagttctcaataccccaatagatgatagaatatcacccaatgcgtccatgttgtctatttccaacaggtcgctatatccaccaatagaagtttttccaaaaaagattctaggaacagttctaccaccagtaatttgttcaaaataatcccgcaattcattttcgggtttaaattctttaatatcgacaatttcatacgctcctcttttgaaactaaacttatttagaatatccagtgcatttctacaaaaaggacatgtatacttgacaaaaattgtcactttgttattggccaacctttgttgtacaaattcctcggccattttaatatttaagtgatataaaactatctcgacttatttaactctttagtcgagatatatggacgcagatagctatatgatagccaactacagaaggcaaacgctataaaaaacataattacgacgagcatatttataaatatttttattcagcattacttgatatagtaatattaggcacagtcaaacattcaaccactctcgatacattaactctctcattttctttaacaaattctgcaatatcttcgtaaaaagattcttgaaactttttagaatatctatcgactctagatgaaatagcgttcgtcaacatactatgttttgtatacataaaggcgcccattttaacagtttctagtgacaaaatgctagcgatcctaggatcctttagaatcacatagattgacgattcgtctctcttagtaactctagtaaaataatcatacaatctagtacgcgaaataatattatccttgacttgaggagatctaaacaatctagttttgagaacatcgataagttcatcgggaatgacatacatactatctttaatagaactcttttcatccagttgaatggattcgtccttaaccaactgattaatgagatcttctattttatcattttccagatgatatgtatgtccattaaagttaaattgtgtagcgcttctttttagtctagcagccaatactttaacatcactaatatcgatatacaaaggagatgatttatctatggcattaagaattcgtttttcgacatccgtcaaaaccaattcctttttgcctgtatcatccagttttccatcctttgtaaagaaattattttctactagactattaataagactgataaggattcctccataattgcacaatccaaactttttaacaaaactagactttacgagatctacaggaatgcgtacttcaggttttttagcttgtgattttttcttttgcggacattttctagtaaccaactcatctaccatttcattgattttagcagtgaaataagctttcaatgcacgggcactgatactattgaaaacgagttgatcttcaaattccgccatttaagttcaccaaacaacttttaaatacaaatatatcaatagtagtagaataagaactataaaaaaaataataattaaccaaccccaacaaccggtattattagttgatgtggtagttttctcatcacttagaacagatttaacaatttctataaagtctgtcaaatcatcttccggagaccccataaatacaccaaatatagcggcgtacaacttatccatttatacattgaatattggcttttctttatcgctatcttcatcatattcatcatcaatatcaacaagtcccagattacgagccagatcttcttctacattttcagtcattgatacacgttcactatctccagagagtccgataacgttagccaccacttctctatcaatgattagtttcttgagcgcgaaagtaatttttgtttccgttccggatctatagaagacgataggtgtgataattgccttggccaattgtctttctcttttactgagtgattctagttcaccttctatagatctgagaatggatgattctccagtcgaaacatattctaccatggatccgtttaatttgttgatgaagatggattcatccttaaatgttttctctgtaatagtttccaccgaaagactatgcaaagaatttggaatgcgttccttgtgcttaatgtttccatagacggcttctagaagttgatacaacataggactagccgcggtaacttttatttttagaaagtatccatcgcttctatcttgtttagatttatttttataaagtttagtctctccttccaacataataaaagtggaagtcatttgactagataaactatcagtaagttttatagagatagacgaacaattagcgtattgagaagcatttagtgtaacgtattcgatacattttgcattagatttactaatcgattttgcatactctataacacccgcacaagtctgtagagaatcgctagatgcagtaggtcttggtgaagtttcaactctcttcttgattaccttactcatgattaaacctaaataattgtactttgtaatataatgatatatattttcactttatctcatttgagaataaaaatgtttttgtttaaccactgcatgatgtacagatttcggaatcgcaaaccaccagtggttttattttatccttgtccaatgtgaattgaatgggagcggatgcgggtttcgtacgtagatagtacattcccgtttttagaccgagactccatccgtaaaaatgcatactcgttagtttggaataactcggatctgctatatggatattcatagattgactttgatcgatgaaggctcccctgtctgcagccatttttatgatcgtcttttgtggaatttcccaaatagttttataaactcgcttaatatcttctggaaggtttgtattctgaatggatccaccatctgccataatcctattcttgatctcatcattccataattttctctcggttaaaactctaaggagatgcggattaactacttgaaattctccagacaatactctccgagtgtaaatattactggtatacggttccaccgactcattatttcccaaaatttgagcagttgatgcagtcggcataggtgccaccaataaactatttctaagaccgtatgttctgattttatcttttagaggttcccaattccaaagatccgacggtacaacattccaaagatcatattgtagaataccgttactggcgtacgatcctacatatgtatcgtatggtccttccttctcagctagttcacaactcgcctctaatgcaccgtaataaatggtttcgaagatcttcttatttagatcttgtgcttccaggctatcaaatggataatttaagagaataaacgcgtccgctaatccttgaacaccaataccgataggtctatgtctcttattagagatttcagcttctggaataggataataattaatatctataattttattgagatttctgacaattactttgaccacatccttcagtttgagaaaatcaaatcgcccatctattacaaacatgttcaaggcaacagatgccagattacaaacggctacctcattagcatccgcatattgtattatctcagtgcaaagattactacacttgatagttcctaaattttgttgattactctttttgttacacgcatccttataaagaatgaatggagtaccagtttcaatctgagattctataatcgctttccagacgactcgagcctttattatagatttgtatctcctttctctttcgtatagtgtatacaatcgttcgaactcgtctccccaaacattgtccaatccaggacattcatccggacacatcaacgaccactctccgtcatccttcactcgtttcataaagagatcaggaatccaaagagctataaatagatctctggttctatgttcctcgtttcctgtattctttttaagatcgaggaacgccataatatcagaatgccacggttccaagtatatggccataactccaggccgtttgtttcctccctgatctatgtatctagcggtgttattataaactctcaacattggaataataccgtttgatataccattggtaccggagatatagcttccactggcacgaatattactaattgatagacctattccccctgccattttagagattaatgcgcatcgttttaacgtgtcatagataccctctatgctatcatcgatcatgttaagtagaaaacagctagacatttggtgacgactagttcccgcattaaataaggtaggagaagcgtgcgtaaaccatttttcagaaagtagattgtacgtctcaatagctgagtctatatcccattgatgaattcctactgcgacacgcattaacatgtgctgaggtctttcaacgatcttgttgtttattttcaacaagtaggatttttccaaagttttaaaaccaaaatagttgtatgaaaagtctcgttcgtaaataataaccgagttgagtttatccttatatttgttaactatatccatggtgatacttgaaataatcggagaatgtttcccatttttaggattaacatagttgaataaatcctccatcacttcactaaatagtttttttgtttccttgtgtagatttgatacggctattctggcggctagaatggcataatccggatgttgtgtagtacaagtggctgctatttcggctgccagagtgtccaattctaccgttgttactccattatatattccttgaataaccttcatagctattttaataggatctatatgatccgtgtttaagccataacataattttctaatacgagacgtgattttatcaaacatgacattttccttgtatccatttcgtttaatgacaaacatttttgttggtgtaataaaaaaattatttaacttttcattaatagggatttgacgtatgtagcgtacaaaatgattgttcctggtatatagataaagagtcctatatatttgaaaatcgttacggctcgattaaactttaatgattgcatagtgaatatatcattaggatttaactccttgactatcatggcggcgccagaaattaccatcaaaagcattaatacagttataccgatcgcagttagaacggttatagcatccaccatttatatctaaaaattagatcaaagaatatgtgacaaagtcctagttgtatactgagaattgacgaaacaatgtttcttacatatttttttcttattagtaaccgacttaatagtaggaactggaaaactagacttgattattctataagtatagatacccttccaaataatattctctttgataaaagttccagaaaatgtagaattttttaaaaagttatcttttgctattaccaagattgtgtttagacgcttattattaatatgagtgatgaaatccacaccgcctctagatatcgcctttatttccacattagatggtaaatccaatagtgaaactatctttttaggaatgtatggactcgcgtttagaggagtaaacgtcttaggcgtcggaaaggatgattcatcaaacgaataaacaatttcacaaatggatgttaatgtattagtaggaaattttttgacgctattggaattgaagattctaatggatgatgttctacctatttcatccgataacatgttaatttccgacaccaacggttttaatatttcgatgatatacggtagtctctctttcggacttatatagcttattccacaatacgagtcattatatactccaaaaaacaaaataactagtataaaatctgtatcgaatgggaaaaacgaaattatcgacataggtatagaatccggaacattgaacgtattaatacttaattctttttctgtggtaagtaccgataggttattgacattgtatggttttaaatattctataacttgagacttgatagatattagtgatgaattgaaaattatttttatcaccacgtgtgtttcaggatcatcgtcgacgcccgtcaaccaaccgaacggagtaaaataaatatcattaatatatgctctagatattagtatttttatcaatcctttgattatcatcttctcgtaggcgaatgattccatgatcaagagtgatttaagaacatcctccggagtattaatgggcttagtaaacagtccatcgttgcaataataaaagttatccaagttaaaggatattatgcattcgtttaaagatatcacctcatctgacggagacaattttttggtaggttttagagactttgaagctacttgtttaacaaagttattcatcgtcgtctactattctatttaattttgtagttaatttatcacatatcacattaattgactttttggtccacttttccatacgtttatattcttttaatcctgcgttatccgtttccgttatatccagggatagatcttgcaagttaaatagaatgctcttaaataatgtcattttcttatccgctaaaaatttaaagaatgtataaacctttttcagagatttgaaactcttaggtggtgtcctagtacacaatatcataaacaaactaataaacattccacattcagattccaacagctgattaacttccacattaatacagcctattttcgctccaaatgtacattcgaaaaatctgaataaaacatcgatgtcacaatttgtattatccaatacagaatgtttgtgattcgtgttaaaaccatcggagaaggaatagaaataaaaattattatagtggtggaattcagttggaatattgcctccggagtcataaaaggatactaaacattgttttttatcataaattacacatttccaatgagacaaataacaaaatccaaacattacaaatctagaggtagaacttttaattttgtctttaagtatatacgataagatatgtttattcataaacgcgtcaaatttttcatgaatcgctaaggagtttaagaatctcatgtcaaattgtcctatataatccacttcggatccataagcaaactgagagactaagttcttaatacttcgattgctcatccaggctcctctctcaggctctattttcatcttgacgacctttggattttcaccagtatgtattcctttacgtgataaatcatcgattttcaaatccatttgtgagaagtctatcgccttagatactttttcccgtagtcgaggtttaaaaaaatacgctaacggtatactagtaggtaactcaaagacatcatatatagaatggtaacgcgtctttaactcgtcggttaactctttcttttgatcgagttcgtcgctactattgggtctgctcaggtgccccgactctactagttccaacatcataccgataggaatacaagacactttgccggcggttgtagatttatcatatttttccactacatatccgttacaatttgttaaaaatttagatacatctatattgctacataatccagctagtgaatatatatgacataataaattggtaaatcctagttctggtattttactaattactaaatctgtatatctttccatttatcatggaaaagaatttaccagatatcttcttttttccaaactgcgttaatgtattctcttacaaatattcacaagatgaattcagtaatatgagtaaaacggaacgtgatagtttctcattggccgtgtttccagttataaaacatagatggcataacgcacacgttgtaaaacataaaggaatatacaaagttagtacagaagcacgtggaaaaaaagtatctcctccatcactaggaaaacccgcacacataaacctaaccgcgaagcaatatatatacagtgaacacacaataagctttgaatgttatagttttctaaaatgtataacaaatacagaaatcaattcgttcgatgagtatatattaagaggactattagaagctggtaatagtttacagatattttccaattccgtaggtaaacgaacagatactataggtgtactagggaataagtatccatttagcaaaattccattggcctcattaactcctaaagcacaacgagagatattttcagcgtggatttctcatagacctgtagttttaactggaggaactggagtgggtaagacgtcacaggtacccaagttattgctttggtttaattatttatttggtggattctctactctagataaaatcactgactttcacgaaagaccagtcattctatctcttcctaggatagctttagttagattgcatagcaataccattttaaaatcattgggatttaaggtactagatggatctcctatttctttacggtacggatctataccggaagaattaataaacaaacaaccaaaaaaatatggaattgtattttctacccataagttatctctaacaaaactatttagttatggcactcttattatagacgaagttcatgagcatgatcaaataggagatattattatagcagtagcgagaaagcatcatacgaaaatagattctatgtttttaatgactgccacgttagaggatgacagggaacggctaaaagtatttttacctaatcccgcatttatacatattcctggagatacactgtttaaaattagcgaggtatttattcataataagataaatccatcttccagaatggcatacatagaagaagaaaagagaaatttagttactgctatacagatgtatactcctcctgatggatcatccggtatagtctttgtggcatccgttgcacagtgtcacgaatataaatcatatttagaaaaaagattaccgtatgatatgtatattattcatggtaaggtcttagatatagacgaaatattagaaaaagtgtattcatcacctaatgtatcgataattatttctactccttatttggaatccagcgttactatacgcaatgttacacacatttatgatatgggtagagtttttgtccccgctccttttggaggatcgcaacaatttatttctaaatctatgagagatcaacgaaaaggaagagtaggaagagttaatcctggtacatacgtctatttctatgatctgtcttatatgaagtctatacagcgaatagattcagaatttctacataattatatattgtacgctaataagtttaatctaacactccccgaagatttgtttataatccctacaaatttggatattctatggcgtacaaaggaatatatagactcgttcgatattagtacagaaacatggaataaattattatccaattattatatgaagatgatagagtatgctaaactttatgtactaagtcctattctcgctgaggagttggataactttgagaggacgggagaattaactagtattgtacgagaagccattttatctctaaatttacaaattaagattttaaattttaaacataaagatgatgatacgtatatacacttttgtaaaatattattcggtgtctataacggaacaaacgctactatatattatcatagacctctaacgggatatatgaatatgatttcagatactatatttgttcctgtagataataactaaaaatcaaactctaatgaccacatctttttttagagatgaaaaattttccacatctccttttgtagacacgactaaacattttgcagaaaaaagtttattagtgtttagataatcgtatacttcatcagtgtagatagtaaatgtgaacagataaaaggtattcttgctcaatagattggtaaattccatagaatatattaatcctttcttcttgagatcccacatcatttcaaccagagacgttttatccaatgatttacctcgtactataccacatacaaaactagattttgcagtgacgtcgtacctggtattcctaccaaacaaaattttacttttagttcttttagaaaattctaaggtagaatctctatttgccaatatgtcatctatggaattaccactagcaaaaaatgatagaaatatatattgatacatcgcagctggttttgatctactatactttaaaaacgaatcagattccataattgcctgtatatcatcagctgaaaaactatgttttacacgtattccttcggcatttctttttaatgatatatcttgtttagacaatgataaagttatcatgtccatgagagacgcgtctccgtatcgtataaatatttcattagatgttagacgcttcattaggggtatacttctataaggtttcttaatcagtccatcattggttgcgtcaagaactactatcggatgttgttgggtatctctagtgttacacatggccttactaaagtttgggtaaataactatgatatctctattaattatagatgcatatatttcattcgtcaaggatattagtatcgacttgctatcgtcattaatacgtgtaatgtaatcatataaatcatgcgatagccaaggaaaatttaaatagatgttcatcatataatcgtcgctataattcatattaatacgttgacattgactaatttgtaatatagcctcgccacgaagaaagctctcgtattcagtttcatcgataaaggataccgttaaatataactggttgccgatagtctcatagtctattaagtggtaagtttcgtacaaatacagaatccctaaaatattatctaatgttggattaatctttaccataactgtataaaatggagacggagtcataactattttaccgtttgtacttactggaatagatgaaggaataatctccggacatgctggtaaagacccaaatgtctgtttgaagaaatccaatgttccaggtcctaatctcttaacaaaaattacgatattcgatcccgatatcctttgcattctatttaccagcatatcacgaactatattaagattatctatcatgtctattctcccaccgttatataaatcgcctccgctaagaaacgttagtatatccatacaatggaatacttcatttctaaaatagtattcgttttctaattctttaatgtgaaatcgtatactagaaagggaaaaattatctttgagttttccgttagaaaagaaccacgaaactaatgttctgattgcgtccgattccgttgctgaattaatggatttacaccaaaaactcatataacttctagatgtagaagcattcgctaaaaaattagtagaatcaaaggatataagtagatgttccaacaagtgagcaattcccaagatttcatctatatcattctcgaatccgaaattagaaattcccaagtagatatcctttttcatccgatcgttgatgaaaatacgaactttattcggtaagacaatcatttactaaggagtaaaataggaagtaatgttcgtatgtcgttatcatcgtataaattaaaggtgtgttttttaccattaagtgacattataattttaccaatattggaattataatataggtgtatttgcgcactcgcgacggttgatgcatcggtaaatatagctgtatctaatgttctagtcggtatttcatcatttcgctgtctaataatagcgttttctctatctgtttccattacagctgcctgaagtttattggtcggataatatgtaaaataataagaaatacatacgaataacaaaaataaaataagatataataaagatgccatttagagatctaattttgtttaacttgtccaaattcctacttacagaagatgaggaatcgttggagatagtgtcttccttatgtagaggatttgaaatatcttataatgacttgataacttactttccagataggaaataccataaatatatttataaagtatttgaacatgtagatttatcggaggaattaagtatggaattccatgatacaactctgagagatttagtctatcttagattgtacaagtattccaagtgtatacggccgtgttataaattaggagataatctaaaaggcatagttgttataaaggacaggaatatttatattagggaagcaaatgatgacttgatagaatatctcctcaaggaatacactcctcagatttatacatattctaatgagcgcgtccccataactggttcaaaattaattctttgtggattttctcaagttacatttatggcgtatacaacgtcgcatataacaacaaataaaaaggtagatgttctcgtttccaaaaaatgtatagatgaactagtcgatccaataaattatcaaatacttcaaaatttatttgataaaggaagcggaacaataaacaaaatactcaggaagatattttattcggtaacaggtggccaaactccataggtagctttttctatttcggattttagaatttccaaattcaccagcgatttatcggttttggtgaaatccaaggatttattaatgtccacaaatgccatttgttttgtctgtggattgtatttgaaaatggaaacgatgtagttagatagatgcgctgcgaagtttcctattagggttccgcgcttcacgtcacccagcatacttgaatcaccatcctttaaaaaaaatgataagatatcaacatggagtatatcatactcgaattttaattcttctactgactcactgacattttcacaaatactacaatacggtttaccgaaaataatcagtacgttcttcatttatgggtatcaaaaacttaaaatcgttactgctggaaaataaatcactgacgatattagatgataatttatacaaagtatacaatggaatatttgtggatacaatgagtatttatatagccgtcgccaattgtgtcagaaacttagaagagttaactacggtattcataaaatacgtaaacggatgggtaaaaaagggagggcatgtaaccctttttatcgatagaggaagtataaaaattaaacaagacgttagagacaagagacgtaaatattctaaattaaccaaggacagaaaaatgttagaattagaaaagtgtacatccgaaatacaaaatgttaccggatttatggaagaagaaataaaggcagaaatgcaattaaaaatcgataaactcacatttcaaatatatttatctgattctgataacataaaaatatcattgaatgagatactaacacatttcaacaataatgagaatgttacattattttattgtgatgaacgagacgcagaattcgttatgtgtctcgaggctaaaacacatttctctaccacaggagaatggccgttgataataagtaccgatcaggatactatgctatttgcatctgctgataatcatcctaagatgataaaaaacttaactcaactgtttaaatttgttccctcggcagaggataactatttagcaaaattaacggcgttagtgaatggatgtgatttctttcctggactctatggggcatctataacacccaccaacttaaacaaaatacaattgtttagtgattttacaatcgataatatagtcactagtttggcaattaaaaattattatagaaagactaactctaccgtagacgtgcgtaatattgttacgtttataaacgattacgctaatttagacgatgtctactcgtatattcctccttgtcaatgcactgttcaagaatttatattttccgcattagatgaaaaatggaatgaatttaaatcatcttatttagaaagcgtgccgttaccctgccaattaatgtacgcgttagaaccacgcaaggagattgatgtttcagaagttaaaactttatcatcttatatagatttcgaaaatactaaatcagatatcgatgttataaaatctatatcctcgatcttcggatattctaacgaaaactgtaacacgatagtattcggcatctataaggataatttactactgagtataaataattcattttactttaacgatagtctgttaataaccaatactaaaagtgataatataataaatataggttactagattaaaaatggtgttccaactcgtgtgctctacatgcggtaaagatatttctcacgaacgatataaattgattatacgaaaaaaatcattaaaggatgtactcgtcagtgtaaagaacgaatgttgtaggttaaaattatctacacaaatagaacctcaacgtaacttaacagtgcaacctctattggatataaactaatatggatccggttaattttatcaagacatatgcgcctagaggttctattatttttattaattataccatgtcattaacaagtcatttgaatccatcgatagaaaaacatgtgggtatttattatggtacgttattatcggaacacttggtagttgaatctacctatagaaaaggagttcgaatagtcccattggatagtttttttgaaggatatcttagtgcaaaagtatacatgttagagaatattcaagttatgaaaatagcagctgatacgtcattaactttattgggtattccgtatggatttggtcatgatagaatgtattgttttaaattggtagctgactgttataaaaatgccggtattgatacatcgtctaaacgaatattgggcaaagatatttttctgagccaaaacttcacagacgataatagatggataaagatatatgattctaataatttaacattttggcaaattgattaccttaaagggtgagttaatatgcataactactcctccgttgttttttccctcgttctttttcttaacgttgtttgccatcactctcataatgtaaagatattctaaaatggtaaacttttgcatatcggacgcagaaattggtataaatgttgtaattgtattatttcccgtcaatggactagtcacagctccatcagttttatatcctttagagtatttctcactcgtgtctaacattctagagcattccatgatctgtttatcgttgatattggccggaaagatagattttttattttttattatattactattggcaattgtagatataacttctggtaaatatttttctaccttttcaatctcttctattttcaagccggctatatattctgctatattgttgctagtatcaataccttttctggctaagaagtcatatgtggtattcactatatcagttttaactggtagttccattagcctttccacttctgcagaataatcagaaattggttctttaccagaaaatccagctactataataggctcaccgatgatcattggcaaaatcctatattgtaccagattaatgagagcatatttcatttccaataattctgctagttcttgagacattgatttatttgatgaatctagttggttctctagatactctaccatttctgccgcatacaataacttgttagataaaatcagggttatcaaagtgtttagcgtggctagaatagtgggcttgcatgtattaaagaatgcggtagtatgagtaaaccgttttaacgaattatatagtctccagaaatctgtggcgttacatacatgagccgaatgacatcgaagattgtccaatatttttaatagctgctctttgtccattatttctatatttgactcgcaacaattgtagataccattaatcaccgattcctttttcgatgccggacaatagcacaattgtttagctttggactctatgtattcagaattaatagatatatctctcaatacagattgcactatacattttgaaactatgtcaaaaattgtagaacgacgctgttctgcagccatttaactttaaataatttacaaaaatttaaaatgagcatccgtataaaaatcgataaactgcgccaaattgtggcatatttttcagagttcagtgaagaagtgtctataaatgtagactcgacggatgagttaatgtatatttttgccgccttgggcggatctgtaaacatttgggcaattatacctctaagtgcatcagtgttttaccgaggagccgaaaatattgtgtttaatcttcctgtgtccaaggtaaaatcgtgtttgtgtagttttcacaatgatgccatcatagatatagaacctgatctggaaaataatctagtaaaactttctagttatcatgtagtaagtgtcgattgtaacaaggaactgatgcctattaggacagatactactatttgtctaagtatagatcaaaagaaatcttacgtgtttaattttcacaagtatgaagaaaaatgttgtggtagaaccgtcattcatctagaatggttgttgggctttatcaagtgtattagtcagcatcagcatctggctattatgtttaaagatgacaatattattatgaagactcctggtaatactgatgcgttttccagggaatattctatgactgaatgttctcaagaactacaaaagttttctttcaaaatagctatctcgtctctcaacaaactacgaggattcaaaaagagagtcaatgtttttgaaactagaatcgtaatggataatgacgataacattttaggaatgttgttttcggatagagttcaatcctttaagatcaacatctttatggcgtttttagattaatactttcaatgagataaatatgggtggcggagtaagtgttgagctccctaaacgggatccgcctccgggagtacccactgatgagatgttattaaacgtggataaaatgcatgacgtgatagctcccgctaagcttttagaatatgtgcatataggaccactagcaaaagataaagaggataaagtaaagaaaagatatccagagtttagattagtcaacacaggacccggtggtctttcggcattgttaagacaatcgtataatggaaccgcacccaattgctgtcgcacttttaatcgtactcattattggaagaaggatggaaagatatcagataagtatgaagagggtgcagtattagaatcgtgttggccagacgttcacgacactggaaaatgcgatgttgatttattcgactggtgtcagggggatacgttcgatagaaacatatgccatcagtggatcggttcagcctttaataggagtaatagaactgtagagggtcaacaatcgttaataaatctgtataataagatgcaaacattatgtagtaaagatgctagtgtaccaatatgcgaatcatttttgcattatttacgcgcacacaatacagaagatagcaaagagatgatcgattatattctaagacaacagtctgcggactttaaacagaaatatatgagatgtagttatcccactagagataagttagaagagtcattaaaatatgcggaacctcgagaatgttgggatccagagtgttcgaatgccaatgttaatttcttactaacacgtaattataataatttaggactttgcaatattgtacgatgtaataccagcgtgaacaacttacagatggataaaacttcctcattaagattgtcatgtggattaagcaatagtgatagattttctactgttcccgtcaatagagcaaaagtagttcaacataatattaaacactcgttcgacctaaaattgcatttgatcagtttattatctctcttggtaatatggatactaattgtagctatttaaatgggtgccgcggcaagcatacagacgacggtgaatacactcagcgaacgtatctcgtctaaattagaacaagaagcgaacgctagtgctcaaacaaaatgtgatatagaaatcggaaatttttatatccgacaaaaccatggatgtaacctcactgttaaaaatatgtgctctgcggacgcggatgctcagttggatgctgtgttatcagccgctacagaaacatatagtggattaacaccggaacaaaaagcatacgtgccagctatgtttactgctgcgttaaacattcagacgagtgtaaacactgttgttagagattttgaaaattatgtgaaacagacttgtaattctagcgcggtcgtcgataacaaattaaagatacaaaacgtaatcatagatgaatgttacggagccccaggatctccaacaaatttggaatttattaatacaggatctagcaaaggaaattgtgccattaaagcgttgatgcaattgacgactaaggccactactcaaatagcacctagacaagttgctggtacaggagttcagttttatatgattgttatcggtgttataatattggcagcgttgtttatgtactatgccaagcgtatgttgttcacatccaccaatgataaaatcaaacttattttagccaataaggaaaacgtccattggactacttacatggacacattctttagaacttctccgatggttattgctaccacggatatgcaaaactgaaaatatattgataatattttaatagattaacatggaagttatcgctgatcgtctagacgatatagtgaaacaaaatatagcggatgaaaaatttgtagattttgttatacacggtctagagcatcaatgtcctgctatacttcgaccattaattaggttgtttattgatatactattatttgttatagtaatttatatttttacggtacgtctagtaagtagaaattatcaaatgttgttggtggtgctagtcatcacattaactattttttattactttatactataatagtactagactgacttctaacaaacatctcacctgccataaataaatgcttgatattaaagtcttctatttctaacactattccatctgtggaaaataatactctgacattatcgctaattgacacatcggtgagtgatatgcctataaagtaataatcttctttgggcacatataccagtgtaccaggttctaacaacctatttactggtgctcctgtagcatactttttctttaccttgagaatatccatcgtttgcttggtcaatagcgatatgtgattttttatcaaccactcaaaaaagtaattggagtgttcatatcctctacgggctattgtctcatggccgtgtatgaaatttaagtaacacgactgtggtagatttgttctatagagccgattgccgcaaatagatagaactaccaatatgtctgtacaaatgttaaacattaattgattaacagaaaaaacaatgttcgttctgggaatagaaaccagatcaaaacaaaattcgttagaatatatgccacgtttatacatggaatataaaataactacagtttgaaaaataacagtatcatttaaacatttaacttgcggggttaatctcacaactttactgtttttgaactgttcaaaatatagcatcgatccgtgagaaatacgtttagccgcctttaatagaggaaatcccaccgcctttctggatctcaccaacgacgatagttctgaccagcaactcatttcttcatcatccacctgttttaacatataataggcaggagatagatatccgtcattgcaatattccttctcgtaggcacacaatctaatattgataaaatctccattctcttctctgcatttattatcttgtctcggtggctgattaggctgtggtcttggtttaggccttggtctatcgttgttgaatctattttggtcattaaatctttcatttcttcctggtatatttctatcacctcgtttggttggatttttgtctatattatcgtttgtaacatcggtacgggtattcatttatcacaaaaaaaacttctctaaatgagtctactgctagaaaacctcatcgaagaagataccatattttttgcaggaagtatatctgagtatgatgatttacaaatggttattgccggcgcaaaatccaaatttccaagatctatgctttctatttttaatatagtacctagaacgatgtcaaaatatgagttggagttgattcataacgaaaatatcacaggagcaatgtttaccacaatgtataatataagaaacaatttgggtctaggagatgataaactaactattgaagccattgaaaactatttcttggatcctaacaatgaagttatgcctcttattattaataatacggatatgactgccgtcattcctaaaaaaagtggtaggagaaagaataagaacatggttatcttccgtcaaggatcatcacctatcttgtgcattttcgaaactcgtaaaaagattaatatttataaagaaaatatggaatccgcgtcgactgagtatacacctatcggagacaacaaggctttgatatctaaatatgcgggaattaatgtcctgaatgtgtattctccttccacatccataagattgaatgccatttacggattcaccaataaaaataaactagagaaacttagtactaataaggaactagaatcgtatagttctagccctcttcaagaacccattaggttaaatgattttctgggactattggaatgtgttaaaaagaatattcctctaacagatattccgacaaaggattgattactataaatggagaatgttcctaatgtatactttaatcctgtgtttatagagcccacgtttaaacattctttattaagtgtttataaacacagattaatagttttatttgaagtattcgttgtattcattctaatatatgtattttttagatctgaattaaatatgttcttcatgcctaaacgaaaaatacccgatcctattgatagattacgacgtgctaatctagcgtgtgaagacgataaattaatgatctatggattaccatggatgacaactcaaacatctgcgttatcaataaatagtaaaccgatagtgtataaagattgtgcaaagcttttgcgatcaataaatggatcacaaccagtatctcttaacgatgttcttcgcagatgatgattcattttttaagtatttggctagtcaagatgatgaatcttcattatctgatatattgcaaatcactcaatatctagactttctgttattattattgatccaatcaaaaaataaattagaagctgtgggtcattgttatgaatctctttcagaggaatacagacaattgacaaaattcacagactttcaagattttaaaaaactgtttaacaaggtccctattgttacagatggaagggtcaaacttaataaaggatatttgttcgactttgtgattagtttgatgcgattcaaaaaagaatcctctctagctaccaccgcaatagatcctgttagatacatagatcctcgtcgcaatatcgcattttctaacgtgatggatatattaaagtcgaataaagtgaacaataattaattctttattgtcatcatgaacggcggacatattcagttgataatcggccccatgttttcaggtaaaagtacagaattaattagacgagttagacgttatcaaatagctcaatataaatgcgtgactataaaatattctaacgataatagatacggaacgggactatggacgcatgataagaataattttgaagcattggaagcaactaaactatgtgatgtcttggaatcaattacagatttctccgtgataggtatcgatgaaggacagttctttccagacattgttgaattagatcgataaaaattaattaattacccgggtaccaggcctagatctgtcgagatccggtggtggtgcaaatcaaagaactgctcctcagtggatgttgcctttacttctaggcctgtacggaagtgttacttctgctctaaaagctgctgcagggggggggggggggtgggggggccggttagggccgccatcccctcagagcgtcgggatatcgggtggcggctcgggacggaggacgcgctagtgttcttctgtgtggcagttcagaatgatggatcaagctagatcagcattctctaacttgtttggtggagaaccattgtcatatacccggttcagcctggctcggcaagtagatggcgataacagtcatgtggagatgaaacttgctgtagatgaagaagaaaatgctgacaataacacaaaggccaatgtcacaaaaccaaaaaggtgtagtggaagtatctgctatgggactattgctgtgatcgtctttttcttgattggatttatgattggctacttgggctattgtaaaggggtagaaccaaaaactgagtgtgagagactggcaggaaccgagtctccagtgagggaggagccaggagaggacttccctgcagcacgtcgcttatattgggatgacctgaagagaaagttgtcggagaaactggacagcacagacttcaccagcaccatcaagctgctgaatgaaaattcatatgtccctcgtgaggctggatctcaaaaagatgaaaatcttgcgttgtatgttgaaaatcaatttcgtgaatttaaactcagcaaagtctggcgtgatcaacattttgttaagattcaggtcaaagacagcgctcaaaactcggtgatcatagttgataagaacggtagacttgtttacctggtggagaatcctgggggttatgtggcgtatagtaaggctgcaacagttactggtaaactggtccatgctaattttggtactaaaaaagattttgaggatttatacactcctgtgaatggatctatagtgattgtcagagcagggaaaatcacctttgcagaaaaggttgcaaatgctgaaagcttaaatgcaattggtgtgttgatatacatggaccagactaaatttcccattgttaacgcagaactttcattctttggacatgctcatctggggacaggtgacccttacacacctggattcccttccttcaatcacactcagtttccaccatctcggtcatcaggattgcctaatatacctgtccagacaatctccagagctgctgcagaaaagctgtttgggaatatggaaggagactgtccctctgactggaaaacagactctacatgtaggatggtaacctcagaaagcaagaatgtgaagctcactgtgagcaatgtgctgaaagagataaaaattcttaacatctttggagttattaaaggctttgtagaaccagatcactatgttgtagttggggcccagagagatgcatggggccctggagctgcaaaatccggtgtaggcacagctctcctattgaaacttgcccagatgttctcagatatggtcttaaaagatgggtttcagcccagcagaagcattatctttgccagttggagtgctggagactttggatcggttggtgccactgaatggctagagggatacctttcgtccctgcatttaaaggctttcacttatattaatctggataaagcggttcttggtaccagcaacttcaaggtttctgccagcccactgttgtatacgcttattgagaaaacaatgcaaaatgtgaagcatccggttactgggcaatttctatatcaggacagcaactgggccagcaaagttgagaaactcactttagacaatgctgctttccctttccttgcatattctggaatcccagcagtttctttctgtttttgcgaggacacagattatccttatttgggtaccaccatggacacctataaggaactgattgagaggattcctgagttgaacaaagtggcacgagcagctgcagaggtcgctggtcagttcgtgattaaactaacccatgatgttgaattgaacctggactatgagaggtacaacagccaactgctttcatttgtgagggatctgaaccaatacagagcagacataaaggaaatgggcctgagtttacagtggctgtattctgctcgtggagacttcttccgtgctacttccagactaacaacagatttcgggaatgctgagaaaacagacagatttgtcatgaagaaactcaatgatcgtgtcatgagagtggagtatcacttcctctctccctacgtatctccaaaagagtctcctttccgacatgtcttctggggctccggctctcacacgctgccagctttactggagaacttgaaactgcgtaaacaaaataacggtgcttttaatgaaacgctgttcagaaaccagttggctctagctacttggactattcagggagctgcaaatgccctctctggtgacgtttgggacattgacaatgagttttaaatgtgatacccatagcttccatgagaacagcagggtagtctggtttctagacttgtgctgatcgtgctaaattttcagtagggctacaaaacctgatgttaaaattccatcccatcatcttggtactactagatgtctttaggcagcagcttttaatacagggtagataacctgtacttcaagttaaagtgaataaccacttaaaaaatgtccatgatggaatattcccctatctctagaattttaagtgctttgtaatgggaactgcctctttcctgttgttgttaatgaaaatgtcagaaaccagttatgtgaatgatctctctgaatcctaagggctggtctctgctgaaggttgtaagtggtcgcttactttgagtgatcctccaacttcatttgatgctaaataggagataccaggttgaaagaccttctccaaatgagatctaagcctttccataaggaatgtagctggtttcctcattcctgaaagaaacagttaactttcagaagagatgggcttgttttcttgccaatgaggtctgaaatggaggtccttctgctggataaaatgaggttcaactgttgattgcaggaataaggccttaatatgttaacctcagtgtcatttatgaaaagaggggaccagaagccaaagacttagtatattttcttttcctctgtcccttcccccataagcctccatttagttctttgttatttttgtttcttccaaagcacattgaaagagaaccagtttcaggtgtttagttgcagactcagtttgtcagactttaaagaataatatgctgccaaattttggccaaagtgttaatcttaggggagagctttctgtccttttggcactgagatatttattgtttatttatcagtgacagagttcactataaatggtgtttttttaatagaatataattatcggaagcagtgccttccataattatgacagttatactgtcggttttttttaaataaaagcagcatctgctaataaaacccaacagatactggaagttttgcatttatggtcaacacttaagggttttagaaaacagccgtcagccaaatgtaattgaataaagttgaagctaagatttagagatgaattaaatttaattaggggttgctaagaagcgagcactgaccagataagaatgctggttttcctaaatgcagtgaattgtgaccaagttataaatcaatgtcacttaaaggctgtggtagtactcctgcaaaattttatagctcagtttatccaaggtgtaactctaattcccattttgcaaaatttccagtacctttgtcacaatcctaacacattatcgggagcagtatcttccataatgtataaagaacaaggtagtttttacctaccacagtgtctgtatcggagacagtgatctccatatgttacactaagggtgtaagtaattatcgggaacagtgtttcccataattttcttcatgcaatgacatcttcaaagcttgaagatcgttagtatctaacatgtatcccaactcctataattccctatcttttagttttagttgcagaaacattttgtggtcattaagcattgggtgggtaaattcaaccactgtaaaatgaaattactacaaaatttgaaatttagcttgggtttttgttacctttatggtttctccaggtcctctacttaatgagatagtagcatacatttataatgtttgctattgacaagtcattttaactttatcacattatttgcatgttacctcctataaacttagtgcggacaagttttaatccagaattgaccttttgacttaaagcagagggactttgtatagaaggtttgggggctgtggggaaggagagtcccctgaaggtctgacacgtctgcctacccattcgtggtgatcaattaaatgtaggtatgaataagttcgaagctccgtgagtgaaccatcattataaacgtgatgatcagctgtttgtcatagggcagttggaaacggcctcctagggaaaagttcatagggtctcttcaggttcttagtgtcacttacctagatttacagcctcacttgaatgtgtcactactcacagtctctttaatcttcagttttatctttaatctcctcttttatcttggactgacatttagcgtagctaagtgaaaaggtcatagctgagattcctggttcgggtgttacgcacacgtacttaaatgaaagcatgtggcatgttcatcgtataacacaatatgaatacagggcatgcattttgcagcagtgagtctcttcagaaaacccttttctacagttagggttgagttacttcctatcaagccagtacgtgctaacaggctcaatattcctgaatgaaatatcagactagtgacaagctcctggtcttgagatgtcttctcgttaaggagatgggccttttggaggtaaaggataaaatgaatgagttctgtcatgattcactattctagaacttgcatgacctttactgtgttagctctttgaatgttcttgaaattttagactttctttgtaaacaaatgatatgtccttatcattgtataaaagctgttatgtgcaacagtgtggagattccttgtctgatttaataaaatacttaaacactgaaaaaaaaaaaaaaaaaaaaaaaaaaaaaaaaaaaaaaaaaaaaaaaaaaaaaaaaaaaaaaaaaaaaaaaaaaaaaaaaagtaccttctgaggcggaaagaaccagccggatctcgacttcgagcttatttatattccaaaaaaaaaaaataaaatttcaatttttaagctttcactaattccaaacccacccgctttttatagtaagtttttcacccataaataataaatacaataattaatttctcgtaaaagtagaaaatatattctaatttattgcacggtaaggaagtagatcataactcgagcatgggagatcccgtcgttttacaacgtcgtgactgggaaaaccctggcgttacccaacttaatcgccttgcagcacatccccctttcgccagctggcgtaatagcgaagaggcccgcaccgatcgcccttcccaacagttgcgcagcctgaatggcgaatggcgctttgcctggtttccggcaccagaagcggtgccggaaagctggctggagtgcgatcttcctgaggccgatactgtcgtcgtcccctcaaactggcagatgcacggttacgatgcgcccatctacaccaacgtgacctatcccattacggtcaatccgccgtttgttcccacggagaatccgacgggttgttactcgctcacatttaatgttgatgaaagctggctacaggaaggccagacgcgaattatttttgatggcgttaactcggcgtttcatctgtggtgcaacgggcgctgggtcggttacggccaggacagtcgtttgccgtctgaatttgacctgagcgcatttttacgcgccggagaaaaccgcctcgcggtgatggtgctgcgctggagtgacggcagttatctggaagatcaggatatgtggcggatgagcggcattttccgtgacgtctcgttgctgcataaaccgactacacaaatcagcgatttccatgttgccactcgctttaatgatgatttcagccgcgctgtactggaggctgaagttcagatgtgcggcgagttgcgtgactacctacgggtaacagtttctttatggcagggtgaaacgcaggtcgccagcggcaccgcgcctttcggcggtgaaattatcgatgagcgtggtggttatgccgatcgcgtcacactacgtctgaacgtcgaaaacccgaaactgtggagcgccgaaatcccgaatctctatcgtgcggtggttgaactgcacaccgccgacggcacgctgattgaagcagaagcctgcgatgtcggtttccgcgaggtgcggattgaaaatggtctgctgctgctgaacggcaagccgttgctgattcgaggcgttaaccgtcacgagcatcatcctctgcatggtcaggtcatggatgagcagacgatggtgcaggatatcctgctgatgaagcagaacaactttaacgccgtgcgctgttcgcattatccgaaccatccgctgtggtacacgctgtgcgaccgctacggcctgtatgtggtggatgaagccaatattgaaacccacggcatggtgccaatgaatcgtctgaccgatgatccgcgctggctaccggcgatgagcgaacgcgtaacgcgaatggtgcagcgcgatcgtaatcacccgagtgtgatcatctggtcgctggggaatgaatcaggccacggcgctaatcacgacgcgctgtatcgctggatcaaatctgtcgatccttcccgcccggtgcagtatgaaggcggcggagccgacaccacggccaccgatattatttgcccgatgtacgcgcgcgtggatgaagaccagcccttcccggctgtgccgaaatggtccatcaaaaaatggctttcgctacctggagagacgcgcccgctgatcctttgcgaatacgcccacgcgatgggtaacagtcttggcggtttcgctaaatactggcaggcgtttcgtcagtatccccgtttacagggcggcttcgtctgggactgggtggatcagtcgctgattaaatatgatgaaaacggcaacccgtggtcggcttacggcggtgattttggcgatacgccgaacgatcgccagttctgtatgaacggtctggtctttgccgaccgcacgccgcatccagcgctgacggaagcaaaacaccagcagcagtttttccagttccgtttatccgggcaaaccatcgaagtgaccagcgaatacctgttccgtcatagcgataacgagctcctgcactggatggtggcgctggatggtaagccgctggcaagcggtgaagtgcctctggatgtcgctccacaaggtaaacagttgattgaactgcctgaactaccgcagccggagagcgccgggcaactctggctcacagtacgcgtagtgcaaccgaacgcgaccgcatggtcagaagccgggcacatcagcgcctggcagcagtggcgtctggcggaaaacctcagtgtgacgctccccgccgcgtcccacgccatcccgcatctgaccaccagcgaaatggatttttgcatcgagctgggtaataagcgttggcaatttaaccgccagtcaggctttctttcacagatgtggattggcgataaaaaacaactgctgacgccgctgcgcgatcagttcacccgtgcaccgctggataacgacattggcgtaagtgaagcgacccgcattgaccctaacgcctgggtcgaacgctggaaggcggcgggccattaccaggccgaagcagcgttgttgcagtgcacggcagatacacttgctgatgcggtgctgattacgaccgctcacgcgtggcagcatcaggggaaaaccttatttatcagccggaaaacctaccggattgatggtagtggtcaaatggcgattaccgttgatgttgaagtggcgagcgatacaccgcatccggcgcggattggcctgaactgccagctggcgcaggtagcagagcgggtaaactggctcggattagggccgcaagaaaactatcccgaccgccttactgccgcctgttttgaccgctgggatctgccattgtcagacatgtataccccgtacgtcttcccgagcgaaaacggtctgcgctgcgggacgcgcgaattgaattatggcccacaccagtggcgcggcgacttccagttcaacatcagccgctacagtcaacagcaactgatggaaaccagccatcgccatctgctgcacgcggaagaaggcacatggctgaatatcgacggtttccatatggggattggtggcgacgactcctggagcccgtcagtatcggcggaattccagctgagcgccggtcgctaccattaccagttggtctggtgtcaaaaataataataaccgggcaggggggatccaattctgtgagcgtatggcaaacgaaggaaaaatagttatagtagccgcactcgatgggacatttcaacgtaaaccgtttaataatattttgaatcttattccattatctgaaatggtggtaaaactaactgctgtgtgtatgaaatgctttaaggaggcttccttttctaaacgattgggtgaggaaaccgagatagaaataataggaggtaatgatatgtatcaatcggtgtgtagaaagtgttacatcgactcataatattatattttttatctaaaaaactaaaaataaacattgattaaattttaatataatacttaaaaatggatgttgtgtcgttagataaaccgtttatgtattttgaggaaattgataatgagttagattacgaaccagaaagtgcaaatgaggtcgcaaaaaaactgccgtatcaaggacagttaaaactattactaggagaattattttttcttagtaagttacagcgacacggtatattagatggtgccaccgtagtgtatataggatctgctcccggtacacatatacgttatttgagagatcatttctataatttaggagtgatcatcaaatggatgctaattgacggccgccatcatgatcctattttaaatggattgcgtgatgtgactctagtgactcggttcgttgatgaggaatatctacgatccatcaaaaaacaactgcatccttctaagattattttaatttctgatgtgagatccaaacgaggaggaaatgaacctagtacggcggatttactaagtaattacgctctacaaaatgtcatgattagtattttaaaccccgtggcgtctagtcttaaatggagatgcccgtttccagatcaatggatcaaggacttttatatcccacacggtaataaaatgttacaaccttttgctccttcatattcagctgaaatgagattattaagtatttataccggtgagaacatgagactgactcgagttaccaaattagacgctgtaaattatgaaaaaaagatgtactaccttaataagatcgtccgtaacaaagtagttgttaactttgattatcctaatcaggaatatgactattttcacatgtactttatgctgaggaccgtgtactgcaataaaacatttcctactactaaagcaaaggtactatttctacaacaatctatatttcgtttcttaaatattccaacaacatcaactgaaaaagttagtcatgaaccaatacaacgtaaaatatctagcaaaaattctatgtctaaaaacagaaatagcaagagatccgtacgcggtaataaatagaaacgtactactgagatatactaccgatatagagtataatgatttagttactttaataaccgttagacataaaattgattctatgaaaactgtgtttcaggtatttaacgaatcatccataaattatactccggttgatgatgattatggagaaccaatcattataacatcgtatcttcaaaaaggtcataacaagtttcctgtaaattttctatacatagatgtggtaatatctgacttatttcctagctttgttagactagatactacagaaactaatatagttaatagtgtactacaaacaggcgatggtaaaaagactcttcgtcttcccaaaatgttagagacggaaatagttgtcaagattctctatcgccctaatataccattaaaaattgttagatttttccgcaataacatggtaactggagtagagatagccgatagatctgttatttcagtcgctgattaatcaattagtagagatgagataagaacattataataatcaataatatatcttatatcttatatcttatatcttatatcttgtttagaaaaatgctaatattaaaatagctaacgctagtaatccaatcggaagccatttgatatctataatagggtatctaatttcctgatttaaatagcggacagctatattctcggtagctactcgtttggaatcacaaacattatttacatctaatttactatctgtaatggaaacgtttcccaatgaaatggtacaatccgatacattgcattttgttatatttttttttaaagaggctggtaacaacgcatcgcttcgtttacatggctcgtaccaacaataatagggtaatcttgtatctattcctatccgtactatgcttttatcaggataaatacatttacatcgtatatcgtctttgttagcatcacagaatgcataaatttgttcgtccgtcatgataaaaatttaaagtgtaaatataactattatttttatagttgtaataaaaagggaaatttgattgtatactttcggttctttaaaagaaactgacttgataaaaatggctgtaatctctaaggttacgtatagtctatatgatcaaaaagagattaatgctacagatattatcattagtcatgttaaaaatgacgacgatatcggtaccgttaaagatggtagactaggtgctatggatggggcattatgtaagacttgtgggaaaacggaattggaatgtttcggtcactggggtaaagtaagtatttataaaactcatatagttaagcctgaatttatttcagaaattattcgtttactgaatcatatatgtattcactgcggattattgcgttcacgagaaccgtattccgacgatattaacctaaaagagttatcgggacacgctcttaggagattaaaggataaaatattatccaagaaaaagtcatgttggaacagtgaatgtatgcaaccgtatcaaaaaattactttttcaaagaaaaaggtttgtttcgtcaacaagttggatgatattaacgttcctaattctctcatctatcaaaagttaatttctattcatgaaaagttttggccattattagaaattcatcaatatccagctaacttattttatacagactactttcccatccctccgttgattattagaccggctattagtttttggatagatagtatacccaaagagaccaatgaattaacttacttattaggtatgatcgttaagaattgtaacttgaatgctgatgaacaggttatccagaaggcggtaatagaatacgatgatattaaaattatttctaataacactaccagtatcaatttatcatatattacatccggcaaaaataatatgattagaagttatatcgtcgcccgacgaaaagatcagaccgctagatctgtaattggtcccagtacatctatcaccgttaatgaggtaggaatgcccgcatatattagaaatacacttacagaaaagatatttgttaatgcctttacagtggataaagttaaacaactattagcgtcaaaccaagttaaattttactttaataaacgattaaaccaattaacaagaatacgccaaggaaagtttattaaaaataaaatacatttattgcctggtgattgggtagaagtagctgttcaagaatatacaagtattatttttggaagacagccgtctctacatagatacaacgtcatcgcttcatctatcagagctaccgaaggagatactatcaaaatatctcccggaattgccaactctcaaaatgctgatttcgacggggatgaggaatggatgatattagaacaaaatcctaaagctgtaattgaacaaagtattcttatgtatccgacgacgttactcaaacacgatattcatggagcccccgtttatggatctattcaagatgaaatcgtagcagcgtattcattgtttaggatacaagatctttgtttagatgaagtattgaacatcttggggaaatatggaagagagttcgatcctaaaggtaaatgtaaattcagcggtaaagatatctatacttacttgataggtgaaaagattaattatccgggtctcttaaaggatggtgaaattattgcaaacgacgtagatagtaattttgttgtggctatgaggcatctgtcattggctggactcttatccgatcataagtcgaacgtggaaggtatcaactttattatcaagtcatcttatgtttttaagagatatctatctatttacggttttggggtgacattcaaagatctgagaccaaattcgacgttcactaataaattggaggccatcaacgtagaaaaaatagaacttatcaaagaagcatacgccaaatatctcaacgatgtaagagacgggaaaatagttccattatctaaagctttagaggcggactatgtggaatccatgttatccaacttgacaaatcttaatatccgagagatagaagaacatatgagacaaacgctgatagatgatccagataataacctcctgaaaatggccaaagcgggttataaagtaaatcccacagaactaatgtatattctaggtacgtatggacaacaaaggattgatggtgaaccagcagagactcgagtattgggtagagttttaccttactatcttccagactctaaggatccagaaggaagaggttacattcttaattctttaacaaaaggattaacgggttctcaatattacttttcgatgctggttgccagatctcaatctactgatatcgtctgtgaaacatcacgtaccggaacactggctagaaaaatcattaaaaagatggaggatatggtggtcgacggatacggacaagtagttataggtaatacgctcatcaagtacgccgccaattataccaaaattctaggctcagtatgtaaacctgtagatcttatctatccagatgagtccatgacttggtatttggaaattagtgctctgtggaataaaataaaacagggattcgtttactctcagaaacagaaacttgcaaagaagacattggcgccgtttaatttcctagtattcgtcaaacccaccactgaggataatgctattaaggttaaggatctgtacgatatgattcataacgtcattgatgatgtgagagagaaatacttctttacggtatctaatatagattttatggagtatatattcttgacgcatcttaatccttctagaattagaattacaaaagaaacggctatcactatctttgaaaagttctatgaaaaactcaattatactctaggtggtggaactcctattggaattatttctgcacaggtattgtctgagaagtttacacaacaagccctgtccagttttcacactactgaaaaaagtggtgccgtcaaacaaaaacttggtttcaacgagtttaataacttgactaatttgagtaagaataagaccgaaattatcactctggtatccgatgatatctctaaacttcaatctgttaagattaatttcgaatttgtatgtttgggagaattaaatccaaacatcactcttcgaaaagaaacagataaatatgtagtagatataatagtcaatagattatacatcaagagagcagaaataaccgaattagtcgtcgaatatatgattgaacgatttatctcctttagcgtcattgtaaaggaatggggtatggagacattcattgaggacgaggataatattagatttactgtctacctaaatttcgttgaaccggaagaattgaatcttagtaagtttatgatggttcttccgggggcagccaacaagggaaagattagtaaattcaagattcctatctctgattatacgggatatgacgacttcaatcaaacaaaaaagctcaataagatgactgtagaactcatgaatctaaaagaattgggttctttcgatttggaaaacgtcaacgtgtatcctggagtatggaatacatacgatatcttcggtatcgaggccgctcgtgaatacttgtgcgaagccatgttaaacacctatggagaagggttcgattatctgtatcagccttgtgatcttctcgctagtttactatgtgctagttacgaaccagaatcagtgaataaattcaagttcggcgcagctagtactcttaagagagctacgttcggagacaataaagcattgttaaacgcggctcttcataaaaagtcagaacctattaacgataatagtagctgccacttttttagcaaggtccctaatataggaactggatattacaaatactttatcgacttgggtcttctcatgagaatggaaaggaaactatctgataagatatcttctcaaaagatcaaggaaatggaagaaacagaagacttttaattcttatcaataacatatttttctatgatctgtcttttaaacgatggattttccacaaatgcgcctctcaagtccctcatagaatgatacacgtataaaaaatatagcataggcaatgactccttatttttagacattagatatgccaaaatcatagccccgcttctatttactcccgcagcacaatgaaccaacacgggctcgtttcgttgatcacatttagataaaaaggcggttacgtcgtcaaaatatttactaatatcggtagttgtatcatctaccaacggtatatgaataatattaatattagagttaggtaatgtatatttatccatcgtcaaatttaaaacatatttgaacttaacttcagatgatggtgcatccatagcatttttataatttcccaaatacacattattggttacccttgtcattatagtgggagatttggctttgtgcatatctccagttgaacgtagtagtaagtatttatacaaacttttcttatccatttataacgtacaaatggataaaactactttatcggtaaacgcgtgtaatttagaatacgttagagaaaaggctatagtaggcgtacaagcagccaaaacatcaacacttatattctttgttattatattggcaattagtgcgctattactctggtttcagacgtctgataatccagtctttaatgaattaacgagatatatgcgaattaaaaatacggttaacgattggaaatcattaacggatagcaaaacaaaattagaaagtgatagaggtagacttctagccgctggtaaggatgatatatttgaattcaaatgtgtggatttcggcgcctattttatagctatgcgattggataagaaaacatatctgccgcaagctattaggcgaggtactggagacgcgtggatggttaaaaaggcggcaaaggtcgatccatctgctcaacaattttgtcagtatttgataaaacacaagtctaataatgttattacttgtggtaatgagatgttaaatgaattaggttatagcggttattttatgtcaccgcattggtgttccgattttagtaatatggaatagtgttagataaatgcggtaacgaatgttcctgtaaggaaccataacagcttagatttaacgttaaagatgagcataaacataataaacaaaattacaatcaaacttataacattaatatcaaacaatccaaaaaatgaaatcagtggagtagtaaacgcgtacataactcctggataacgtttagcagctgccgttcctattctagaccaaaaattcggtttcatgttttcgaaacggtattctgcaacaagtcgaggatcgtgttctacatatttggcggcattatccagtatctgcctattgatcttcatttcgttttcgattctggctatttcaaaataaaatcccgatgatagacctccagactttataatttcatctacgatgttcagcgccgtagtaactctaataatataggctgataagctaacatcataccctcctgtatatgtgaatatggcatgatttttgtccattacaagctcggttttaactttattgcctgtaataatttctctcatctgtaggatatctatttttttgtcatgcattgccttcaagacgggacgaagaaacgtaatatcctcaataacgttatcgttttctacaataactacatattctacctttttattttctaactcggtaaaaaaattagaatcccatagggctaaatgtctagcgatatttcttttcgtttcctctgtacacatagtgttacaaaaccctgaaaagaagtgagtatacttgtcatcatttctaatgtttcctccagtccactgtataaacgcataatccttgtaatgatctggatcatccttgactaccacaacatttcttttttctggcataacttcgttgtcctttacatcatcgaacttctgatcattaatatgctcatgaacattaggaaatgtttctgatggaggtctatcaataactggcacaacaataacaggagttttcaccgccgccatttagttattgaaattaatcatatacaactctttaatacgagttatattttcgtctatccattgtttcacattgacatatttcgacaaaaagatataaaatgcgtattccaatgcttctctgtttaatgaattactaaaatatacaaacacgtcactgtctggcaataaatgatatcttagaatattgtaacaatttattttgtattgcacatgttcgtgatctatgagttcttcttcgaatggcataggatctccgaatctgaaaacgtataaataggagttagaataataatatttgagagtattggtaatatataaactctttagcggtataattagtttttttctctcaatttctatttttagatgtgatggaaaaatgactaattttgtagcattagtatcatgaactctaatcaaaatcttaatatcttcgtcacacgttagctctttgaagtttttaagagatgcatcagttggttctacagatggagtaggtgcaacaattttttgttctacacatgtatgtactggagccattgttttaactataatggtgcttgtatcgaaaaactttaatgcagatagcggaagctcttcgccgcgactttctacgtcgtaattgggttctaacgccgatctctgaatggatactagttttctaagttctaatgtgattctctgaaaatgtaaatccaattcctccggcattatagatgtgtatacatcggtaaataaaactatagtatccaacgatcccttctcgcaaattctagtcttaaccaaaaaatcgtatataaccacggagatggcgtatttaagagtggattcttctaccgttttgttcttggatgtcatataggaaactataaagtccgcactactgttaagaatgattactaacgcaactatatagtttaaattaagcattttggaaacataaaataactctgtagacgatacttgactttcgaataagtttgcagacaaacgaagaaagaacagacctctcttaatttcagaagaaaactttttttcgtattcctgacgtctagagtttatatcaataagaaagttaagaattagtcggttaatgttgtatttcattacccaagtttgagatttcataatattatcaaaagacatgataatattaaagataaagcgctgactatgaacgaaatagctatatggttcgctcaagaatatagtcttgttaaacgtggaaacgataactgtatttttaatcacgtcagcggcatctaaattaaatataggtatatttattccacacactctacaatatgccacaccatcttcataataaataaattcgttagcaaaattattaattttagtgaaatagttagcgtcaactttcatagcttccttcaatctaatttgatgctcacacggtgcgaattccactctaacatcccttttccatgcctcaggttcatcgatctctataatatctagttttttgcgtttcacaaacacaggctcgtctctcgcgatgagatctgtatagtaactatgtaaatgataactagatagaaagatgtagctatatagatgacgatcctttaagagaggtataataactttaccccaatcagatagactgttgttatggtcttcggaaaaagaatttttataaatttttccagtattttccaaatatacgtacttaacatctaaaaaatccttaatgataataggaatggataatccgtctattttataaagaaatacatatcgcacattatacttttttttggaaatgggaataccgatgtgtctacataaatatgcaaagtctaaatattttttagagaatcttagttggtccaaattcttttccaagtacggtaatagatttttcatattgaacggtatcttcttaatctctggttctagttccgcattaaatgatgaaactaagtcactatttttataactaacgattacatcacctctaacatcatcatttaccagaatactgatcttcttttgtcgtaaatacatgtctaatgtgttaaaaaaaagatcatacaagttatacgtcatttcatctgtggtattcttgtcattgaaggataaactcgtactaatctcttctttaacagcctgttcaaatttatatcctatatacgaaaaaatagcaaccagtgtttgatcatccgcgtcaatattctgttctatcgtagtgtataacaatcgtatatcttcttctgtgatagtcgatacgttataaaggttgataacgaaaatatttttatttcgtgaaataaagtcatcgtaggattttggacttatattcgcgtctagtagatatgcttttatttttggaatgatctcaattagaatagtctctttagagtccatttaaagttacaaacaactaggaaattggtttatgatgtataatttttttagtttttatagattctttattctatacttaaaaaatgaaaataaatacaaaggttcttgagggttgtgttaaattgaaagcgagaaataatcataaattatttcattatcgcgatatccgttaagtttgtatcgtaatggcgtggtcaattacgaataaagcggatactagtagcttcacaaagatggctgaaatcagagctcatctaaaaaatagcgctgaaaataaagataaaaacgaggatattttcccggaagatgtaataattccatctactaagcccaaaaccaaacgagccactactcctcgtaaaccagcggctactaaaagatcaaccaaaaaggaggaagtggaagaagaagtagttatagaggaatatcatcaaacaactgaaaaaaattctccatctcctggagtcagcgacattgtagaaagcgtggccgctgtagagctcgatgatagcgacggggatgatgaacctatggtacaagttgaagctggtaaagtaaatcatagtgctagaagcgatctctctgacctaaaggtggctaccgacaatatcgttaaagatcttaagaaaattattactagaatctctgcagtatcgacggttctagaggatgttcaagcagctggtatctctagacaatttacttctatgactaaagctattacaacactatctgatctagtcaccgagggaaaatctaaagttgttcgtaaaaaagttaaaacttgtaagaagtaaatgcgtgcacttttttataaagatggtaaactctttaccgataataattttttaaatcctgtatcagacgataatccagcgtatgaggttttgcaacatgttaaaattcctactcatttaacagatgtagtagtatatgaacaaacgtgggaggaggcgttaactagattaatttttgtgggaagtgattcaaaaggacgtagacaatacttttacggaaaaatgcatgtacagaatcgcaacgctaaaagagatcgtatttttgttagagtatataacgttatgaaacgaattaattgttttataaacaaaaatataaagaaatcgtccacagattccaattatcagttggcggtttttatgttaatggaaactatgttttttattagatttggtaaaatgaaatatcttaaggagaatgaaacagtagggttattaacactaaaaaataaacacatagaaataagtcccgatgaaatagttatcaagtttgtaggaaaggacaaagtttcacatgaatttgttgttcataagtctaatagactatataaaccgctattgaaactgacggatgattctagtcccgaagaatttctgttcaacaaactaagtgaacgaaaggtatacgaatgtatcaaacagtttggtattagaatcaaggatctccgaacgtatggagtcaattatacgtttttatataatttttggacaaatgtaaagtccatatctcctcttccgtcaccaaaaaagttaatagcattaactatcaaacaaactgctgaagtggtaggtcatactccatcaatttcaaaaagagcttatatggcaacgactattttagaaatggtaaaggataaaaattttttagatgtagtatctaaaactacgttcgatgaattcctatctatagtcgtagatcacgttaaatcatctacggatggatgatatagatctttacacaaataattacaagaccgataaatggaaatggataagcgtatgaaatctctcgcaatgacagctttcttcggagagctaagcacattagatattatggcattgataatgtctatatttaaacgccatccaaacaataccattttttcagtggataaggatggtcagtttatgattgatttcgaatacgataattataaggcttctcaatatttggatctgaccctcactccgatatctggagatgaatgcaagactcacgcatcgagtatagccgaacaattggcgtgtgcggatattattaaagaggatattagcgaatatatcaaaactactccccgtcttaaacgatttataaaaaaataccgcaatagatcagatactcgtatcagtcgagatacagaaaagcttaaaatagctctagctaaaggcatagattacgaatatataaaagacgcttgttaataagtaaatgaaaaaaaactagtcgtttataataaaacacgatatggatgccaacgtagtatcattttctactattgcgacgtatatagacgctttagcgaagaatgcttcggaattagaacagaggtctaccgcatacgaaataaataatgaattggaactagtatttattaagccgccattgattactttgacaaatgtagtgaatatctctacgattcaggaatcgtttattcgatttaccgttactaataaggaaggtgttaaaattagaactaagattccattatctaaggtacatggtctagatgtaaaaaatgtacagttagtagatgctatagataacatagtttgggaaaagaaatcattagtgacggaaaatcgtcttcacaaagaatgcttgttgagactatcgacagaggaacgtcatatatttttggattacaagaaatatggatcctctatccgactagaattagtcaatcttattcaagcaaaaacaaaaaactttacgatagactttaagctaaaatattttctaggatccggtgcccagtctaaaagttctttgttgcacgctattaatcatccaaagtcaaggcctaatacatctctggaaatagaattcacacctagagacaatgaaacagttccatatgatgaactaataaaggaattgacgactctctcgcgtcatatatttatggcttctccagagaatgtaattctttctccgcctattaacgcgcctataaaaacctttatgttgcctaaacaagatatagtaggtttggatctggaaaatctatatgccgtaactaagactgacggcattcctataactatcagagttacatcaaacgggttgtattgttattttacacatcttggttatattattagatatcctgttaagagaataatagattccgaagtagtagtctttggtgaggcagttaaggataagaactggaccgtatatctcattaagctaatagagcctgtgaatgcaatcaatgatagactagaagaaagtaagtatgttgaatctaaactagtggatatttgtgatcggatagtattcaagtcaaagaaatacgaaggtccgtttactacaactagtgaagtcgtcgatatgttatctacatatttaccaaagcaaccagaaggtgttattctgttctattcaaagggacctaaatctaacattgattttaaaattaaaaaggaaaatactatagaccaaactgcaaatgtagtatttaggtacatgtccagtgaaccaattatctttggagaatcgtctatctttgtagagtataagaaatttagcaacgataaaggctttcctaaagaatatggttctggtaagattgtgttatataacggcgttaattatctaaataatatctattgtttggaatatattaatacacataatgaagtgggtattaagtccgtggttgtacctattaagtttatagcagaattcttagttaatggagaaatacttaaacctagaattgataaaaccatgaaatatattaactcagaagattattatggaaatcaacataatatcatagtcgaacatttaagagatcaaagcatcaaaataggagatatctttaacgaggataaactatcggatgtgggacatcaatacgccaataatgataaatttagattaaatccagaagttagttattttacgaataaacgaactagaggaccgttgggaattttatcaaactacgtcaagactcttcttatttctatgtattgttccaaaacatttttagacgattccaacaaacgaaaggtattggcgattgattttggaaacggtgctgacctggaaaaatacttttatggagagattgcgttattggtagcgacggatccggatgctgatgctatagctagaggaaatgaaagatacaacaaattaaactctggaattaaaaccaagtactacaaatttgactacattcaggaaactattcgatccgatacatttgtctctagtgtcagagaagtattctattttggaaagtttaatatcatcgactggcagtttgctatccattattcttttcatccgagacattatgctaccgtcatgaataacttatccgaactaactgcttctggaggcaaggtattaatcactaccatggacggagacaaattatcaaaattaacagataaaaagacttttataattcataagaatttacctagtagcgaaaactatatgtctgtagaaaaaatagctgatgatagaatagtggtatataatccatcaacaatgtctactccaatgactgaatacattatcaaaaagaacgatatagtcagagtgtttaacgaatacggatttgttcttgtagataacgttgatttcgctacaattatagaacgaagtaaaaagtttattaatggcgcatctacaatggaagatagaccgtctacaaaaaactttttcgaactaaatagaggagccattaaatgtgaaggtttagatgtcgaagacttacttagttactatgttgtttatgtcttttctaagcggtaaataataatatggtatgggttctgatctcccagttctaaatgcattaaataattccaatagagcgatttttgttcctataggaccttccaactgtggatactctgtattgttaatagatatattaatacttttgtcgggtaacagaggttctacgtcttctaaaaataaaagttttataacatctggcctgttcataaataaaaacttggcgattctatatatactcttattatcaaatctagccattgtcttatagatgtgagctactgtaggtgtaccatttgattttctttctaatactatatatttctctcgaagaagttcttgcacatcatctgggaataaaatactactgttgagtaaatcagttattttttttatatcgatattgatggacatttttatagttaaggataataagtatcccaaagtcgataacgacgataacgaagtatttatacttttaggaaatcacaatgactttatcagattaaaattaacaaaattaaaggagcatgtatttttttctgaatatattgtgactccagatacatatggatctttatgcgtcgaattaaatgggtctagttttcagcacggcggtagatatatagaggtggaggaatttatagatgctggaagacaagttagatggtgttctacatccaatcatatatctaaagatatacccgaagatatgcacactgataaatttgtcatttatgatatttatacgtttgattcgttcaagaataaacgattggtattcgtacaggtacctccgtcgttaggagatgatagtcatttgactaatccgttattgtcaccgtattatcgtaattcagtagccagacaaatggtcaatgatatgatttttaatcaagattcatttttaaaatatttattagaacatctgattagaagccactatagagtttctaaacatataacaatagttagatacaaggataccgaagaattaaatctaacgagaatatgttataatagagataagtttaaggcgtttgtattcgcttggtttaacggcgtttcggaaaatgaaaaggtactagatacgtataaaaaggtatctaatttgatataatgaattcagtgactgtatcacacgcgccatatactattacttatcacgatgattgggaaccagtaatgagtcaattggtagagttttataacgaagtagccagttggctgctacgagacgagacgtcgcctattcctgataagttctttatacagttgaaacaaccgcttagaaataaacgagtatgtgtgtgtggtatagatccgtatccgaaagatggaactggtgtaccgttcgaatcaccaaattttacaaaaaaatcaattaaggagatagcttcatctatatctagattaaccggagtaattgattataaaggttataaccttaatataatagacggggttataccctggaattattacttaagttgtaaattaggagaaacaaaaagtcacgcgatttactgggataagatttccaagttactgctgcagcatataactaaacacgttagtgttctttattgtttgggtaaaacagatttctcgaatatacgggccaagttagaatccccggtaactaccatagtcggatatcatccagcggctagagaccgccaattcgagaaagatagatcatttgaaattatcaacgttttactggaattagacaacaaggcacctataaattgggctcaagggtttatttattaatgctttagtgaaattttaacttgtgttctaaatggatgcggctattagaggtaatgatgttatctttgttcttaagactataggtgtcccgtcagcgtgcagacaaaatgaagatccaagatttgtagaagcatttaaatgcgacgagttagaaagatatattgagaataatccagaatgtacactattcgaaagtcttagggatgaggaagcatactctatagtcagaattttcatggatgtagatttagacgcgtgtctagacgaaatagattatttaacggccattcaagattttattatcgaggtgtcaaactgtgtagctagattcgcgtttacagaatgcggcgccattcatgaaaatgtaataaaatccatgagatctaatttttcattgactaagtctacaaatagagataaaacaagttttcatattatctttttagatacgtataccactatggatacattgatagctatgaaacgaacactattagaattaagtagatcatctgaaaatccactaaccagatcgatagacactgccgtatataggagaaaaacaactcttcgggttgtaggtactaggaaaaatccaaattgcgacactattcatgtaatgcaaccaccgcatgataatatagaagattacctattcacttacgtggatatgaacaacaatagttattacttttctctacaacaacgattggaggatttagttcctgataagttatgggaaccagggtttatttcattcgaagacgctataaaaagagtttcaaaaatattcattaattctataataaactttaatgatctcgatgaaaataattttacaacggtaccactggtcatagattacgtaacaccttgtgcattatgtaaaaaacgatcgcataaacatccgcatcaactatcgttggaaaatggtgctattagaatttacaaaactggtaatccacatagttgtaaagttaaaattgttccgttggatggtaataaactgtttaatattgcacaaagaattttagacactaactctgttttattaaccgaacgaggagaccatatagtttggattaataattcatggaaatttaacagcgaagaacccttgataacaaaactaattttgtcaataagacatcaactacctaaggaatattcaagcgaattactctgtccaagaaaacgaaagactgtagaagctaacatacgagacatgttagtagattcagtggagaccgatacctatccggataaacttccgtttaaaaatggtgtattggacctggtagacggaatgttttactctggagatgatgctaaaaaatatacgtgtactgtatcaaccggatttaaatttgacgatacaaagttcgtcgaagacagtccagaaatggaagagttaatgaatatcattaacgatatccaaccattaacggatgaaaataagaaaaatagagagctatatgaaaaaacattatctagttgtttatgcggtgctaccaaaggatgtttaacattcttttttggagaaactgcaactggaaagtcgacaaccaaacgtttgttaaagtctgctatcggtgacctgtttgttgagacgggtcaaacaattttaacagatgtattggataaaggacctaatccatttatcgctaacatgcatttgaaaagatctgtattctgtagcgaactacctgattttgcctgtagtggatcaaagaaaattagatctgacaatattaaaaagttgacagaaccttgtgtcattggaagaccgtgtttctccaataaaattaataatagaaaccatgcgacaatcattatcgatactaattacaaacctgtttttgataggatagataacgcattaatgagaagaattgccgtcgtgcgattcagaacacacttttctcaaccttctggtagagaggctgctgaaaataatgacgcgtacgataaagtcaaactattagacgaggggttagatggtaaaatacaaaataatatatatagatttgcatttctatacttgttggtgaaatggtacaaaaaatatcatgttcctattatgaaactatatcctacacccgaagagattcctgactttgcattctatctcaaaataggtactctgttggtatctagctctgtaaagcatattccattaatgacggacctctccaaaaagggatatatattgtacgataatgtggtcactcttccgttgactactttccaacagaaaatatccaagtattttaattctagactatttggacacgatatagagagcttcatcaatagacataagaaatttgccaatgttagtgatgaatatctgcaatatatattcatagaggatatttcatctccgtaaatatatgctcatatatttatagaagatatcacatatctaaatgaataccggaatcatagatttatttgataatcatgttgatagtataccaactatattacctcatcagttagctactctagattatctagttagaactatcatagatgagaacagaagcgtgttattgttccatattatgggatcaggtaaaacaataatcgctttgttgttcgccttggtagcttccagatttaaaaaggtttacattctagtgccgaacatcaacatcttaaaaattttcaattataatatgggtgtagctatgaacttgtttaatgacgaattcatagctgagaatatctttattcattccacaacaagtttttattctcttaattataacgataacgtcattaattataacggattatctcgctacaataactctatttttatcgttgatgaggcacataatatctttgggaataatactggagaacttatgaccgtgataaaaaataaaaacaagattccttttttactattgtctggatctcccattactaacacacctaatactctgggtcatattatagatttaatgtccgaagagacgatagattttggtgaaattattagtcgtggtaagaaagtaattcagacacttcttaacgaacgcggtgtgaatgtacttaaggatttgcttaaaggaagaatatcatattacgaaatgcctgataaagatctaccaacgataagatatcacggacgtaagtttctagatactagagtagtatattgtcacatgtctaaacttcaagagagagattatatgattactagacgacagctatgttatcatgaaatgtttgataaaaatatgtataacgtgtcaatggcagtattgggacaacttaatctgatgaataatttagatactttatttcaggaacaggataaggaattgtacccaaatctgaaaataaataatggcgtgttatacggagaagaattggtaacgttaaacattagttccaaatttaaatactttattaatcggatacagacactcaacggaaaacattttatatacttttctaattctacatatggcggattggtaattaaatatatcatgctcagtaatggatattctgaatataatggttctcagggaactaatccacatatgataaacggcaaaccaaaaacatttgctatcgttactagtaaaatgaaatcgtctttagaggatctattagatgtgtataattctcctgaaaacgatgatggtagtcaattgatgtttttgttttcatcaaacattatgtccgaatcctatactctaaaagaggtaaggcatatttggtttatgactatcccagatactttttctcaatacaaccaaattcttggacgatctattagaaaattctcttacgccgatatttctgaaccagttaatgtatatcttttagccgccgtatattccgatttcaatgacgaagtgacgtcattaaacgattacacacaggatgaattaattaatgttttaccatttgacatcaaaaagctgttgtatctaaaatttaagacgaaagaaacgaatagaatatactctattcttcaagagatgtctgaaacgtattctcttccaccacatccatcaattgtaaaagttttattgggagaattggtcagacaatttttttataataattctcgtattaagtataacgataccaagttacttaaaatggttacatcagttataaaaaataaagaagacgctaggaattacatagatgatattgtaaacggtcacttctttgtatcgaataaagtatttgataaatctcttttatacaaatacgaaaacgatattattacagtaccgtttagactttcctacgaaccatttgtttggggagttaactttcgtaaagaatataacgtggtatcttctccataaaactgatgagatatataaagaaataaatgtcgagctttgttaccaatggatacctttccgttacattggaaccacacgagctgacgttagacataaaaactaatattaggaatgccgtatataagacgtatctccatagagaaattagtggtaaaatggccaagaaaatagaaattcgtgaagacgtggaattacctctcggcgaaatagttaataattctgtagttataaacgttccgtgtgtaataacctacgcgtattatcacgttggggatatagtcagaggaacattaaacatcgaagatgaatcaaatgtaactattcaatgtggagatttaatctgtaaactaagtagagattcgggtactgtatcatttagcgattcaaagtactgcttttttcgaaatggtaatgcgtatgacaatggcagcgaagtcactgccgttctaatggaggctcaacaaggtatcgaatctagttttgtttttctcgcgaatatcgtcgactcataaaaaagagaatagcggtaagtataaacacgaatactatggcaataattgcgaatgttttattctcttcgatatatttttgataatatgaaaaacatgtctctctcaaatcggacaaccatctcataaaatagttctcgcgcgctggagaggtagttgccgctcgtataatctctccagaataatatacttgcgtgtcgtcgttcaatttatacggatttctatagttctctgttatataatgcggtttgccctcatgattagacgacgacaatagtgttctaaatttagatagttgatcagaatgaatgtttattggcgttggaaaaattatccatacagcgtctgcagagtggttgatagttgttcctagatatgtaaaataatccaacttactaggcagcaaattgtctagataaaatactgaatcaaacggtgcagacgtattggcggatctaatggaatccaattgattaactatcttttgaaaatatacatttttatgatccaatacttgtaagaatatagaaataatgataagtccatcatcgtgtttttttgcctcttcataagaactatattttttcttattccaatgaacaagattaatctctccagagtatttgtacacatctatcaagtgattggatccataatcgtcttcctttccccaatatatatgtagtgatgataacacatattcattggggagaaaccctccacttatatatcctcctttaaaattaatccttactagttttccagtgttctggatagtggttggtttcgactcattataatgtatgtctaacggcttcaatcgcgcgttagaaattgcttttttagtttctatattaataggagatagttgttgcggcatagtaaaaatgaaatgataactgtttaaaaatagctcttagtatgggaattacaatggatgaggaagtgatatttgaaactcctagagaattaatatctattaaacgaataaaagatattccaagatcaaaagacacgcatgtgtttgctgcgtgtataacaagtgacggatatccgttaataggagctagaagaacttcattcgcgttccaggcgatattatctcaacaaaattcagattctatctttagagtatccactaaactattacggtttatgtactacaatgaactaagagaaatctttagacggttgagaaaaggttctatcaacaatatcgatcctcactttgaagagttaatattattgggtggtaaactagataaaaaggaatctattaaagattgtttaagaagagaattaaaagaggaaagtgatgaacgtataacagtaaaagaatttggaaatgtaattctaaaacttacaacacgggataaattatttaataaagtatatataagttattgcatggcgtgttttattaatcaatcgttggaggatttatcgcatactagtatttacaatgtagaaattagaaagattaaatcattaaatgattgtattaacgacgataaatacgaatatctgtcttatatttataatatgctagttaatagtaaatgaacttttacagatctagtataattagtcagattattaagtataatagacgactagctaagtctattatttgcgaggatgactctcaaattattacactcacggcattcgttaaccaatgcctatggtgtcataaacgagtatccgtgtccgctattttattaactactgataacaaaatattagtatgtaacagacgagatagttttctctattctgaaataattagaactagaaacatgtttagaaagaaacgattatttctgaattattccaattatttgaacaaacaggaaagaagtatactatcgtcatttttttctctagatccagctactactgataatgatagaatagacgctatttatccgggtggcatacccaaaaggggtgagaatgttccagagtgtttatccagggaaattaaagaagaagttaatatagacaattcttttgtattcatagacactcggttttttattcatggcatcatagaagataccattattaataaattttttgaggtaatcttctttgtcggaagaatatctctaacgagtgatcaaatcattgatacatttaaaagtaatcatgaaatcaaggatctaatatttttagatccgaattcaggtaatggactccaatacgaaattgcaaaatatgctctagatactgcaaaacttaaatgttacggccatagaggatgttattatgaatcattaaaaaaattaactgaggatgattgattaaaaaatataaattaatttaccatcgtgtatttttataacgggattgtccggcatatcatgtagatagttaccgtctacatcgtatactcgaccatctacgcctttaaatcctctatttattgacattaatctattagaattggaataccaaatattagtaccctcaattagtttattggtaatattttttttagacgatagatcgatggctcttgaaaccaaggttttccaaccggactcattgtcgatcggtgagaagtctttttcattagcatgaatccattctaatgatgtatgtttaaacactctaaacaattggacaaattcttttgatttgctttgaatgatttcaaataggtcttcgtctacagtaggcataccattagataatctagccattataaagtgcacgtttacatatctacgttctggaggagtaagaacgtgactattgagacgaatggctcttcctactatctgacgaagagacgcctcgttccatgtcatatctaaaatgaagatatcattaattgagaaaaaactaataccctcgcctccactagaagagaatacgcatgttttaatgcattctccgttagtgtttgattcttggttaaactcagccaccgccttgattctagtatcttttgttctagatgagaactctatattagagataccaaagactttgaaatatagtaataagatttctattcctgactgattaacaaatggttcaaagactagacatttaccatgggatgctaatattcccaaacatacatctataaatttgacgcttttctcttttaattcagtaaatagagagatatcagccgcactagcatcccctttcaatagttctccctttttaaaggtatctaatgcggatttagaaaactctctatctcttaatgaatttttaaaatcattatatagtgttgctatctcttgcgcgtattcgcccggatcacgattttgtctttcaggaaagctatcgaacgtaaacgtagtagccatacgtctcagaattctaaatgatgatatacctgtttttatttcagcgagtttagccttttgataaatttcttcttgctttttcgacatattaacgtatcgcattaatactgttttcttagcgaatgatgcagacccttctacgtcatcaaaaatagaaaactcgttattaactatatacgaacatagtcctcctagtttggagactaattctttttcatcgactagacgtttattctcaaatagcgattggtgttgtaaggatcctggtcgtagtaagttaaccaacatggtgaattcttgcacactattgacgataggtgtagccgataaacaaatcatcttatggttttttaacgcaatggtcttagataaaaaattatatactgaacgagtaggacggatcttaccatcttctttgattaatgatttagaaatgaagttatgacattcatcaataatgacgcatattctactcttggaattaatagttttgatattagtaaaaaatttatttctaaaattttgatcatcgtaattaataaaaatacaatccttcgttatctctggagcgtatctgagtatagtgttcatccaaggatcttctatcaaagcctttttcaccaataagataatagcccaattcgtataaatatccttaagatgtttgagaatatatacagtagtcattgttttaccgacacccgtttcatggaacaataaaagagaatgcatactgtctaatcctaagaaaactcttgctacaaaatgttgataatccttgaggcgtactacgtccgaccccatcatttcaacgggcatattagtagttctgcgtaaggcataatcgatataggccgcgtgtgatttactcatttatgagtgataagtaataactatgttttaaaaatcacagcagtagtttaactagtcttctctgatgtttgttttcgatactttttgaatcagaagtcatactagaataaagcaacgagtgaacgtaatagagagcttcgtatactctattcgaaaactctaagaacttattaatgaattccgtatccactggattgtttaaaatactaaattgaacactgttcacatccttccaagaagaagacttagtgacggacttaacatgagacataaataaatccaaattttttttacaaacatcactagccaccataatggcgctatctttcaaccagctatcgcttacgcattttagcagtctaacatttttaaagagactacaatatattctcatagtatcgattacacctctaccgaataaagttggaagtttaataatacaatatttttcgtttacaaaatcaaataatggtcgaaacacgtcgaaggttaacatcttataatcgctaatgtatagattgttttcagtgagatgattattagatttaatagcatctcgttcacgtttgaacagtttattgcgtgcgctgaggtcggcaactacggcgtccgctttagtactcctcccataatactttacgctattaatctttaaaatttcatagactttatctagatcgctttctggtaacatgatatcatgtgtaaaaagttttaacatgtcggtcggcattctatttagatcattaactctagaaatctgaagaaagtaattagctccgtattccagactaggtaatgggcttttacctagagacagattaagttctggcaatgtttcataaaatggaagaaggacatgcgttccctcccggatattttttacaatttcatccatttacaactctatagtttgttttcattattattagttattatctcccataatcttggtaatacttaccccttgatcgtaagataccttatacaggtcattacatacaactaccaattgtttttgtacataatagattggatggttgacatccatggtggaataaactactcgaacagatagtttatctttccccctagatacattagccgtaatagttgtcggcctaaagaatatctttggtgtaaagttaaaagttagggttcttgttccattattgctttttgtcagtagttcattataaattctcgagatgggtccgttctctgaatatagaacatcatttccaaatctaacttctagtctagaaataatatcggtcttattcttaaaatctattcccttgatgaagggatcgttaatgaacaaatccttggcctttgattcggctgatctattatctccgttatagacgttacgttgactagtccaaagacttacaggaatagatgtatcgatgatgttgatactatgtgatatgtgagcaaagattgttctcttagtggcatcactatatgttccagtaatggcggaaaactttttagaaatgttatatataaaagaattttttcgtgttccaaacattagcagattagtatgaagataaacactcatattatcaggaacattatcaatttttacatacacatcagcatcttgaatagaaacgataccatcttctggaacctctacgatctcggcagactccggataaccagtcggtgggccatcgctaacaataactagatcatccaacaatctactcacatatgcatctatataatctttttcatcttgtgagtaccctggatacgaaataaatttattatccgtatttccataataaggtttagtataaacagagagagatgttgccgcatgaacttcagttacagtcgccgttggttggtttatttgacctattactctcctaggtttctctataaacgatggtttaatttgtacattcttaaccatatatccaataaagctcaattcaggaacataaacaaattctttgttgaacgtttcaaagtcgaacgaagagtcacgaataacgatatcggatactggattgaaggttaccgttacggtaatttttgaatcggatagtttaagactgctgaatgtatcttccacatcaaacggagttttaatataaacgtatactgtagatggttctttaatagtgtcattaggagttaggccaatagaaatatcattaagttcactagaatatccagagtgtttcaaagcaattgtattattgatacaattattatataattcttcgccctcaatttcccaaataacaccgttacacgaagagatagatacgtgattaatacatttatatccaacatatggtacgtaactgaatcttcccatacctttaacttctggaagttccaaactcagaaccaaatgattaagcgcagtaatatactgatccctaatttcgaagctagcgatagcctgattgtctggaccatcgtttgtcataactccggatagagaaatatattgcggcatatacaaagttggaatttgactatcgactgcgaagacattagaccgtttaatagagtcatccccaccgatcaaagaattaatgatagtattattcattttctatttaaaatggaaaaagcttacaataaactccgtagagaaatatctataatttgtgagttttccttaaagtaacagcttccgtaaacgccgtctttatctcttagtaggtttattgtatttatgaccttttccttatcttcatagaatactaaaggcaacaaagaaatttttggttcttctctaagagctacgtgagacttaaccatagaagccaacgaatccctacatattttagaacagaaataccctacttcaccacccttgtatgtctcaatactaataggtctaaaaaccaaatcttgattacaaaaccaacacttatcaattacactatttgtcttaatagacacatctgccatagatttataatactttggtagtatacaagcgagtgcttcttctttagcgggcttaaagactgctttaggtgctgaaataaccacatctggaaggcttactcgcttagccatttaattacggaactatttttttatacttctaatgagcaagtagaaaacctctcatctacaaaaacgtactcgtgtccataatcctctaccatagttacacgttttttagatctcatatgtgctaaaaagttttcccatactaattggttactattatttttcgtataatttttaacagtttgaggttttagatttttagttacagaagtgatatcgaatattttatccaaaaagaatgaataattaattgtcttagaaggagtgttttcttggcaaaagaataccaagtgcttaaatatttctactacttcattaatcttttctgtactcagattcagtttctcatcttttacttgattgattatttcaaagactaacttataatcctttttatttattctctcgttagccttaagaaaactagatacaaaatttgcatctacatcatccgtggatatttgatttttttccatgatatccaagagttccgagataatttctccagaacattgatgagacaataatctccgcaatacatttctcaaatgaataagtttattagacacgtggaagtttgactttttttgtacctttgtacatttttgaaataccgactcgcaaaaaatacaatattcatatccttgttcagatactataccgttatgtctacaaccgctacataatcgtagattcatgttaacactctacgtatctcgtcgtccaatattttatataaaaacattttatttctagacgttgccagaaaatcctgtaatatttttagttttttgggctgtgaataaagtatcgccctaatattgttaccgtcttccgccaatatagtagttaaattatccgcacatgcagaagaacaccgcttaggcggattcagtacaatgttatatttttcgtaccaactcatttaaatatcataatctaaaatagttctgtaatatgtctagcgctaatatattgatcataatcctgtgcataaattaagatacaacaatgtctcgaaatcatcgacatggcttcttccatagttagaagatcgtcgtcaaagttagcaacgtgattcatcaacatttgctgttttgaggcagcaaatactgaaccgtcgccattcaaccattcataaaaaccatcgtctgaatccattgataatttcttgtactggtttttgagagctcgcatcaatctagcatttctagctcccggattgaaaacagaaagaggatcgtacatccagggtccattttctgtaaatagaatcgtataatgtcccttcaagaagatatcagacgatccacaatcaaagaattggtctccgagtttgtaacaaactgcggactttaacctatacatgataccgtttagcataatttctggtgatacgtcaatcggagtatcatctattagagatctaaagccggtgtaacattctccaccaaacatattcttattctgacgtcgttctacataaaacatcattgctccattaacgataacaggggaatgaacagcactacccatcacattagttcccaatggatcaatgtgtgtaactccagaacatcttccatagcctatgttaggaggagcgaacaccactcttccactattgccatcgaatgccatagaataaatatccttggaattgatagaaatcggactgtcggatgttgtgatcatcttcataggattaacaactatgtatggtgccgcctgaagtttcatatcgtaactgatgccgtttataggtctagccacagaaaccaacgtaggtctaaatccaactatagacaaaatagaagccaatatctgttcctcatctgtcataacttgagagcatccagtatgaataatcttcattagatggggatctaccgcatcatcatcgttacaataaaaaattcccattctaatgttcataattgcttttctaatcatggtatgcatgtttgctctctgaatctctgtggaaattagatctgatacacctgtaatcactatcggattatcctccgtaagacgattaaccaacaacatataattataagactttacttttctaaattcataaagttgctggattaggctataggtgtctccatgtacatacgcgttctcgagcgcaggaagtttaataccgaatagtgccatcagaataggatgaatatagtaattagtttctggttttctataaataaaagacaaatcttgtgaactagacatatcggtaaaatgcatggattggaatcgtgtagtcgacagaagaatatgatgattagatggagagtatattttatctaactctttgagttggtcaccgattctaggactagctcgagaatgaataagtactaaaggatgagtacatttcacagaaacactagcattgttcaatgtgctctttacatgggtaaggagttgaaatagctcgtttctatttgttctgacaatatttagtttattcataatgttaagcatatcctgaatagtaaagttagatgtgtcatacttgttagtagttagatatttagcaattgcattcccatcatttctcaatctcgtactccaatcatgcgtggatgctacttcgtcgatggaaaccatacaatcctttttgataggctgttgagattgatcatttcctgcacgtttaggtttggtacgttgatttctagcccctgcggatataaagtcatcgtctacaatttgggacaatgaattgcatacactacaagacaaagatttatcagaagtgtgaatatgatcttcatctaccaaagaaagagtttgattagtataactagattttagtcctgcgttagatgttaaaaaaacatcgctattgaccacggcttccattatttatattcgtagtttttactcgaaagcgtgattttaatatccaatcttattacttttggaatcgttcaaaacctttgactagttgtagaatttgatctattgccctacgcgtatactcccttgcatcatatacgttcgtcaccagatcgtttgtttcggcctgaagttggtgcatatctctttcaacattcgacatgagatccttaagggccatatcgtctagattttgttgagatgctgctcctggatttggattttgttgtgctgttgtacatactgtaccaccagtaggtgtaggagtacatacagtggccacaataggaggttgagaaagtgtaaccgttggagtagtacaagaaatacttccatccgattgttgtgtacatgtagttgttggtaacgtctgagaaggttgggtagatggcggcgtcgtcgttttttgatctttattaaatttagagataatatcctgaacagcattgctcggcgtcaacgctggaaggagtgaactcgccggcgcatcagtatcttcagacagccaatcaaaaagattagacatatcagatgatgtattagtttgttgtcgtggttttggtgtaggagcagtactactaggtagaagaataggagccgatgtagctgttggaaccggctgtggagttatatgaatagttggttgtagcggttggataggctgtctgctggcggccatcatattatctctagctagttgttctcgcaactgtctttgataatacgactcttgagactttagtcctatttcaatcgcttcatcctttttcgtatccggatccttttcttcagaataatagattgacgactttggtgtagaggattctgccagcctctgtgagaacttgttaaagaagtccatttaaggctttaaaattgaattgcgattataagattaaatggcagacacagacgatattatcgactatgaatccgatgatctcaccgaatacgaggatgatgaagaagaggaagaagatggagagtcactagaaactagtgatatagatcccaaatcttcttataagattgtagaatcagcatccactcatatagaagatgcgcattccaatcttaaacatatagggaatcatatatctgctcttaaacgacgctatactagacgtataagtctatttgaaatagcgggtataatagcagaaagctataacttgcttcaacgaggaagattacctctagtttcagaattttctgacgaaacgatgaagcaaaatatgctacatgtaattatacaagagatagaggagggttcttgtcctatagtcatcgaaaagaacggagaattgttgtcggtaaacgattttgacaaagatggtctaaaattccatctagactatattatcaaaatttggaaacttcaaaaacgatattagaatttatacgaatatcgttctctaaatgtcacaatcaagtctcgcatgttcagcaatttattgtcgtactttatatcgtgttcattaacgatatcttgcaaaatagtaatgattctatcttccttcgatagatattcttcagagattattgtcttatattctttcttgttatcagatatgaatttgataagactttgaacattattgatacccgtctgtttaattttttctacagatattttagttttggcagattctatcgtatctgtcaatagacatccaacatcgacattcgacgtcaattgtctataaatcaacgtataaattttagaaataacattagcgaattgttgtgcgttgatgtcgttattctgaaacagtatgattttaggtagcattttcttaacaaagagaacgtatttattgttactcagttgaacagatgatatatccagattactaacgcatctgattccgtataccaaactttcagaagaaatggtatacaattgtttgtattcattcaatgtctctttttcagaaattagtttagagtcgaatactgcaataattttcaagagatagttttcatcagataagattttatttagtgtagatatgataaaactattgttttgttggagaacttgatacgccgcgttctctgtagtcgacgctctcaaatgggaaacaatctccattatttttttggaatcggatactatatcttcggtatcttgacgcagtctagtatacatagagttaagagagattagagtttgtacattaagcaacatgtctctaaatgtggctacaaacttttcctttttcacatcatctagtttattatataccgatttcacaacggcaccagatttaaggaaccagaatgaaaaactctgataactacaatatttcatcatagttacgattttatcatcttctatagttggtgtaatagcgcatacctttttctccaagactggaaccaacgtcataaaaatgtttaaatcaaaatccatatcaacatctgatgcgctaagaccagtctcgcgttcaagattatctttactaatggtgacgaactcatcgtataaaactctaagtttgtccattatttatttacagatttagttgtttaatttatttgtgctcttccagagttgggatagtatttttctaacgtcggtattatattattaggatctacgttcatatgtatcataatattaatcatccacgttttgataaatctatctttagcttctgaaataacgtatttaaacaaaggagaaaaatatttagctacggcatcagacgcaataacattttttgtaaatgtaacgtatttagacgacagatcttcgttaaaaagttttccatctatgtagaatccatcggttgttaacaccattcccgcgtcagattgaataggagtttgaatagtttgttttggaaatagatccttcaataacttatagttgggtgggaaaaaatcgattttatcactagactctttcttttttactatcattacctcatgaactatttcttgaatgagtatatgtattttctttcctatatcggacgcgttcattggaaaatataccatgtcgttaactataagaatatttttatcctcgtttacaaactgaataatatcagatgtagttcgtaaacgaactatatcatcaccagcacaacatctaactatatgatatccactagtttcctttagccgtttattatcttgttccatattagcagtcattccatcatttaagaaggcgtcaaaaataatagggagaaatgacattttggattctgttacaactttaccaaaattaaggatatacggacttactatctttttctcaacgtcaatttgatgaacacacgatgaaaatgtgcttctatgagattgatcatgtagaaaacaacaagggatacaatatttccgcatatcatgaaatatattaagaaatcccaccttattatatttccccaaaggatccatgcacgtaaacattatgccgttatcattaataaagacttctttctcatcggatctgtaaaagttgttactgatttttttcattccaggatctagataattaataatgatgggttttctattcttattctttgtattttggcatatcctagaccagtaaacagtttccactttggtaaaatcagcagacttttgaacgctattaaacatggcattaatggcaataactaaaaatgtaaaatatttttctatgttaggaatatggtttttcactttaatagatatatggtttttggccaaaatgatagatatttttttatccgaggatagtaaaatattattagtcgccgtctctataaaaatgaagctagtctcgatatccaattttattctagaattgataggagtcgccaaatgtaccttatacgttatatctcccttgatgcgttccatttgtgtatctatatcggacacaagatctgtaaatagttttacgttattaatcatcacggtatcgccgtcgctagataacgctaatgtaccatccaagtcccaaatggagagatttaactgttcatcgtttagaataaaatgattaccggtcatattaataaagtgttcatcgtatctagataacaacgacttataattaatgtccaagtcttgaactcgctgaatgatcttttttaacccagttagttttagattggtacgaaatatattgttaaactttgattctacagtaatgtccaaatctagttgtggaaatacttccatcaacattgtttcaaacttgataatattattatctacatcttcgtacgatccaaattccggaatagatgtatcgcacgctctggccacccagataaccaaaaagtcacacgctccaggatatacattgtataaaaagctatcgttttttagtagggtttttttctgcgtgtatacgaagggattaaaaatagtattatcaacgtaactatattccaaattattcttatgagaatagataataatatcgtccttaatatctaacaaatttcctaaatatccctttaattgagtcattcgaagcgtcaatagaatatgtctcttaactatttccggctgttgtatatttaaatgacttcgtaaaaaataatatatgggcgacttctcatctatgtaatcatatggagtgagatatagggctcgttctacctcctgccccttacccacctgtaataccaattgcggacttactatatatcgcatatttatatcgtggggtaaagtgaaaatctactaccgatgatgtaagtcttacaatgttcgaaccagtaccagatcttaatttggaggcctccgtagaactaggggaggtaaatatagatcaaacaacacctatgataaaggagaatagcggttttatatcccgcagtagacgtctattcgcccatagatctaaggatgatgagagaaaactagcactacgattctttttacaaagactttattttttagatcatagagagattcattatttgttcagatgcgttgacgctgtaaaagacgtcactattaccaaaaaaaataacattatcgtggcgccttatatagcacttttaactatcgcatcaaaaggatgcaaacttacagaaacaatgattgaagcattctttccagaactatataatgaacatagtaagaaatttaaattcaactctcaagtatccatcatccaagaaaaactcggataccagtttggaaactatcacgtttatgattttgaaccgtattactctacagtagctctggctattcgagatgaacattcatctggcatttttaatatccgtcaagagagttatctggtaagttcattatctgaaataacatatagattttatctaattaatctaaaatctgatcttgttcaatggagtgctagtacgggcgctgtaattaatcaaatggtaaatactgtattgattacagtgtatgaaaagttacaactggtcatagaaaatgattcacaatttacatgttcattggctgtggaatcaaaacttccaataaaattacttaaagatagaaatgaattatttacaaaattcattaacgagttaaaaaagaccagttcattcaagataagcaaacgcgataaggatacgctactaaaatattttacttaggactggagttagaatttatagacgactcatttcgtttatcattgttactattattactattactatcattattagtgttggcattattagtattcttcttgtcatcttgttcagaaatatacagcaatgctatacctaatactaaatacattatcatgctcgcaatggctctaacaacaacgaaccaaaatgaatttggtcgtagcttttgttcacaaaaatacataaagaaatgtctacataaatctatggcgccattggctacttgaaatagcgccagtcctcctacagattttaatatagctgtataacatgacatttattcatcatcaaaagagacagagtcaccatctgtcatatttagattttttttcatgtgttcaaagtatcctctactcatttcattataatagtttatcatacttagaattttaggacggatcaatgagtaagacttgactagatcgtcagtagtaatttgtgcatcgtctattctgcatccgcttcgtcgaataatgtatagcatcgctttgagattctccatagctatcaagtctttatacaatgacatggaaatatctgtgaatactttatacttctccaacatcgatgccttaacatcatcgcctactttagcattgaaaatacgttctattgtgtagatggatgtagcaagatttttaaacaacaatgccatcttacacgatgattgcctcaagtctccaatcgtttgtttagaacgattagctacagagtccaatgcttggctgactagcatattattatctttagaaattgtattcttcaatgaggcgtttatcatatctgtgatttcgttagtcatattacagtctgactgggttgtaatgttatccaacatatcacctatggatacggtacacgtaccagcatttgtaataatcctatctaagatgttgtatggcattgcgcagaaaatatcttctcctgtaatatctccactctcgataaatctactcagattattcttaaatgccttattctctggagaaaagatatcagtgtccatcatttcattaatagtatacgcagaaaagataccacgagtatcaattctatccaagatacttatcggttccgagtcacagataatggtttcctctccttcgggagatcctgcatagaaatatctaggacaatagtttctatactgtctgtaactctgataatctctaaagtcactaactgataccatgaaattgagaagatcaaacgctgaagtaattaatttttctgcctcgtttttactacaactagttttcatcaatgtagtgacgatgtattgtttagttacttttggtctaatactgatgatagagatattattgcttcccataatggatcttctagtagtcaccttaaagcccattgatgcgaatagcagatagataaagtcttggtatgactcctttctaatatagtacggactacctttgtcacccaactttatacccacataagccataacaacctctttaatagccgtttcatgaggtttatcagccatgagcctgagtagttggaagaatctcatgaatcccgtctcagaaagtcctatatgcatgatagatttatctttcctgggaaactctcgtatagtcatagatgaaatactctttaaagtttctgaaataagattagtaacagtcttacctccgactactctaggtaacaaacaaactctaataggtgttttctctgcggagataatatcagaaaggatagagcaataagtagtattattgtgattataaagaccgaatacataacaggtagaatttataaacatcatgtcctgaaggtttttagacttgtattcctcgtaatccataccgtcccaaaacatggatttggtaactttgatagccgtagatctttgttccttcgccaacaggttaaagaaattaataaagaatttgttgtttctatttatgtccacaaattgcacgtttggaagcgccacggttacattcactgcagcattttgaggatcgcgagtatgaagtacgatgttattgtttactggtatatctggaaagaaatctaccagtctaggaataagagattgatatcgcatagaaatagtaaagtttataatctcatcatcgaagagcattttgttaccattgtaataaatatccactctgtcatatgtataaatgaagtactgttcaaacatgatgagatgtttatatgttggcatagtagtgagatcgacgtttggtaatggcaatgtattaagattaactccataatgtctagcagcatctgcgatgttataagcgtcgtcaaagcggggtcgatcttgtattgttatatattgtctaacacctataagattatcaaaatcttgtctgcttaatacaccgttaacaatttttgccttgaattcttttattggtgcattaataacatccttatagaggatgttaaacaaataagtgttatcaaagttaagatctggatatttcttttctgctagaacatccattgagtcggagccatctggtttaatataaccaccgataaatctagctctgtattctgtatccgtcaatctaatattaagaaggtgttgagtgaaaggtggaagatcgtaaaagctgtgagtattaatgataggattagtttccgaactaatgttaattggggtattaataatatctatatttccagcgttaagtgtaacattaaacagttttaattcacgtgacgtggtatcaattaaataattaatgcccaatttggatatagcagcctgaagctcatcttgtttagttacggatcctaatgagttattaagcaatatatcgaacggatgaacgaaggttgttttaagttggtcacatactttgtaatctagacatagatgcggaagaacggtagaaactatacgaaataaatattcagagtcctctaattgatcaagagtaactattgacttaataggcatcatttatttagtattaaatgacgaccgtaccagtgacggatatacaaaacgatttaattacagagttttcagaagataattatccatctaacaaaaattatgaaataactcttcgtcaaatgtctattctaactcacgttaacaacgtggtagatagagaacataatgccgccgtagtgtcatctccagaggaaatatcctcacaacttaatgaagatctatttccagatgatgattcaccggccactattatcgaacgagtacaacctcatactactattattgacgatactccacctcctacgtttcgtagagagttattaatatcggaacaacgtcaacaacgagaaaaaagatttaatattacagtatcgaaaaatgctgaagcaataatggaatctagatctatgataacttctatgccaacacaaacaccatccttgggagtagtttatgataaagataaaagaattcagatgttagaggatgaagtggttaatcttagaaatcaacgatctaatacaaaatcatctgataatttagataattttaccaaaatactatttggtaagactccgtacaaatcaacagaagttaataagcgtatagccatcgttaattatgcaaatttgaacgggtcccccttatcagtcgaggacttggatgtttgttcggaggatgaaatagatagaatctataaaacgattaaacaatatcacgaaagtagaaaacgaaaaattatcgtcactaacgtgattattattgtcataaacattatcgagcaggcattgctaaaactcggatttgaagaaatcaaaggactgagtaccgatatcacttcagaaattatcgatgtggagatcggagatgactgcgatgctgtagcatctaaactaggaatcggtaacagtccggttcttaatattgtattgtttatactcaagatattcgttaaacgaattaaaattatttaatttaatacattcccatatccagacaacaatcgtctggattaatctgttcctgtcgtctcataccggacgacatattaatctttttattagtgggcatctttttagatggtttctttttcccagcattaactgagtcgatacctagaagatcgtgattgatctctccgaccattccacgaacttctaattggccgtctctgacggtaccataaactattttaccagcattagtaacagcttggacaatctgaccatccatcgcattgtacgatgtagtagtaactgttgttctacgtctaggagcaccagaagtatttttggagcccttggatgttgatgtagaagaagacgaggattttgattttggtttacatgtaatacattttgaactctttgattttgtatcacatgcgccggcagtcacatctgtttgagaattaagattattgttgcctcctttgacggctgcatctccaccgatttgcgctagtagatttttaagctgtggtgtaatcttattaactgtttcgatataatcatcgtaactgcttctaacggctaaattttttttatccgccatttagaagctaaaaatatttttatttatgcagaagatttaactagattatacaatgaactaatatgatccttttccagattatttacaaacttggtattttttggttctggaggaggcgaatttaaattcggacttggattcggattttgtaagttcttgatcttattatacatcgagtataggatggcgacagtaactgctacacaaataccgatcaaaagaagaataccaatcatttattgacaataacttcactattgatcaagtatgcaatatatcatcttttcactaaataagtagtaataatgattcaacaatgtcgagatatatggacgataataatttagttcatggaaatatcgctatgattggtgtgaatgactccgctaactctgtggggtgcgcagtgctttccccacatagaataaattagcattccgactgtgataataataccaagtataaacgccataatactcaatactttccatgtacgagtgggactggtagacttactaaagtcaataaaggcgaagatacacgaaagaatcaaaagaatgattccagcgattagcacgccggaaaaataatttccaatcataagcatcatgtccatttaactaataaaaattttaaatcgccgaatgaacaaagtggaatataaaccatataaaaacaatagtttgtactgcaaaaataatatctatttttgttttcgaagatatggtaaaattaaatagtagtacacagcatgttataactaacagcagcaacggctcgtaattacttatcatttactagacgaaaaggtggtgggatattttcttgctcaaataatacgaatatatcacccatccattttatgcgatgtttatatactctaatctttaatagatctatagacgacgggtttaccaacaatatagattttatcgattcatctaatttaaacccttccttaaacgtgaatgatctattatctggcataacgatgaccctacctgatgaatcggacaatgtactgggccatgtagaataaattatcaacgaattatcgtctacgaacatttatatcatttgttttaattttaggacgcgaataaatggatataaaatagaaaataacagatattacaaccagtgttatggccgcgcccaaccaggtaggcagttttattttatcttttactacaggttctcctggatgtacgtcaccaacggcggacgtagttctagtacaattagacgtaagttccgcttgggaattttttaacgctaaagagttaacgttaatcgtgcacccaacgtatttacatctagttcgttgaacatcttgattataatataaccattttctatctctagattcgtcagtgcactcatgtaaccaacataccctaggtcctaaatatttatctccggaattagattttggataattcgcgcaccaacaatttctatttcctttatgatcgttacaaaagacgtataatgccgtatccccaaaagtaaaataatcaggacgaataattctaataaactcagaacaatatctcgcatccatatgtttggagcaaatatcggaataagtagacatagccggtttccgttttgcacgtaaccattctaaacaattggggtttccaggatcgtttctacaaaatccagtcatgaaatcgtcacaatgttctgtcttgtaattattattaaatatttttggacagtgtttggtatttgtcttagaacaacattttgccacgctatcactatcgcccaggagataatccttttttataaaatgacatcgttgcccggatgctatataatcagtagcgtgttttaaatccttaatatattcaggagttacctcgttctgataatagattaatgatccaggacgaaatttgaaagaactacatggttctccatgaattaatacatattgtttagcaaattcaggaactataaaactactacaatgatctatcgacataccatctatcaaacaaaacttgggtttaatttctcccggagatgtttcataatagtacgtataactttcttctgcaaacttaacagctctattatattcaggataattaaaacctaattccatatatttgtctcgtatatctgctattcctggtgctattttgattctattaagagtaacagctgcccccattcttaataatcgtcagtatttaaactgttaaatgttggtatatcaacatctaccttatttcccgcagtataaggtttgttgcaggtatactgttcaggaatggttacatttatacttcttctatagtcctgtctttcgatgttcatcacatatgcaaagaacagaataaacaaaataatgtaagaaataatattaaatatctgtgaattcgtaaatacattgattgccataataattacagcagctacaatacacacaatagacattcccacagtgttgccattacctccacgatacatttgagttactaagcaataggtaataactaagctagtaagaggcaatagaaaagatgagataaatatcatcaatatagagattagaggagggctatatagagccaagacgaacaaaatcaaaccgagtaacgttctaacatcattatttttgaagattcccaaataatcattcattcctccataatcgttttgcatcatacctccatctttaggcataaacgattgctgctgttcctctgtaaataaatctttatcaagcactccagcacccgcagagaagtcgtcaagcatattgtaatatcttaaataactcatttatatattaaaaaatgtcactattaaagatggagtataatctttatgccgaactaaaaaaaatgacttgtggtcaacccctaagtctttttaacgaagacggggatttcgtagaagttgaaccgggatcatcctttaagtttctgatacctaagggattttacgcctctccttccgtaaagacgagtctagtattcgagacattaacaacgaccgataataaaatcactagtatcaatccaacaaatgcgccaaagttatatcctcttcaacgcaaagtcgtatctgaagtagtttctaatatgaggaaaatgatcgaatcaaaacgtcctctatacatcactcttcacttggcgtgtggatttggtaagactattaccacgtgttatcttatggctacacacggtagaaaaaccgtcatttgcgtacccaataaaatgttaatacatcaatggaagacacaggtagaggcagtcggattggaacataagatatccatagatggagtaagtagtctattaaaggaactaaagactcaaagtccggatgtattaatagtagtcagtagacatctgacaaacgatgccttttgtaaatatatcaataagcattatgatttgttcatcttggatgaatcacatacgtataatctgatgaacaatacagcagttacaagatttttagcgtattatcctccgatgatgtgttattttttaactgctacacctagaccatctaaccgaatttattgtaacagtattattaatattgccaagttatccaatctaaaaaaaactatctatgcagtagatagtttttttgagccatattccacagataatattagacatatggtaaaacgactagatggaccatctaataaatatcatatatataccgagaagttattatctgtagacgagcctagaaatcaacttattcttgataccctggtagaagaattcaagtcaggaactattaatcgcattttagttattactaaactacgtgaacatatggtattattctacaaacgattattagattttttcggaccagaggttgtatttataggagacgcccaaaatagacgtactccagatatggtcaaatcaatcaaggaactaaatagatttatattcgtatccaccttattttattccggtactggtttagatattcctagtttggattcgttgttcatttgctcggcagtaatcaacaatatgcaaatagagcaattactagggagggtatgtcgagaaacagaactattagataggacggtatatgtatttcctaacacatccatcaaagaaataaagtacatgataggaaatttcatgcaacgaattattagtctgtctgtagataaactaggatttaaacaaaaaagttatcggaaacatcaagaatccgatcccacttctgcatgtacaacatcatccagagaagaacgtgtattaaatagaatatttaactcgcaaaatcgttaagaagtttaagcgacgatccgcatgctgcgcaggccagtgtattacccctcatagtattaatataatccaatgatacttttgtgatgtcggaaatcttaaccaatttagactgacaggcagaacacgtcatgcaatcatcatcgtcatcgataactgtagtcttgggcttctttttgcgactcttcattccggaacgcacattggtgctatccatttaggtagtaaaaaataagtcagaatatgccctataacacgatcgtgcaaaacctggtatatcgtctctatctttatcacaatatagtgtatcgacatttttattattattgacctcgtttatcttggaacatggaatgggaacatttttgttatcaacggccatctttgccttaattccagatgttgtaaaattataactaaacagtctatcatcgacacaaatgaaattcttgtttagacgtttgtagtttacgtatgcggctcgttcgcgtctcattttttcagatattgcaggtactataatattaaaaataagaatgaaataacataggattaaaaataaagttatcatgacttctagcgctgatttaactaacttaaaagaattacttagtctgtacaaaagtttgagattttcagattctgcggctatagaaaagtataattctttggtagaatggggaacatctacttactggaaaataggcgtgcaaaaggtagctaatgtcgagacgtcaatatctgattattatgatgaggtaaaaaataaaccgtttaatattgatccgggctattacattttcttaccggtatattttgggagcgtctttatttattcgaagggtaaaaatatggtagaacttggatctggaaactcttttcaaataccagatgatatgcgaagtgcgtgtaacaaagtattagacagcgataacggaatagactttctgagatttgttttgttaaacaatagatggataatggaagatgctatatcaaaatatcagtctccagttaatatatttaaactagctagtgagtacggattaaacatacccaaatatttagaaattgaaatagaggaagacacattatttgacgacgagttatactctattatagaacgctctttcgatgataaatttccaaaaatatccatatcgtatattaagttgggagaacttagacggcaagttgtagactttttcaaattctcattcatgtatattgagtccatcaaggtagatcgtataggagataatatttttattcctagcgttataacaaaatcaggaaaaaagatattagtaaaagatgtagaccatttaatacgatccaaggttagagaacatacatttgtaaaagtaaaaaagaaaaacacattttccattttatacgactatgatggaaacggaacagaaactagaggagaagtaataaaacgaattatagacactataggacgagactattatgttaacggaaagtatttctctaaggttggtagtgcaggcttaaagcaattgactaataaattagatattaatgagtgcgcaactgtcgatgagttagttgatgagattaataaatccggaactgtaaaacgaaaaataaaaaaccaatcagcatttgatttaagcagagaatgtttgggatatccagaagcggattttataacgttagttaataacatgcggttcaaaatagaaaattgtaaggttgtaaatttcaatattgaaaatactaattgtttaaataacccgagtattgaaactatatatggaaactttaaccagttcgtctcaatctttaatgtcgtcaccgatgtcaaaaaaagattattcgagtgaaataatatgcgcctttgatataggtgcaaaaaatcctgccagaactgttttagaagtcaaggataactccgttagggtattggatatatcaaaattagactggagttctgattgggaaaggcgcatagctaaagatttgtcacaatatgaatacactacagttcttctagaacgtcagcctagaaggtcgccgtatgttaaatttatctattttattaaaggctttttatatcatacatcggctgccaaagttatttgcgtctcgcctgtcatgtctggtaattcatatagagatcgaaaaaagagatcggtcgaagcatttcttgattggatggacacattcggattgcgagactccgttccggatagacgcaaattagacgatgtagcggatagtttcaatttggctatgagatacgtattagataaatggaatactaattatacaccttataataggtgtaaatctagaaattacataaaaaaaatgtaataacgttagtaacgccattatggataatctatttacctttctacatgaaatagaagatagatatgccagaactatttttaactttcatctaataagttgcgatgaaataggagatatatatggtcttatgaaagaacgcatttcctcagaggatatgtttgataatatagtgtataataaagatatacatcctgccattaagaaactagtgtattgcgacatccaacttactaaacacattattaatcagaatacgtatccggtatttaacgattcttcacaagtgaaatgttgtcattatttcgacataaactcagataatagcaatattagctctcgtacagtagagatatttgagagggaaaagtcatctcttgtatcatatattaaaactaccaataagaagagaaaggtcaattacggcgaaataaagaaaactgttcatggaggcactaatgcaaattacttttccggtaaaaagtctgacgagtatctgagtactacagttagatccaacattaatcaaccttggatcaaaaccatctctaagaggatgagagttgatatcattaatcactctatagtaacgcgtggaaaaagctctatattacaaactatagaaattatttttactaatagaacatgtgtgaaaatattcaaggattctactatgcacattattctatccaaggacaaggatgaaaaggggtgtatacacatgattgacaaattattctatgtctattataatttatttctgttgttcgaagatatcatccaaaacgagtactttaaagaagtagctaatgttgtaaaccacgtactcacggctacggcattagatgagaaattattcctaattaagaaaatggctgaacacgatgtttatggagttagcaatttcaaaatagggatgtttaacctgacatttattaagtcgttggatcataccgttttcccctctctgttagatgaggatagcaaaataaagttttttaaggggaaaaagctcaatattgtagcattacgatctctggaggattgtataaattacgtgactaaatccgagaatatgatagaaatgatgaaggaaagatcgactattttaaatagcatagatatagaaacggaatcggtagatcgtctaaaagaattgcttctaaaatgaaaaaaaacactaattcagaaatggatcaacgactagggtataagtttttggtgcctgatcctaaagccggagttttttatagaccgttacatttccaatatgtatcgtattctaattttatattgcatcgattgcatgaaatcttgaccgtcaagcggccactcttatcgtttaagaataatacagaacgaattatgatagaaattagcaatgttaaagtgactcctccagattactcacctataatcgcgagtattaaaggtaagagttatgacgcattagccacgttcactgtaaatatctttaaagaggtaatgaccaaagagggtatatccatcactaaaataagtagttatgagggaaaagattctcatttgataaaaattccgctactaataggatacgggaataaaaatccacttgatacagccaagtatcttgttcctaatgtcataggtggagtctttatcaataaacaatctgtcgaaaaagtaggaattaatctagtagaaaagattacaacatggccaaaatttagggttgttaagccaaactcattcactttctcgttttcctccgtatcccctcctaatgtattaccgacaagatatcgccattacaagatatctctggatatatcacaattggaagcgttgaatatatcatcgacaaagacatttataacggtcaatattgttttgctgtctcaatatttatctagagtgagtctagaattcattagacgtagtttatcatacgatatgcctccagaagttgtctatctagtaaacgcgataatagatagtgctaaacgaattactgaatctattactgactttaatattgatacatacattaatgacctggtggaagctgaacacattaaacaaaaatctcagttaacgatcaacgagttcaaatatgaaatgctgcataactttttacctcatatgaactatacacccgatcaactaaagggattttatatgatatctttactaagaaagtttctctactgtatcttccacacttctagatatccagatagagattcgatggtttgtcatcgcatcctaacgtacggcaaatattttgagacgttggcacatgatgaattagagaattacataggcaacatccgaaacgatatcatgaacaatcacaagaacagaggcacttacgcggtaaacattcatgtactaacaactcccggacttaatcacgcgttttctagcttattgagtggaaagttcaaaaagtcagacggtagttatcgaacacatcctcactattcatggatgcagaatatttctattcctaggagtgttggattttatccggatcaagtaaagatttcaaagatgttttctgtcagaaaataccatccaagtcaatatctttacttttgttcatcagacgttccggaaagaggtcctcaggtaggtttagtatctcaattgtctgtcttgagttccattacaaatatactaacgtctgagtatttggatttggaaaagaaaatttgtgagtatatcagatcatattataaagatgatataagttactttgaaacaggatttccaatcactatagaaaatgctctagtcgcatctcttaatccaaatatgatatgtgattttgtaactgactttagacgtagaaaacggatgggattcttcggtaacttggaggtaggtattactttagttagggatcacatgaatgaaattcgcattaatattggagcgggaagattagtcagaccattcttggttgtggataacggagagctcatgatggatgtgtgtccggagttagaaagcagattagacgacatgacattctctgacattcagaaagagtttccgcatgtcatcgaaatggtagatatagaacaatttacttttagtaacgtatgtgaatcggttcaaaaatttagaatgatgtcaaaggatgaaagaaagcaatacgatttatgtgactttcctgccgaatttagagatggatatgtagcatcttcattagtgggaatcaatcacaattctggacccagagctattcttggatgtgctcaagctaaacaagctatctcttgtctgagctcggatatacgaaataaaatagacaatggaattcatttgatgtatccagagaggccaatcgtgattagtaaggctttagaaacttcaaagattgcggctaattgcttcggccaacatgttactatagcattaatgtcgtacaaaggtatcaatcaagaggatggaattatcatcaaaaaacaatttattcagagaggcggtctcgatattgttacagccaagaaacatcaagtagaaattccattggaaaactttaataacaaagaaagagataggtctaacgcctattcaaaattagaaagtaatggattagttagactgaatgctttcttggaatccggagacgctatggcacgaaatatctcatcaagaactcttgaagatgattttgctagagataatcagattagcttcgatgtttccgagaaatataccgatatgtacaaatctcgcgttgaacgagtacaagtagaacttactgacaaagttaaggtacgagtattaaccatgaaagaaagaagacccattctaggagacaaatttaccactagaacgagtcaaaagggaacagtcgcgtatgtcgcggatgaaacggaacttccatacgacgaaaatggtatcacaccagatgtcattattaattctacatccatcttctctagaaaaactatatctatgttgatagaagttattttaacagccgcatattctgctaagccgtacaacaataagggagaaaaccgacctgtctgttttcctagtagtaacgaaacatccatcgatacatatatgcaattcgctaaacaatgttatgagcattcaaatccgaaattgtccgatgaagaattatcggataaaatcttttgtgaaaagattctctatgatcctgaaacggataagccttatgcatccaaagtattttttggaccaatttattacttgcgtctgaggcatttaactcaggacaaggcaaccgttagatgtagaggtaaaaagacgaagctcattagacaggcgaatgagggacgaaaacgtggaggaggtatcaagttcggagaaatggagagagactgtttaatagcgcatggtgcagccaatactattacagaagttttgaaagattcggaagaagattatcaagatgtgtatgtttgtgaaaattgtggagacatagcagcacaaatcaagggtattaatacatgtcttagatgttcaaaacttaatctctctcctctcttaacaaaaattgataccacgcacgtatctaaagtatttcttactcaaatgaacgccagaggcgtaaaagtcaaattagatttcgaacgaaggcctccttcgttttataaaccattagataaagttgatctcaagccgtcttttctggtgtaatattctagtttggtagtagatacatatcaatatcatcaaattcgagatccgaattataaaatgggcgtggattgttaactatagaatcggacgtctgatattcgaaaatctgtggagtttcaggttttggtggaggtgtaactgctacttgggatactgaagtctgatattcagaaagctgtggatgttctggttcggcatccaccgatggtgtcacatcactaatcggttcggtaacgtctgtggatggaggtgctacttctacagaacctgtagcctcagttgtcaacggagatacatttttaatgcgagaaaatgtataatttggtaatggtttcttatgtggatctgaagaagaggtaagatatctactagaaagataccgatcacgttctagttctcttttgtagaacttaactttttctttctccgcatctagttgatattccaacctcttcacgttactacgttcagattccaattcacgttcgcatgggttacctccgcagtttttacgagcgatttcacgttcagccttcatgcgtctctccctctctctatcgagtttatcagagcagtctttctgaaggcgatcgaactccataaatttctccaacgctttgattgtttccatagatttccgaagttcagcttttaggactgtgattctttttctttcgaattcacagctggatgtacaaccgtttccattaccgccatctctaagtttcttttctagatcggcaacatttcatccccatgccttttacattcctcgagtctactgtcgtcgaaatatcgttccagctccttttcgacatcaataactttagcacgttgtctctcaagctctcttttgtagttatctgattccctggcacgtttaagatcttcatgcaattgagtcagctcttaacttcctctcttgcttcttcgtcatagtacgcgcaatcactgtgagatccattgttaccacgtctacactcggcgagctcgcgtttaagagattcaatttcccgtttgtattggtccatgtttccattgctaccaccattagatttacaggctgctagttgtcgttcgagatcagaaatacgggttttcttggaattgatttcgtcgatgtacttggcatcgaaacacttattaagttctttttccaattctacgattttatttctttcgcgagtcaattccctcctgtagtaactatctgttttgtcagattcacgctctctacgtagactttcttgcaagttactaatttgttccctagcacgtccgagtttagttttatatgctgaatagagttctgattcatcctttgagcagatctctagcgatcgtttaagattcctaattctagtctttagcctatttacctcctcagaagatgttccgttaccgttgcgtttacactcgttaagctgtctatcaagatccatgattctatctctaagacgttgcatctctctttccatatcagcattgctttcattattacgtctgcagtcactcaactgtctttcaatatctgagattctatctctaagacgtcgcatctctctctgtttcggcattggtttcattattacgtttacagtcgttcaactgtctttcaagatctgatattctagattggagtctgctaatctctgtagcattttcacggcattcactcagttgtctttcaagatctgaaattttagattggagtctgctaatctctgtaagatttcctcctccgctctcgatgcagtcggtcaacttattctctagttctctaatacgcgaacgcagtgcatcaacttcttgcgtgtcttcctggttgcgtgtacattcatcgagatctctaacgcgtcgtcgttcttcctcaagttctctgcgtactacagaaagcgtgtccctatcttgttgatatttagcaatttctgattctagagtactgattttgcttacgtagttactaatagttgtcttggccttatcaagatcctccttgtatttgtcgcattccttgatatccctacgaagtctggacagttcccattcgacattacgacgtttatcgatttcagctcggagatcgtcatcgcgttgttttagccacatacgactgagttcaagttctcgttgacaagatccatctacttttccattcctaatagtatccagttccttttctagttctgaacgcatttctcgttccctatcaagcgattctctcaattctcggatagtcttcttatcaatttctaataaatctgaaccatcatctgtcccattttgaatatccctgtgttctttgatctcttttgtaagtcggtcgattctttcggttttataaacagaatccctttccaaagtcctaatcttactgagtttatcactaagttctgcattcaattcggtgagttttctcttggcttcttccaactctgttttaaactctccactatttccgcattcttcctcgcatttatctaaccattcaattagtttattaataactagttggtaatcagcgattcctatagccgttcttgtaattgtgggaacataattaggatcttctaatggattgtatggcttgatagcatcatctttatcattattagggggatggacaaccttaattggttggtcctcatctcctccagtagcgtgtggttcttcaataccagtgttagtaataggcttaggcaaatgcttgtcgtacgcgggcacttcctcatccatcaagtatttataatcgggttctacttcagaatattcttttctaagagacgcgacttcgggagttagtagaagaactctgtttctgtatctatcaacgctggaatcaatactcaagttaaggatagcgaatacctcatcgtcatcatccgtatcttctgaaacaccatcatatgacatttcatgaagtctaacgtattgataaatagaatcagatttagtattaaacagatccttaacctttttagtaaacgcatatgtatattttagatctccagatttcataatatgatcacatgccttaaatgtcagtgcttccatgatataatctggaacactaatgggtgacgaaaaagatacagcaccatatgctacgttgataaataaatctgaaccactaagtagataatgattaatgttaagaaagaggaaatattcagtgtataggtatgtcttggcgtcatatcttgtactaaacacgctaaacagtttgttaatgtgatcaatttccaatagattaattagagcagcgggaataccaacaaacatattaccacatccgtattttctatgaatatcacatatcatgttaaaaaatcttgatagaagagcgaatatctcgtctgacttaatgagtcgtagttcagcagcaacataagtcataactgtaaatagaacatactttcctgtagtgttgattctagactccacatcaacaccattattaaaaatagttttatatacatctttaatctgctctccgttaatcgtcgaacgttctagtatacggaaacactttgatttcttatctgtagttaatgacttagtgatatcacgaagaatattacgaattacatttcttgtttttcttgagagacctgattcagaactcaactcatcgttccatagtttttctacctcagtggcgaaatctttggagtgcttggtacatttttcaataaggttcgtgacctccatttattataaaaaatttattcaaaacttaactacaatcgggtaattataagatcgtagatctcccatgtggcggaatactaccatctatcgcatgtggatggacagtaggtaatggccatgggaacagtaatgtttgcatatttatctttcttgctagtattactgcatattgtcccaatgtttcgatgtgatgttctaacctatcaactgccgctgtatcacaacaatagtgtccgatgaaattaagattatgatccaatgtgtttaatatatgattatcaagtcttatacgatccgcgtcttttttgacaggatcaggttcttctacaggaagaagtttcggcctcttatgatattcatgtctgggaaacggtggtctagggtgaggctccggtatcggagtgggttttggattataatcatcatcgtctatgacatcatcttcgacttcgatatttattttgctatcttgatgatgtcctgtatcagttgcattttcagcactcgactgaatattagcgcattcattgtctattattaccatatttctaaacccaaaatgtatgtgttgaacatcagtactatcgttgatgagtcttatagcatgaattcgcttatcgttatcgggtttatcttctgtcaccttagcaattccttttttattaaactctacataatcatatccatttctattgtttgttctaatataaacgagtatagcatcattgctaaatttttcaatagtatcaaaaacagaatatcctaaaccatataatatatattcaggaacactcaaactaaatgtccaggattctcctaaatacgtaaactttaatagtgcgaaatcattcaaaaatctaccacttatagatagatagtacataaatgcgtatagtagtctacctatctctttattatgaaaaccggcattacgatcatatatgtcgtgatatacctgtgatccgtttacgttaaaccataaatacatgggtgatcctataaacatgaatttatttctaattctcagagctatagttaattgaccgtgtaatatttgcttacatgcatacttgatacgcttattaataagatttttatcattgctcgttatttcagaatcgtatatataaggagtaccatcgtgattcttaccagatattatacaaaatactatatataaaatatattgacccacgttagtaatcatataaatgtttaacgttttaaattttgtattcaatgatccattatcatacgctatcatggtcttgtaatattcattctttaaaatataatattgtgttagccattgcattggagctcctaatggagattttctattctcatccattttaggataggctttcataaagtccctaataacttcgtgaataatgtttctatgttttctactgatgcatgtatttgcttcgatttttttatcccatgtttcatctatcatagatttaaacgcagtaatgctcgcaacattaacatcttgaaccgttggtacaattccgttccataaatttataatgttcgccatttatataactcattttttgaatatacttttaattaacaaaagagttaagttactcatatggacgccgtccagtctgaacatcaatctttttagccagagatatcatagccgctcttagagtttcagcgtgattttccaacctaaatagaacttcatcgttgcgtttacaacacttttctatttgttcaaactttgttgttacattagtaatctttttttccaaattagttagccgttgtttgagagtttcctcattgtcgtcttcatcggctttaacaattgcttcgcgtttagcctctggctttttagcagcctttgtagaaaaaaattcagttgctggaattgcaagatcgtcatctccggggaaaagagttccgtccatttaaagtacagattttagaaactgacactctgcgttatttatatttggtacaacacatggattataaatattgatgttaataacatcagaaaatgtaaagtctatacattgttgcatcgtgttaaattttctaatggatctagtattattgggtccaacttctgcctgaaatccaaatatggaagcggatacaaaaccgtttcctggataaaccacacatctccacttttgctttacatcagaaattgtgtcgttgacatcttgaactctcctatctaatgccggtgttccacctatagattttgaatattcgaatgctgcatgagtagcattaaattccttaatattgccataattttcatatattgagtaaccctggataaaaagtaaacacaccgcagccgtcgctaccacaataaaaaaaattgatagagagttcatttataatctattagaagctgacaaaatttttttacacgcatcagacaatgctttaataaatagttcaacatctacttttgtcatatcgaaccgatggtatgattctaacctagaattacatccgaaaaagttgactatgttcatagtcattaagtcattaacaaacaacattccagactctggattataagacgatactgtttcgtcacaattacctaccttaatcatgtgattatgaatattggctattagagcaccttctaagaaatctataatatctttgaaacacgatttaaaatcaaaccacgaatatacttctacgaagaaagttagtttacccataggagaaataactataaatggagatctaaatacaaaatccggatctatgatagttttaacattattatattctctattaaatacctccacatctaaaaatgttaattttgaaactatgtcttcgtttattaccgtacctgaactaaacgctataagctctattgtttgagaactctttaaacgatattcttgaaatacatgtaacaaagtttcctttaactcggtcggtttatctaccatagttacagaatttgtatccttatctataatataataatcaaaatcgtataaagttatataattatcgcgttcagattgtgatcttttcaaatagactaaaaaccccatttctctagtaagtatcttatgtatatgtttgtaaaatatcttcatggtgggaatatgctctaccgcagttagccattcctcattgacagcggtagatgtattagacaaaactattccaatgtttaacaagggccattttacgagattattaaatccttgtttgataaatgtagccaatgagggttcgagttcaacgacgattgaattctcttcccgcggatgctgcatgatgaacgacgggatgttgttcgattgatttggaattctttttcgactttttgtttatattaaatattttaaaatttatagcggatagcaattcatgtaccacggataatgtagacgcgtattgcgcatcgatatctttattattagataaatttatcaataaatgtgagaagtttgcctcgttaaggtcttccatttaaatattatataaacatttgtgtttgtatcttattcgtcttttatggaatagttttttactagtaaagctgcaattacacactttgtccgtaaaacataaatataaacaccagcttttatcaatcgttccaaaaagtcgacggcggacatttttaacatggcatctattttaaatacacttaggtttttggaaaaaacatcattttataattgtaacgattcaataactaaagaaaagattaagattaaacataagggaatgtcatttgtattttataagccaaagcattctaccgttgttaaatacttgtctggaggaggtatatatcatgatgatttggttgtattggggaaggtaacaattaataatctaaagatgatgctattttacatggatttatcatatcatggagtgacaagtagtggagcaatttacaaattgggatcgtctatcgatagactttctctaaataggactattgttacaaaagttaataattatgatgatacattttttgacgacgatgattgatcgctattgcacaattttgtttttgtactttctaatatagtgtttaggttctttttcatatgagaatattgatttactaaaatatctatgtttaacttttgttctatgacgtccttatcggcggtatcggtacatatacgtaattcaccttcacaaaatacggagtcttcgataataatagccaatcgattattggatctagctgtctgtatcatattcaacatgtttaatatatcctttcgtttcccctttacaggcatcgatcgtagcatattttccgcgtctgatatggaaatgttaaaactacaaaaatgcgtaatgttagcccgtcctaatattggtacgtgtctataagtttggcatagtagaataatagacgtgtttaaatgccttccaaagtttaagaattctattagagtattgcattttgatagtttatcgcctacatcatcaaaaataagtaaaaagtgtgctgattttttatgattttgtgcgacagcaatacatttttctatgttacttttagttcgtatcagattatattctagagattcctgactactaacgaaattaatatgatttggccaaatgtatccatcataatctgggttataaacgggtgtaaacaagaatatatgtttatattttttaactagtgtagaaaacagagatagtaaatagatagtttttccagatccagatcctcctgttaaaaccattctaaacggcatttttaataaattttctcttgaaaattgtttttcttggaaacaattcataattatatttacagttactaaattaatttgataataaatcaaaatatggaaaactaaggttgttagtagggaggagaacaaagaaggcacatcgtgatataaataacatttattatcatgatgacaccagaaaacgacgaagagcagacatctgtgttctccgctactgtttacggagacaaaattcagggaaagaataaacgcaaacgcgtgattggtctatgtattagaatatctatggttatttcactactatctatgattaccatgtccgcgtttctcatagtgcgcctaaatcaatgcatgtctgctaacgaggctgctattactgacgccgctgttgccgttgctgctgcatcatctactcatagaaaggttgcgtctagcactacacaatatgatcacaaagaaagctgtaatggtttatattaccagggttcttgttatatattacattcagactaccagttattctcggatgctaaagcaaattgcactgcggaatcatcaacactacccaataaatccgatgtcttgactacctggctcattgattatgttgaggatacatggggatctgatggtaatccaattacaaaaactacatccgattatcaagattctgatgtatcacaagaagttagaaagtatttttgtgttaaaacaatgaactaatatttatttttgtacattaataaatgaaatcgcttaatagacaaactgtaagtaggtttaagaagttgtcggtgccggccgctataatgatgatactctcaaccattattagtggcataggaacatttctgcattacaaagaagaactgatgcctagtgcttgcgccaatggatggatacaatacgataaacattgttatttagatactaacattaaaatgtctacagataatgcggtttatcagtgtcgtaaattacgagctagattgcctagacctgatactagacatctgagagtattgtttagtattttttataaagattattgggtaagtttaaaaaagaccaatgataaatggttagatattaataatgataaagatatagatattagtaaattaacaaattttaaacaactaaacagtacgacggatgctgaagcgtgttatatatacaagtctggaaaactggttaaaacagtatgtaaaagtactcaatctgtactatgtgttaaaaaattctacaagtgacaacaaaaaatgaattaataataagtcgttaacgtacgccgccatggacgccgcgtttgttattactccaatgggtgtgttgactataacagatacattgtatgatgatctcgatatctcaatcatggactttataggaccatacattataggtaacataaaaactgtccaaatagatgtacgggatataaaatattccgacatgcaaaaatgctactttagctataagggtaaaatagttcctcaggattctaatgatttggctagattcaacatttatagcatttgtgccgcatacagatcaaaaaataccatcatcatagcatgcgactatgatatcatgttagatatagaagataaacatcagccattttatctattcccatctattgatgtttttaacgctacaatcatagaagcgtataacctgtatacagctggagattatcatctaatcatcaatccttcagataatctgaaaatgaaattgtcgtttaattcttcattctgcatatcagacggcaatggatggatcataattgatgggaaatgcaatagtaattttttatcataaaagttgtaaagtaaataataaaacaataaatattgaactagtagtacgtatattgagcaatcagaaatgatgctggtacctcttatcacggtgaccgtagttgcgggaacaatattagtatgttatatattatatatttgtaggaaaaagatacgtactgtctataatgacaataaaattatcatgacaaaattaaaaaagataaagagttctaattccagcaaatctagtaaatcaactgatagcgaatcagactgggaggatcactgtagtgctatggaacaaaacaatgacgtagataatatttctaggaatgagatattggacgatgatagcttcgctggtagtttaatatgggataacgaatccaatgttatggcgcctagcacagaacacatttacgatagtgttgctggaagcacgctgctaataaataatgatcgtaatgaacagactatttatcagaacactacagtagtaattaatgaaacggagactgttgaagtacttaatgaagataccaaacagaatcctaactattcatccaatcctttcgtaaattataataaaaccagtatttgtagcaagtcaaatccgtttattacagaacttaacaataaatttagtgagaataatccgtttagacgagcacatagcgatgattatcttaataagcaagaacaagatcatgaacacgatgatatagaatcatcggtcgtatcattggtgtgattagtttcctttttataaaattgaagtaatatttagtattattgctgccgtcacgttgtacaaatggagatattccctgtattcggcatttctaaaattagcaattttattgctaataatgactgtagatattatatagatacagaacatcaaaaaattatatctgatgagatcaatagacagatggatgaaacggtacttcttaccaacatcttaagcgtagaagttgtaaatgacaatgagatgtaccatcttattcctcatagattatcgacgattatactctgtattagttctgtcggaggatgtgttatctctatagataatgacatcaatggcaaaaatattctaacctttcccattgatcatgctgtaatcatatccccactgagtaaatgtgtcgtagttagcaagggtcctacaaccatattggttgttaaagcggatatacctagcaaacgattggtaacatcgtttacaaacgacatactatatgtaaacaatctgtcactgattaattatttgccgttgtctgtattcattattagacgagtcaccgactatttggatagacacatatgcgatcagatatttgctaataataagtggtattcccttataaccatcgacgataagcaatatcctattccatcaaactgtataggtatgtcctctgccaagtacataaattctagcatcgagcaagatactttaatccatgtttgtaacctcgagcatccgttcgactcagtatacaaaaaaatgcagtcgtacaattctctacctatcaaggaacaaatattgtacggtagaattgataatataaatatgagcattagtatttctgtggattaatagatttctagtatggggatcattaatcatctctaatctctaaatacctcataaaacgaaaaaaaagctattatcaaatactgtacggaatggattcattctcttctctttttatgaaactctgttgtatatctactgataaaactggaagcaaaaaatctgatagaaagaataagaataagatcaaggattatatggaacacgattattataaaataacaatagttcctggttcctcttccacgtctactagctcgtggtattatacacatgcctagtaatagtctctttgcgttgacggaaagcagactagaaataacaggctaaaatgttcagacaccataatagttcccaacccagataataacagagttccatcaacacattcctttaaactcaatcccaaacccaaaaccgttaaaatgtatccggccaattgatagtagataatgaggtgtacagcgcatgataatttacacagtaaccaaaatgaaaatactttagtaattataagaaatatagacggtaatgtcatcatcaacaatccgataatatgcctgagagtaaacattgacggataaaacaaaaatgctccgcataactctatcatggcaataacacaaccaaatacttgtaagattcctaaattagtagaaaatacaacgaatatcgatgtataagtgatctcgagaaataataagaataaagtaatgcccgtaaagataaacatcaacattgtttggtaatcattaaaccaattagtatgaagttgaactaatttcacagtagattttattccagtgttatcctcgcatgtataagtacctggtaagatatctttatattccataatcaatgagacatcactatctgataacgaatgaagtctagcactagtatgccatttacttaatattgtcgtcttggaagttttattataagttaaaatatcatggttatccaatttccatctaatatactttgtcggattatctatagtacacggaataatgatggtatcattacatgctgtatactctatggtctttgtagttgttataacaaccaacgtatagaggtatatcaacgatattctaactcttgacattttttatttatttaaaatgatacctttgttatttattttattctattttgctaacggtattgaatggcataagtttgaaacgagtgaagaaataatttctacttacttattagacgacgtattatacacgggtgttaatggggcggtatacacattttcaaataataaactaaacaaaactggtttaactaataataattatataacaacatctataaaagtagaggatgcggataaggatacattagtatgcggaaccaataacggaaatcccaaatgttggaaaatagacggttcagacgacccaaaacatagaggtagaggatacgctccttatcaaaatagcaaagtaacgataatcagtcacaacggatgtgtactatctgacataaacatatcaaaagaaggaattaaacgatggagaagatttgacggaccatgtggttatgatttattcacggcggataacgtaattccaaaagatggtttacgaggagcattcgtcgataaagacggtacttatgacaaagtttacattcttttcactgatactatcggctcaaagagaattgtcaaaattccgtatatagcacaaatgtgcctaaacgacgaaggtggtccatcatcattgtctagtcatagatggtcgacgtttctcaaagtcgaattagaatgtgatatcgacggaagaagttatagacaaattattcattctagaactataaaaacagataatgatacgatactatatgtattcttcgatagtccttattccaagtccgcattatgtacctattctatgaataccattaaacaatctttttctacgtcaaaattggaaggatatacaaagcaattgccgtctccagctcctggtatatgtttaccagctggaaaagttgttccacataccacgtttgaagtcatagaacaatataatgtactagatgatattataaagcctttatctaaccaacctatcttcgaaggaccgtctggtgttaaatggttcgatataaaggagaaggaaaatgaacatcgggaatatagaatatacttcataaaagaaaattctatatattcgttcgatacaaaatctaaacaaactcgtagctcgcaagtcgatgcgcgactattttcagtaatggtaactgcgaaaccgttatttatagcagatatagggataggagtaggaatgccacaaatgaaaaaaatacttaaaatgtaatcttaatcgagtacaccacacgacaatgaacaaacataagacagattatgctggttatgcttgctgcgtaatatgcggtctaattgtcggaattatttttacagcgacactattaaaagttgtagaacgtaaattagttcatacaccattaatagataaaacgataaaagatgcatatattagagaagattgtcctactgactggataagctataataataaatgtatccatttatctactgatcgaaaaacctgggaggaaggacgtaatgcatgcaaagctctaaattcaaattcggatctaattaagatagagactccaaacgagttaagttttttaagaagccttagacgaggctattgggtaggagaatccgaaatattaaaccagacaaccccatataattttatagctaagaatgccacgaagaatggaactaaaaaacggaaatatatttgtagcacaacgaatactcccaaactgcattcgtgttacactatataacaattacactacatttttatcataccactacttcggttagatgttttagaaaaaaataaatatcgccgtaccgttcttgtttttataaaaataacaattaacaattatcaaattttttctttaatattttacgtggttgaccattcttggtggtaaaataatctcttagtgttggaatggaatgctgtttaatgtttccacactcatcgtatattttgacgtatgtagtcacatcgtttacgcaatagtcagactgtagttctatcatgcttcctacatcagaaggaggaacagttttaaagtctcttggttttaatctattaccgttagttttcatgaaatcctttgttttatccacttcacattttaaataaatgtccactatacattcttttgttaattttactagatcgtcatgggtcatagaatttataggttccgtagtccatggatccaaactagcaaacttcgcgtatacggtatcgcgattagtgtatacaccaactgtatgaaaattaagaaaacagtttaataaatcaacagaaatatttaatcctccgtttgatacagatgcgccatatttatggatttcggattcacacgttgtttgtctgaggtgttcgtctagtgttgcttctacgtaaacttcgattcccatatattctttattgtcagaatcgcataccgatttatcatcatacactgtttgaaaactaaatggtatacacatcaaaataataaataataacgagtacattctgcaatattgttatcgtaattggaaaaatagtgttcgagtgagttggattatgtgagtattggattgtatattttattttatattttgtaataagaataaaatgctaatgtcaagtttattccaatagatgtcttattaaaaacatatataataaataacaatggctgaatggcataaaattatcgaggatatctcaaaaaataataagttcgaggatgccgccatcgttgattacaagactacaaagaatgttctagctgctattcctaacagaacatttgccaagattaatccgggtgaaattattcctctcatcactaatcgtaatattctaaaacctcttattggtcagaaatattgtattgtatatactaactctctaatggatgagaacacgtatgctatggagttgcttactgggtacgcccctgtatctccgatcgttatagcgagaactcataccgcacttatatttttgatgggtaagccaacaacatccagacgtgacgtgtatagaacgtgtagagatcacgctacccgtgtacgtgcaactggtaattaaaataaaaagtaatattcatatgtagtgtcaattttaaatgatgatgatgaaatggataatatccatattgacgatgtcaataatgccggtattggcatacagttcatcgatttttagatttcattcagaggatgtggaattatgttatgggcatttgtattttgataggatctataatgtagtaaatataaaatataatccgcatattccatatagatataattttattaatcgcacgttaaccgtagatgaactagacgataatgtcttttttacacatggttattttttaaaacacaaatatggttcacttaatcctagtttgattgtctcattatcaggaaacttaaaatataatgatatacaatgctcagtaaatgtatcgtgtctcattaaaaatttggcaacgagtacatctactatattaacatctaaacataagacttattctctacatcggtccacgtgtattactataataggatacgattctattatatggtataaagatataaatgacaagtataatgacatctatgattttactgcaatatgtatgctaatagcgtctacattgatagtgaccatatacgtgtttaaaaaaataaaaatgaactcttaattatgctatgctattagaaatggataaaatcaaaattacggttgattcaaaaattggtaatgttgttaccatatcgtataacttggaaaagataactattgatgtcacacctaaaaagaaaaaagaaaaggatgtattattagcgcaatcagttgctgtcgaagaggcaaaagatgtcaaggtagaagaaaaaaatattatcgatattgaagatgacgatgatatggatgtagaaagcgcgtaatacgatctataaaaataagtatataaatactttttatttactgtactcttactgtgtagtggtgataccctactcgattatttttttaaaaaaaaaatacttattctgattcttctagccatttccgtgttcgtttgaatgccacatcgacgtcaaagataggggagtagttgaaatctagttctgcattgttggtacgcacctcaaatgtagtgttggatatcttcaacgtatagttgttgagtagtgatggttttctaaatagaattctcttcatatcattcttgcacgcgtacatttttagcatccatcttggaatcctagatccttgttctattcccaatggtttcatcaatagaagattaaacatatcgtacgaacacgatggagagtaatcgtagcaaaagtaagcatttcctttaatcttagatcccggatactggatatattttgcagccaacacgtgcatccatgcagcatttcctacatatacccggctatgcaccgcgtcatcatcgactgtacgatacataatgttaccgtgttgcttacattgctcgtaaaagactttcatcaatttgtctccttctccgtaaattccagtgggtcttaggcaacaagtatacaattttgctccattcatgattacggaattattggctttcataaccagttgctcggccatacgtttactttttgcgtatacatgtcctggtgatatatcataaagggtatgctcatggccgatgaatggatcaccgtgtttattgggtcctattgcttccatgctactagtatagatcaaatacttgattcctaggtccacacaagctgccaaaatagtctgtgttccataatagtttactttcatgatttcattatcggtgtattttccaaatacatccactagagcagccgtatgaataatcagatttaccccatctagcgcttctctcaccttatcaaagtcgtttatatcacattgtatatagtttataaccttaactttcgaggttattggttgtggatcttctacaatatctatgactctgatttcttgaacatcatctgcactaattaacagttttactatatacctgcctagaaatccggcaccaccagtaaccgcgtacacggccattgctgccactcataatatcagactacttattctattttactaaataatggctgtttgtataatagaccacgataatatcagaggagttatttactttgaaccagtccatggaaaagataaagttttaggatcagttattggattaaaatccggaacgtatagtttgataattcatcgttacggagatattagtcaaggatgtgattccataggcagtccagaaatatttatcggtaacatctttgtaaacagatatggtgtagcatatgtttatttagatacagatgtaaatatatttacaattattggaaaggcgttatctatttcaaaaaatgatcagagattagcgtgtggagttattggtatttcttacataaatgaaaagataatacattttcttacaattaacgagaatggcgtttgatatatcagttaatgcgtctaaaacaataaatgcattagtttacttttctactcagcaaaataaattagtcatacgtaatgaagttaatgatacacactacactgtcgaatttgatagggacaaagtagttgacacgtttatttcatataatagacataatgacaccatagagataagaggggtgcttccagaggaaactaatattggttgcgcggttagtatgacttacttgtataataagtatagttttaaactgattttagcagaatatataagacacagaaatactatatccggcaatatttattcggcattgatgacactagatgatttggctattaaacagtatggagacattgatctattatttaatgagaaacttaaagtagactccgattcgggactatttgactttgtcaactttgtaaaggatatgatatgttgtgattctagaatagtagtagctctatctagtctagtatctaaacattgggaattgacaaataaaaaatataggtgtatggcattagccgaacatatatctgatagtattccaatatctgagctatctagactacgatacaatctatgtaagtatctacgcggacacactgagagcatagaggataaatttgattattttgaagacgatgattcgtctacatgttctgccgtaaccgacagggaaacggatgtataattttttttatagcgtgaaggatatgataaaaaatataattgttgtatttatcccattccaatcaccttatatgattctgtaacacaataaaggagtcttatagatgtatagaggtcagatactggtttgataaactgtttattccacataagtatgtttgactttatggttagacccgcatactttaacaaatcactgaaaattggagttaggtattgacctctcagaatcagttgccgttctggaacattaaatgtattttttatgatatactccaacgcatttatgtgggcatacaacaagtcattactaatggaatattccaagagttttagttgtctagtatttaacaagagaagagatttcaacagactgtttatgaactcgaatgccgcctcattgtcgcttatattgatgatgtcgaattctcccaatatcatcaccgatgagtagctcatcttgttatcgggatccaagttttctaaagatgtcattaaaccctcgatcatgaatggatttatcatcatcgtttttatgttggacatgagcttagtccgtttgtccacatctatagaagatgatttctgaattatttcatatatctctctctttaactccaggaacttgtcaggatggtctactttaatatgttctcgtctaagagatgaaaatctttggatggttgcacgcgacttttctctaaaggatgacgttgcccaagatcctctcttaaatgaatccatcttatccttggacaagatggacagtctattttccttagatggtttaatatttttgttacccatgatctataaaggtagacctaatcgtctcggatgaccatatatttattttcagttttattatacgcataaattgtaaaaaatatgttaggtttacgaaaatgtctcgtggggcattaatcgtttttgaaggattggacaaatctggaaaaacaacacaatgtatgaacatcatggaatcaataccttcaaacacaataaaataccttaactttcctcagagatccactgtcactggaaagatgatagatgactatctaactcgtaaaaaaacctataatgatcatatagttaatctattattttgtgcaaatagatgggagtttgcatcttttatacaagaacaactagaacagggaattactttaatagttgatagatacgcattttctggagtagcgtatgccgccgctaaaggcgcgtcaatgactctcagtaagagttatgaatctggattgcctaaacccgacttagttatattcttggaatctggtagcaaagaaattaatagaaacgtcggtgaggaaatttatgaagatgttacattccaacaaaaggtattacaagaatataaaaaaatgattgaagaaggagatattcattggcaaattatttcttctgaattcgaggaagatgtaaagaaggagttgattaagaatatagttatagaggctatacacacggttactggaccagtggggcaactgtggatgtaatagtgaaattacattttttataaatagatgttagtacagtgttataaatggatgaagcatattactctggcaacttggaatcagtactcggatacgtgtccgatatgcataccgaactcgcatcaatatctcaattagttattgccaagatagaaactatagataatgatatattaaacaaggacattgtaaattttatcatgtgtagatcaaacttggataatccatttatctctttcctagatactgtatatactattatagatcaagagaactatcagactgagttgattaattcattagacgacaatgaaattatcgattgtatagttaataagtttatgagcttttataaggataacctagaaaatatagtagatgctatcattactctaaaatatataatgaataatccagattttaaaactacgtatgccgaagtactcggttccagaatagccgatatagatattaaacaagtgatacgtaagaatatactacaattgtctaataatatccgcgaacgatatttgtgaaaatattaaaaaaaaatactttttttattaaatgacgtcttttcgtgaatttagaaaattatgctgtgctatatatcacgcatcaggatataaagaaaaatctaaattaattagagactttataacagatagggatgataaatatttgatcattaagctattgcttcccggattagacgatagaatttataacatgaacgataaacaaattataaaattatatagtataatatttaaacaatctcaggaagatatgctacaagatttaggatacggatatataggagacactattaggactttcttcaaagagaacacagaaatccgtccacgagataaaagcattttaactttagaagaagtggatagttttttaactacgttatcatccgtaactaaagaatcgcatcaaataaaattattgactgatgtagcatctgtttgtacatgtaatgatttaaaatgtgtagtcatgcttattgataaagatctaaaaattaaagcgggtcctcggtacgtacttaacgctattagtcctaatgcctatgatgtgtttagaaaatctaataacttgaaagagataatagaaaattcatctaaacaaaatctagactctatatctatttctgttatgactccaattaatcccatgttagcggaatcgtgtgattctgtcaataaggcgtttaaaaaatttccatcaggaatgtttgcggaagtcaaatacgatggtgaaagagtacaagttcataaaaataataacgagtttgccttctttagtagaaacatgaaaccagtactctctcataaagtggattatctcaaagaatacataccgaaagcatttaaaaaagctacgtctatcgtattggattctgaaattgttcttgtagacgaacataatgtaccgctcccgtttggaagtttaggtatacacaaaaagaaagaatataaaaactctaacatgtgtttgttcgtgtttgactgtttgtactttgatggattcgatatgacggacattccattgtacgaacgaagatcttttctcaaagatgttatggttgaaatacccaatagaatagtattctcagagttgacgaatattagtaacgagtctcagttaactgacgtattggatgatgcactaacgagaaaattagaaggattggtcttaaaagatattaatggagtatacgaaccgggaaagagaagatggttaaaaataaagcgagactatttgaacgagggttccatggcagattctgccgatttagtagtactaggtgcctactatggtaaaggagcaaagggtggtatcatggcagtctttctaatgggttgttacgacgatgaatccggtaaatggaagacggttaccaagtgttcaggacacgatgataatacgttaagggagttgcaagaccaattaaagatgattaaaattaacaaggatcccaaaaaaattccagagtggttagtagttaataaaatctatattcccgattttgtagtagaggatccgaaacaatctcagatatgggaaatttcaggagcagagtttacatcttccaagtcccataccgcaaatggaatatccattagatttcctagatttactaggataagagaggataaaacgtggaaagaatctactcatctaaacgatttagtaaacttgactaaatcttaatagttacatacaaactgaaaattaaaataacactatttagttggtggtcgccatggatggtgttattgtatactgtctaaacgcgctagtaaaacatggcgaggaaataaatcatataaaaaatgatttcatgattaaaccatgttgtgaaagagtttgtgaaaaagtcaagaacgttcacattggcggacaatctaaaaacaatacagtgattgcagatttgccatatatggataatgcggtatccgatgtatgcaattcactgtataaaaagaatgtatcaagaatatccagatttgctaatttgataaagatagatgacgatgacaagactcctactggtgtatataattattttaaacctaaagatgccattcctgttatcatatctataggaaaggataaagatgtctgtgaactattaatctcatcagacatatcgtgtgcatgcgtggagttaaattcatatcacgtagccattcttcccatggatgtttccttttttaccaaaggaaatgcatcattgattattctcctgtttgatttctctatcgatgcggcacctctcttaagaagtgtaaccgataataatgttattatatctagacaccagcgtctacatgacgagcttccgagttccaattggttcaagttttacataagtataaagtccgactattgttctatattatatatggttgttgatggatctgtgatgcatgcgatagctgataatagaactcacgcaattattagcaaaaatatattagacaatactacgattaacgatgagtgtagatgctgttattttgaaccacagattaggattcttgatagagatgagatgctcaatggatcatcgtgtgatatgaacagacattgtattatgatgaatttacctgatgtaggcgaatttggatctagtatgttggggaaatatgaacctgacatgattaagattgctctttcggtggctggtaatttaataagaaatcgagactacattcccgggagacgaggatatagctactacgtttacggtatagcctctagataatttttttaagcacgaaataaaaaacataattttaaaccaatctatttcatactattttgtgtgatcaccatggacataaagatagatattagtatttctggtgataaatttacggtgactactaggagggaaaatgaagaaagaaaaaaatatctacctctccaaaaagaaaaaactactgatgttatcaaacctgattatcttgagtacgatgacttgttagatagagatgagatgtttactattctagaggaatattttatgtacagaggtctattaggcctcagaataaaatatggacgactctttaacgaaattaaaaaattcgacaatgatgcggaagaacaattcggtactatagaagaactcaagcagaaacttagattaaattctgaagagggagcagataactttatagattatataaaggtacaaaaacaggatatcgtcaaacttactgtatacgattgcatatctatgataggattgtgtgcatgcgtggtagatgtttggagaaatgagaaactgttttctagatggaaatattgtttacgagcgattaaactgtttattgatgatcacatgcttgataagataaaatctatactgcagaatagactagtatatgtggaaatgtcatagaaagttaaaagttaatgagagcaaaaatatataaggttgtattccatatttgttatttttttctgtaatagttagaaaaatacattcgatggtctatctatcagattattatgtgttataaggtactttttctcataataaactagagtatgagtaagatagtgtttttcaaaacatataaatctaaaattgatggatgagatatacagctattaatttcgaaaatatattttaatctgataactttaaacatggatttttaatggtggtttaacgttttaaaaaaagattttgttattgtagtatatgataatattaaaagatggatataaagaatttgctgactgcatgtactattttttacattactacattggctacggcagatatacctacttcgtcactgccacacgctccggtaaacggggcatgtgacgagggagaatatcttgataagaggcataatcaatgttgtaatcagtgtccacctggagaatttgccaaggttagatgtaatggtaacgataacacaaaatgtgaacgctgcccacctcatacatataccgcaatccccaattactctaatggatgtcatcaatgtagaaaatgcccaacaggatcatttgataaggtaaagtgtaccggaacacagaacagtaaatgttcgtgtcttcctggttggtattgcgctactgattcttcacagactgaagattgtcgagattgtataccaaaaaggagatgtccatgcggatactttggtggaatagatgaacaaggaaatcctatttgtaaatcgtgttgtgttggtgaatattgcgactacctacgtaattatagacttgatccatttcctccatgcaaactatctaaatgtaattaattatgattttgatgataatgttaccatacattatatcgctacttggttagtgtattattcagtatgaagacctattaataattacttatcttttgacgatcttgttataattataatataaaaatacttatggcatagtaactcataattgctgacgcgataaattcgtaataatctgttttgttcaaatttttataaggaatctacaggcataaaaataaaaatataatttataatatactcttacagcgcgccatcatgaataacagcagtgaattgattgctgttattaatggatttagaaatagtggacgattttgtgatattaatatagttattaatgatgaaaggataaacgctcacagactcatcctatctggagcctccgaatatttttccattctgttttccaataattttatcgattctaatgaatacgaagttaatctaagtcatttagattatcaaagtgttaacgatttgatcgattacatttatgggatacctttgagcctaactaacgataacgtgaaatatattctttcaaccgctgattttttacaaattggatctgctattacggagtgtgaaaattacatacttaaaaatctttgttctagaaactgtatcgatttctacatatacgctgataaatataataacaagaaaatagaatcagcgtcgtttaacacaatattacaaaatattttgagactcatcaacgatgaaaactttaaatacttaacagaggaatcaatgataaaaattttaagcgatgatatgttaaatataaaaaatgaggatttcgccccactaattctcattaaatggttagagagtactcaacaaccatgcaccgtcgagttacttaaatgcctcagaatatcattgctttccccacaagttataaaatcactttatagtcatcgactggttagttcaatctacgaatgtataacattcttaaacaatatagcattcttggatgaatcatttcctagataccatagcatcgagttgatatctatcggtataagtaattcgcatgataagatttccataaactgctacaatcataaaaaaaatacatgggaaatgatatcttcacgtagatataggtgtagtttcgcagtggccgtcctggataatattatctatatgatgggtggatatgatcagtccccgtatagaagttcaaaggttatagcgtacaatacatgtacaaattcttggatatatgatataccagagctaaaatatcctcgttctaattgtgggggactggctgatgacgaatacatttattgtataggcggcatacgcgatcaggattcatcgttgacatctagtattgatagatggaagccatcaaaaccatattggcagaagtatgctaaaatgcgcgaaccaaaatgtgatatgggggttgcgatgttaaacggattaatatatgttataggtggaatcgttaaaggtgacacgtgtaccgacgcactagagagtttatcagaagatggatggatgaagcatcaacgtcttccaataaaaatgtccaatatgtcgacgattgttcatgatggcaagatttatatatctggaggttacaacaatagtagtgtagttaatgtaatatcgaatctagtccttagctataattcgatatatgatgaatggaccaaattatcatcattaaacattcctagaattaatcccgctctatggtcagcgcataataaattatatgtaggaggaggaatatctgatgatgttcgaactaatacatctgagacatacgacaaagaaaaagattgttggacattggataatggtcacgtgttaccacgcaattatataatgtataaatgcgaaccgattaaacataaatatccattggaaaaaacacagtacacgaatgattttctaaagtatttggaaagttttataggtagttgatagaacaaaatacataattttgtaaaaataaatcactttttatactaatatgacacgattaccaatacttttgttactaatatcattagtatacgctacaccttttcctcagacatctaaaaaaataggtgatgatgcaactctatcatgtaatcgaaataatacaaatgactacgttgttatgagtgcttggtataaggagcccaattccattattcttttagctgctaaaagcgacgtcttgtattttgataattataccaaggataaaatatcttacgactctccatacgatgatctagttacaactatcacaattaaatcattgactgctagagatgccggtacttatgtatgtgcattctttatgacatcaactacaaatgacactgataaagtagattatgaagaatactccacagagttgattgtaaatacagatagtgaatcgactatagacataatactatctggatctacacattcaccggaaactagttctgagaaacctgattatatagataattctaattgctcgtcggtattcgaaatctaagctcaaaaattgaaaaactagcgtctttttttgctcgaagtcgaccaccatggtgggtgaggatagcgtgctgatcaccgagaacatgcacatgaaactgtacatggagggcaccgtgaacgaccaccacttcaagtgcacatccgagggcgaaggcaagccctacgagggcacccagaccatgaagatcaaggtggtcgagggcggccctctccccttcgccttcgacatcctggctaccagcttcatgtacggcagcaaaacctttatcaaccacacccagggcatccccgacttctttaagcagtccttccctgagggcttcacatgggagaggatcaccacatacgaagacgggggcgtgctgaccgctacccaggacaccagcctccagaacggctgcctcatctacaacgtcaagatcaacggggtgaacttcccatccaacggccctgtgatgcagaagaaaacactcggctgggaggccagcaccgagatgctgtaccccgctgacagcggcctgagaggccatagccagatggccctgaagctcgtgggcgggggctacctgcactgctccctcaagaccacatacagatccaagaaacccgctaagaacctcaagatgcccggcttctacttcgtggacaggagactggaaagaatcaaggaggccgacaaagagacctacgtcgagcagcacgagatggctgtggccaggtactgcgacctgcctagcaaactggggcacagctgattaattaatttttatcgatctaattcaacaatgtctggagagcttcgcaggatcccgactccggaaccaattactgataaagaagatcatacagttacagacactgtctcatacactacagtaagtacatcatctggaattgtcactactaaatcaaccaccgatgatgcggatctttatgatacgtacaatgataatgatacagtaccaccaactactgtaggcggtagtacaacctctattagcaattataaaaccaaggactttgtagaaatatttggtattaccgcattaattatattgtcggccgtggcaattttctgtattacatattatatatataataaacgttcacgtaaatacaaaacagagaacaaagtctagatttttgacttacataaatgtctgggatagtaaaatctatcatattgagcggaccatctggtttaggaaagacagccatagccaaaagactatgggaatatatttggatttgtggtgtcccataccactagatttcctcgtcctatggaacgagaaggtgttgattaccattacgttaacagagaggccatctggaagggaatagccgccggaaactttctagaacatactgagtttttaggaaatatttacggaacttctaaaacagctgtgaatacagcggctattaataatcgtatttgtgtgatggatctaaacatcgacggtgttagaagtcttaaaaatacgtacctaatgccttactcggtgtatataagacctacctctcttaaaatggttgagaccaagcttcgtcgtagaaacactgaagctaacgatgagattcatcgtcgtgtgatgttggcaaaaactgacatggatgaggcaggtgaagccggtctattcgacactattatcattgaagatgatgtgaatttagcatatagtaagttaattcagatactacaggaccgtattagaatgtattttaacactaattagagacttaagacttaaaacttgataattaataatataactcgtttttatatgtgtctatttcaacgtctaatgtattagttaaatattaaaacttaccacgtaaaacttaaaatttaaaatgatatttcattgacagatagatcacacattatgaactttcaaggacttgtgttaactgacaattgcaaaaatcaatgggtcgttggaccattaataggaaaaggtggattcggtagtatttatactactaatgacaataattatgtagtaaaaatagagcccaaagctaacggatcattatttaccgaacaggcattttatactagagtacttaaaccatccgttatcgaagaatggaaaaaatctcacaatataaagcacgtaggtcttatcacgtgcaaggcatttggtctatacaaatccattaatgtggaatatcgattcttggtaattaatagattaggtgcagatctagatgcggtgatcagagccaataataatagactaccaaaaaggtcggtgatgttgatcggaatcgaaatcttaaataccatacaatttatgcacgagcaaggatattctcacggagatattaaagcgagtaatatagtcttagatcaaatagataagaataaattatatctagtggattacggattggtttctaaattcatgtctaatggcgaacatgttccatttataagaaatccaaataaaatggataacggtactctagaatttacacctatagattcgcataaaggatacgttgtatctagacgtggagatctagaaacacttggatattgtatgattagatggttgggaggtatcttaccatggactaagatatctgaaacaaagaattgtgcattagtaagtgccacaaaacagaaatatgttaacaatactgcgactttgttaatgaccagtttgcaatatgcacctagagaattgctgcaatatattaccatggtaaactctttgacatattttgaggaacccaattacgacaagtttcggcacatattaatgcagggtgtatattattaagtgtggtgtttggtcgataaaaattaaaaaataacttaatttattattgatctcgtgtgtacaaccgaaatcatggcgatgttttacgcacacgctctcggtgggtacgacgagaatcttcatgcctttcctggaatatcatcgactgttgccaatgatgtcaggaaatattctgttgtgtcagtttataataacaagtatgacattgtaaaagacaaatatatgtggtgttacagtcaggtgaacaagagatatattggagcactgctgcctatgtttgagtgcaatgaatatctacaaattggaaatccgatccatgatcaagaaggaaatcaaatctctatcatcacatatcgccacaaaaactactatgctctaagcggaatcgggtacgagagtctagacttgtgtttggaaggagtagggattcatcatcacgtacttgaaacaggaaacgctgtatatggaaaagttcaacatgattattctactatcaaagagaaggccaaagaaatgagtgcacttagtccaggacctatcatcgattaccacgtctggataggagattgtatctgtcaagttactgctgtggacgtacatggaaaggaaattatgaaaatgagattcaaaaagggtgcggtgcttccgatcccaaatctggtaaaagttaaacttggggagaatgatacagaaaatctttcttctactatatcggcggcaccatcgaggtaaccacctctctggaagacagcgtgaatcatgtactcatgaaacgtttggaaactatacgccatatgtggtctgttgtatatgatcattttgatattgtgaatggtaaagaatgctgttatgtgcatacgcattcatctaatcaaaatcctataccgagtactgtaaaaacaaatttgtacatgaagactatgggatcatgcattcaaatggattccatggaagctctagagtatcttagcgaactgaaggaatcaggtggatggagtcccagaccagaaatgcaggaatttgaatatccagatggagtggaagacactgaatcaattgagagattggcagaggagttcttcaatagatcagaacttcaggctggtgaatcagtcaaatttggtaattctattaattgttaaacatacatctgtttcagctaagcaactaagaacacgtatacggcagcagcttccttctatactctcatcttttaccaacacaaagggtggatatttgttcattggagttgataataatacacacaaagtatttggattcacggtgggttacgactacctcagactgatagagaatgatatagaaaagcatatcaaaagacttcgtgttgtgcatttctgtgagaagaaagaggacatcaagtacgcgtgtcgattcatcaaggtatataaacctggggatgagactacctcgacatacgtgtgcgctatcaaagtggaaagatgctgttgtgctgtgtttgcagattggccagaatcatggtatatggatactaatggtatcaagaagtattctccagatgaatgggtgtcacatataaaattttaattaatgtaactatagagaacaaataataaggttgtaatatcatatagacaataactaacaattaattagtaactgttatctcttttttaactaaccaactaactatatacctattaatacatcgtaattatagttcttaacatctattaatcattaattcgcttctttaattttttataaactaacattgttaattgaaaagggataacatgttacagaatataaattatatatggatttttttaaaaaggaaatacttgactggagtatatatttatctcttcattatatagcacgcgtgttttccaatttttccacatcccatataatacaggattataatctcgttcgaacatacgagaaagtggataaaacaatagttgattttttatctaggttgccaaatttattccatattttagaatatggggaaaatattctacatatttattctatggatgatgctaatacgaatattataattttttttctagatagagtattaaatattaataagaacgggtcatttatacacaatctcgggttatcatcatccattaatataaaagaatatgtatatcaattagttaataatgatcatccagataataggataagactaatgcttgaaaatggacgtagaacaagacattttttgtcctatatatcagatacagttaatatctatatatgtattttaataaatcatggattttatatagatgccgaagacagttacggttgtacattattacatagatgtatatatcactataagaaatcagaatcagaatcatacaatgaattaattaagatattgttaaataatggatcagatgtagataaaaaagatacgtacggaaacacaccttttatcctattatgtaaacacgatatcaacaacgtggaattgtttgagatatgtttagagaatgctaatatagactctgtagactttaatagatatacacctcttcattatgtctcatgtcgtaataaatatgattttgtaaagttattaatttctaaaggagcaaatgttaatgcgcgtaataaattcggaactactccattttattgtggaattatacacggtatctcgcttataaaactatatttggaatcagacacagagttagaaatagataatgaacatatagttcgtcatttaataatttttgatgctgttgaatctttagattatctattatccagaggagttattgatattaactatcgtactatatacaacgaaacatctatttacgacgctgtcagttataatgcgtataatacgttggtctatctattaaacaaaaatggtgattttgagacgattactactagtggatgtacatgtatttcggaagcagtcgcaaacaacaacaaaataataatggaagtactattgtctaaacgaccatctttgaaaattatgatacagtctatgatagcaattactaaacataaacagcataatgcagatttattgaaaatgtgtataaaatatactgcgtgtatgaccgattatgatactcttatagatgtacagtcgctacagcaatataaatggtatattttaagatgtttcgatgaaatagatatcatgaagagatgttatataaaaaataaaactgtattccaattagttttttgtatcaaagacattaatactttaatgagatacggtaaacatccttctttcgtgaaatgcactagtctcgacgtatacggaagtcgtgtacgtaatatcatagcatctattagatatcgtcagagattaattagtctattatccaagaagctggatcctggagataaatggtcgtgttttcctaacgaaataaaatataaaatattggaaaactttaacgataacgaactatccacatatctaaaaatcttataaacattattaaaatataaaatctaagtaggataaaatcacactacatcattgtttccttttagtgctcgacagtgtatactatttttaacgctcataaataaaaatgaaaacgatttccgttgttacgttgttatgcgtactacctgctgttgtttattcaacatgtactgtacccactatgaataacgctaaattaacgtctaccgaaacatcgtttaatgataaccagaaagttacgtttacatgtgatcagggatatcattctttggatccaaatgctgtctgtgaaacagataaatggaaatacgaaaatccatgcaaaaaaatgtgcacagtttctgattatgtctctgaactatataataaaccgctatacgaagtgaattccaccatgacactaagttgcaacggcgaaacaaaatattttcgttgcgaagaaaaaaatggaaatacttcttggaatgatactgttacgtgtcctaatgcggaatgtcaacctcttcaattagaacacggatcgtgtcaaccagttaaagaaaaatactcatttggggaatatatgactatcaactgtgatgttggatatgaggttattggtgcttcgtacataagttgtacagctaattcttggaatgttattccatcatgtcaacaaaaatgtgatatgccgtctctatctaacggattaatttccggatctacattttctatcggtggcgttatacatcttagttgtaaaagtggttttacactaacggggtctccatcatccacatgtatcgacggtaaatggaatcccatactcccaatatgtgtacgaactaacgaaaaatttgatccagtggatgatggtcccgacgatgagacagatttgagcaaactctcgaaagacgttgtacaatatgaacaagaaatagaatcgttagaagcaacttatcatataatcatagtggcgttgacaattatgggcgtcatatttttaatctccgttatagtattagtttgttcctgtgacaaaaataatgaccaatataagttccataaattgctaccgtaaatataaatccgttaaaataattaataatttaataacaaacaagtatcaaaagattaaagacttatagctagaatcaattgagatgtcttcttcagtggatgttgatatctacgatgccgttagagcatttttactcaggcactattataacaagagatttattgtgtatggaagaagtaacgccatattacataatatatacaggctatttacaagatgcgccgttataccgttcgatgatatagtacgtactatgccaaatgaatcacgtgttaaacaatgggtgatggatacacttaatggtataatgatgaatgaacgcgatgtttctgtaagcgttggcaccggaatactattcatggaaatgtttttcgattacaataaaaatagtatcaacaatcaactaatgtatgatataattaatagcgtatctataattctagctaatgagagatatagaagcgcttttaacgacgatggtatatacatccgtagaaatatgattaacaagttgtacggatacgcatctctaactactattggcacgatcgctggaggtgtttgttattatctgttgatgcatctagttagtttgtataaataattatttcaatatactagttaaaattttaagattttaaatgtataaaaaactaataacgtttttatttgtaataggtgcattagcatcctattcgaataatgagtacactccgtttaataaactgagtgtaaaactctatatagatggagtagataatatagaaaattcatatactgatgataataatgaattggtgttaaattttaaagagtacacaatttctattattacagagtcatgcgacgtcggatttgattccatagatatagatgttataaacgactataaaattattgatatgtataccattgactcgtctactattcaacgcagaggtcacacgtgtagaatatctaccaaattatcatgccattatgataagtacccttatattcacaaatatgatggtgatgagcgacaatattctattactgcagagggaaaatgctataaaggaataaaatatgaaataagtatgatcaacgatgatactctattgagaaaacatactcttaaaattggatctacttatatatttgatcgtcatggacatagtaatacatattattcaaaatatgatttttaaaaatttaaaatatattatcacttcagtgacagtagtcaaataacaaacaacaccatgagatatattataattctcgcagttttgttcattaatagtatacatgctaaaataactagttataagtttgaatccgtcaattttgattccaaaattgaatggactggggatggtctatacaatatatcccttaaaaattatggcatcaagacgtggcaaacaatgtatacaaatgtaccagaaggaacatacgacatatccgcatttccaaagaatgatttcgtatctttctgggttaaatttgaacaaggcgattataaagtggaagagtattgtacgggactatgcgtcgaagtaaaaattggaccaccgactgtaacattgactgaatacgacgaccatatcaatttgtacatcgagcatccgtatgctactagaggtagcaaaaagattcctatttacaaacgcggtgacatgtgtgatatctacttgttgtatacggctaacttcacattcggagattctaaagaaccagtaccatatgatatcgatgactacgattgcacgtctacaggttgcagcatagactttgtcacaacagaaaaagtgtgcgtgacagcacagggagccacagaagggtttctcgaaaaaattactccatggagttcgaaagtatgtctgacacctaaaaagagtgtatatacatgcgcaattagatccaaagaagatgttcccaatttcaaggacaaaatggccagagttatcaagagaaaatttaatacacagtctcaatcttatttaactaaatttctcggtagcacatcaaatgatgttaccacttttcttagcatgcttaacttgactaaatattcataactaatttttattaatgatacaaaaacgaaataaaactgcatattatacactggttaacgcccttataggctctaaccattttcaagatgaggtccctgattatagtccttctgttcccctctatcatctactccatgtctattagacgatgtgagaagactgaagaggaaacatggggattgaaaatagggttgtgtataattgccaaagatttctatcccgaaagaactgattgcagtgttcatctcccaactgcaagtgaaggattgataactgaaggcaatggattcagggatatacgaaacaccgataaattataaaaaaagcaatgtgtccgctgtttccgttaataatactattttcgtaactggcggattattcataaataactctaatagcacgatcgtggttaacaatatggaaaaacttgacatttataaagacaaacaatggtcgattatagaaatgcctatggctagggtatatcacggcattgactcgacatttggaatgttatattttgccggaggtctatccgttaccgaacaatatggtaatttagagaaaaacaacgagatatcttgttacaatcctagaacgaataagtggtttgatatttcatatactatttataagatatccatatcatcattgtgtaaactaaataacgtcttctatgtatttagtaaggacattggatatgtggaaaagtatgatggtgcatggaagttagtacatgatcgtctccccgctataaaggcattatcaacttctccttattgattgaaaatgaaaatataaatagtttttatgtatagcagtattaccctatagttttattgcttactactaacatggatacagatgttacaaatgtagaagatatcataaatgaaatagatagagagaaagaagaaatactaaaaaatgtagaaattgaaaataataaaaacattaacaagaatcatcccaatgaatatattagagaagcactcgttattaataccagtagtaatagtgattccattgataaagaagttatagaatgtatcagtcacgatgtaggaatatagatcatatctactaatttttataatcgatacaaaacataaaaaacaactcgttattacatagcaggcatggaatccttcaagtattgttttgataacgatggcaagaaatggattatcggaaatactttatattctggtaattcaatactctataaggtcagaaaaaatttcactagttcgttctacaattacgtaatgaagatagatcacaaatcacacaagccattgttgtctgaaatacgattctatatatctgtattggatcctttgactatcgacaactggacacgggaacgtggtataaagtatttggctattccagatctgtatggaattggagaaaccgatgattatatgttcttcgttataaagaattcgggaagagtattcgccccaaaggatactgaatcagtcttcgaagcatgcgtcactatgataaacacgttagagtttatacactctcgaggatttacccatggaaaaatagaaccgaggaatatactgattagaaataaacgtctttcactaattgactattctagaactaacaaactatacaagagtggaaactcacatatagattacaacgaggacatgataacttcaggaaatatcaattatatgtgtgtagacaatcatcttggagcaacagtttcaagacgaggagatttagaaatgttgggatattgcatgatagaatggttcggtggcaaacttccatggaaaaacgaaagtagtataaaagtaataaaacaaaaaaaagaatataaaaaatttatagctactttctttgaggactgttttcctgaaggaaatgaacctctggaattagttagatatatagaattagtatacacgttagattattctcaaactcctaattatgacagactacgtaaactgtttatacaagattgaaattatattcttttttttatagagtgtggtagtgttacggatatctaatattaatattagactatctctatcgcgctacacgaccaatatcgattactatggatatcttctatgaaaggagagaatgtatttatttctccagcgtcaatctcgtcagtattgacaatactgtattatggagctaatggatccactgctgaacagctatcaaaatatgtagaaacggaggagaacacggataaggttagcgctcagaatatctcattcaaatccatgaataaagtatatgggcgatattctgccgtgtttaaagattcctttttgagaaaaattggcgataagtttcaaactgttgacttcactgattgtcgcactatagatgcaatcaacaagtgtgtagatatctttactgaggggaaaatcaatccactattggatgaaccattgtctcctagcaattagtgccgtatactttaaagcaaaatggttgacgccattcgaaaaggaatttaccagtgattatcccttttacgtatctccgacggaaatggtagacgtaagtatgatgtctatgtacggcaaggcatttaatcacgcatctgtaaaagaatcattcggcaacttttcaatcatagaactgccatatgttggagatactagtatgatggtcattcttccagacaagattgatggattagaatccatagaacaaaatctaacagatacaaattttaagaaatggtgtgactttatggatgctatgtttatagatgttcacattcccaagtttaaggtaacaggctcgtataatctggtggatactctagtaaagtcaggactgacagaggtgttcggttcaactggagattatagcaatatgtgtaatttagatgtgagtgtcgacgctatgatccacaaaacgtatatagatgtcaatgaagagtatacagaagcagctgcagcaacttctgtactagtggcagactgtgcatcaacaattacaaatgagttctgtgcagatcatccgttcatctatgtgattaggcatgttgatggaaaaattcttttcgttggtagatattgctctccgacaactaattgttaaccattttttttaaaaaaaatagaaaaaacatgtggtattagtgcaggtcgttgttcttccaattgcaattggtaagatgacggccaactttagtacccacgtcttttcaccacagcactgtggatgtgacagactgaccagtattgatgacgtcaaacaatgtttgactgaatatatttattggtcgtcctatgcataccgcaacaggcaatgcgctggacaattgtattccacactcctctcttttagagatgatgcggaattagtgttcatcgacattcgcgagctggtaaaaaatatgccgtgggatgatgtcaaagattgtacagaaatcatccgttgttatataccggatgagcaaaaaaccatcagagagatttcggccatcatcggactttgtgcatatgctgctacttactggggaggtgaagaccatcccactagtaacagtctgaacgcattgtttgtgatgcttgagatgctaaattacgtggattataacatcatattccggcgtatgaattgatgagttgtacatcttgacattttctttcttctcttctccctttcttctcttctcccttcctccctcttctccctttcccagaaacaaacttttttacccactataaaataaaatgagtatactacctattatatttcttcctatatttttttattcttcattcgttcagacttttaacgcgtctgaatgtatcgacaaagggcaatattttgcatcattcatggagttagaaaacgagccagtaatcttaccatgtcctcaaataaatacgctatcatccggatataatatattagatattttatgggaaaaacgaggagcggataatgatagaattataccgatagataatggtagcaatatgctaattctgaacccgacacaatcagactctggtatttatatatgcattaccacgaacgaaacctactgtgacatgatgtcgttaaatttgacaatcgtgtctgtctcagaatcaaatatagatcttatctcgtatccacaaatagtaaatgagagatctactggcgaaatggtatgtcccaatattaatgcatttattgctagtaacgtaaacgcagatattatatggagcggacatcgacgccttagaaataagagacttaaacaacggacacctggaattattaccatagaagatgttagaaaaaatgatgctggttattatacatgtgttttagaatatatatacggtggcaaaacatataacgtaaccagaattgtaaaattagaggtacgggatagaataataccttctactatgcaattaccagatggcattgtaacttcaataggtagtaatttgactattgcatgcagagtatcgttgagacctcccacaacggacaccgacgtcttttggataagtaatggtatgtattacgaagaagatgatggggacggaaacggtagaataagtgtagcaaataaaatctatatgaccgataagagacgtgttattacatcccggttaaacattaatcctgtcaaggaagaagatgctacaacgtttacgtgtatggcgtttactattcctagcatcagcaaaacagttactgttagtataacgtgaatgtatgttgttacatttccatgtcaattgagtttataagaatttttatacattatcttccaacaaacaattgacgaacgtattgctatgattaactcccacgatactatgcatattattaatcattaacttgcagactatacctagtgctattttgacatactcgtgttcttgtgtaattgcggtatctatattattaaagtacgtaaatctagctatagttttattatttaattttagataatataccgtctccttatttttaaaaattgccacatcctttattaaatcatgaatgggaatttctatgtcatcgttagtatattgtgaacaacaagagcagatatctataggaaagggtggaatgcgatacattgatctatgtagttttaaaacacacgcgaactttgaagaatttatataaatcattccatcgatacatccttctatgttgacatgtatatatccaggaattcttttattaatgtcaggaaatgtataaactaaaacattgcccgaaagcggtgcctctatctgcgttatatccgttcttaacttacaaaatgtaaccaatacctttgcatgacttgttttgttcggcaacgttagtttaaacttgacgaatggattaattacaatagcatgatccgcgcatctattaagtttttttactttaacgcccttgtatgtttttacagagactttatctaaatttctagtgcttgtatgtgttataaatataacgggatatagaaccgaatcacctaccttagatacccaattacattttatcagatccagataataaacaaattttgtcgccctaactaattctatattgttatatattttacaattggttatgatatcatgtaataacttggagtctaacgcgcatcgtcgtacgtttatacaattgtgatttagtgtagtatatctacacatgtatttttccgcactatagtattctggactagtgataaaactatcgttatatctgtcttcaatgaactcatcgagatattgctctctgtcatattcatacacctgcataaactttctagacatcttacaatccgtgttattttaggatcatatttacatatttacgggtatatcaaagatgttagattagttaatgggaatcgtctataataatgaatattaaacaattatatgaggacttttaccacaaagcatcataaaaatgagtcgtcgtctgatttatgttttaaatatcaaccgcaaatcaactcataaaatacaagagaatgaaatatatacatattttagtcattgcaatatagaccatacttctacagaacttgattttgtagttaaaaactatgatctaaacagacgacaacctgtaactgggtatactgcactacactgctatttgtataataattactttacaaacgatgtactgaagatattattaaatcatgacgtaaatgtaacgatgaaaaccagtagcggacgtatgcctgtttatatattgcttactagatgttgtaatatttcacatgatgtagtgatagatatgatagacaaagataaaaaccacttattacatagagactattccaacctattactagagtatataaaatctcgttacatgttattgaaggaagaggatatcgatgagaacatagtatccactttattagataagggaatcgatcctaactttaaacaagacggatatacagcgttacattattattatttgtgtctcgcacacgtttataaactaggtgagtgtagaaaaccgataacgataaaaaaggccaagcgaattatttctttgtttatacaacatggagctaatctaaacgcgttagataattgtggtaatacaccattccatttgtatcttagtattgaaatgtgtaataatattcatatgactaaaatgctgttgacttttaatccgaatttcaaaatatgtaataatcatggattaacgcctatactatgttatataacttccgactacatacaacacgatattcttgttatgttaatacatcactatgaaacaaatgttggagaaatgccgatagatgagcgtcgtatgatcgtattcgagtttatcaaaacatattctacacgtccggcagattcgataacttatttgatgaataggtttaaaaatataaatatttatacccgctatgaaggaaagacattattacacgtagcatgtgaatataataatacacaagtaatagattatcttatacgtatcaacggagatataaatgcgttaaccgacaataacaaacacgctacacaactcattatagataacaaagaaaattccccatataccattaattgtttactgtatatacttagatatattgtagataagaatgtgataagatcgttggtggatcaacttccatctctacctatcttcgatataaaatcatttgagaaattcatatcctactgtatacttttagatgacacattttacgataggcacgttaagaatcgcgattctaaaacgtatcgatacgcattttcaaaatacatgtcgtttgataaatacgatggtataataactaaatgtcacgacgaaacaatgttactcaaactgtccactgttctagacactacactatatgcagttttaagatgtcataattcgagaaagttaagaagatacctcaacgagttaaaaaaatataataacgataagtcctttaaaatatattctaatattatgaatgagagataccttaatgtatattataaagatatgtacgtgtcaaaggtatatgataaactatttcctgttttcacagataaaaattgtctactaacattactaccttcagaaattatatacgaaatattatacatgctgacaattaacgatctttataatatatcgtatccacctaccaaagtatagttgtatttttctcatgcgatgtgtgtaaaaaaactgatattatataaatattttagtgccgtataataaagatgacgatgaaaatgatggtacatatatatttcgtatcattattgttattgctattccacagttacgccatagacatcgaaaatgaaatcacagaattcttcaataaaatgagagatactctaccagctaaagactctaaatggttgaatccagcatgtatgttcggaggcacaatgaatgatatagccgctctaggagagccattcagcgcaaagtgtcctcctattgaagacagtcttttatcgcacagatataaagactatgtggttaaatgggagaggctagaaaagaatagacggcgacaggtttctaataaacgtgttaaacatggtgatttatggatagccaactatacatctaaattcagtaaccgtaggtatttgtgcaccgtaactacaaagaatggtgactgtgttcagggtatagttagatctcatattaaaaaacctccttcatgcattccaaaaacatatgaactaggtactcatgataagtatggcatagacttatactgtggaattctttacgcaaaacattataataatataacttggtataaagataataaggaaattaatatcgacgacattaagtattcacaaacgggaaaggaattaattattcataatccagagttagaagatagcggaagatacgactgttacgttcattacgacgacgttagaatcaagaatgatatcgtagtatcaagatgtaaaatacttacggttataccgtcacaagaccacaggtttaaactaatactagatccgaaaatcaacgtaacgataggagaacctgccaatataacatgcactgctgtgtcaacgtcattattgatcgacgatgtactgattgaatgggaaaatccatccggatggcttataggattcgattttgatgtatactctgttttaactagtagaggcggtatcaccgaggcgaccttgtactttgaaaatgttactgaagaatatataggtaatacatataaatgtcgtggacacaactattattttgaaaaaacccttacaactacagtagtattggagtaaatatacaatgcatttttatatacattactgaattattattactgaattattattactgaattattattaattatatcgtatttgtgctatagaatggatgaagatacgcgactatctaggtatttgtatctcaccgatagagaacatataaatgtagactctattaaacagttgtgtaaaatatcagatcctaatgcatgttatagatgtggatgtacggctttacatgagtacttttataattatagatcagtcaacggaaaatacaagtatagatacaacggttactatcaatattattcatctagcgattatgaaaattataatgaatattattatgatagaactggtatgaacagtgagagtgataatatatcaatcaaaacagaatatgaattctatgatgaaacacaagatcaaagtacacaactagtaggttacgacattaaactcaaaaccaatgaggatgattttatggctatgatagatcagtgggtgtccatgattatatagatgaatcaattaataaagtagtatatggaagagagtctcacgtaagatggcgggatatatggcaagaacataatgatggcgtatacagtataggaaaggagtgcatagataatatatacgaagacaaccataccgtagacgaattctacaagatagacagcgtatcagatgtagatgacgcggaacacatatctccgataactaaaaaaccatagaatcagttgatgataatacctacatttctaatcttccgtataccatcaaatacaaaatattcgagcaacaataagtattttttatacctttaaaactgataaataaattttttctagtgatattttggcaagatgagaatcctatttctcatcgctttcatgtatgggtgtgttcactcatatgttaacgcggttgaaaccaaatgtccaaatctagacattgtaacatcttctggagaatttcattgttcaggatgtgtggaacatatgcctgagtttagctatatgtattggttggcaaaggatatgaaatcggacgaggataccaagtttatagaacatctgggtgatggcatcaaagaagatgaaaccgttcgtaccacagatagtggaatcgtcactctacgtaaagtccttcatgtgactgatactaataaatttgataattataggttcacttgtgtcctcgctacgctagatggcatttataaaaagaatgtttgctgaagtagttgtgtgctactatttttatttatgatataatctaatggaattaatttgaattgatatttatccaatactaaagattatattagaatcaaattaatcttttatacgagaaaaaataacgacatacgtcgtcaacaaattaaactttttatttattagttaactagcttatagaacttgctcattgttatgtttctaaaacgggtacggcatataggacaattatccgacgcaccggtttctcttcgtgttctatgccatatattgatgcatgttatgcaaaatatatgagtacacgaatccaataaaccaaagtatctatcgttttgagtaaacaacttcatagcaaattccacattctttttctttacttactctatacacgtcctcgtatttatttagtattttgatgatatccaactcagaaatggttgttgtattattgggtgtatttggagtataggtattattagctatgtaccaatttaccaaccctcttaatattgattgataatcacatcggttatccaattaataactaaattgtagtgtatatatagaccatatatgtttctatttttttgacagttacgtatagtttcagtaagttttgattgttgtattcctgtatctctagataagttagtcatatagtcccttccggcgatacgttttttccaagcccgaaattgattagccaaatgtgtatttatttttgtgatattgatataatatttcggataatgcatactgttagtcttatatcatttggttcatctatgtattgtaatattgttacatgatctatagatgatgtattgattttggcaggatcgaattccatatccgcgactaaacagtgaaaaaaatgtaaatactttttaaattttaaattagtaaaacttttttttattttttatgattccaaaaatactgaatacaaagtcctaaattataaatatggagatcatactaccacaacttattattatgtatacaaggccggtgtaatagatagatatatataattctattacaccggcagacaattaccgaccggtatttgtcgttaccaacataccgtataatatgtaatatacaattccataacccattgacagttgttatacatcaaaattgcaattcttttgattacgatgttataagaatgtagttaattgatgtatgatgttaatgtgtcctctttcctcttataacatcgtaatcaaaaacttttttataatatatacctaataatgtgtcttaatagttctcgtgattcgtcaaacaatcattcttataaaatataataaagcaacgtaaaaacacataaaaataagcgtaactaataagacaatggatatttacgacgataaaggtctacagactattaaactgtttaataatgaatttgattgtataaggaatgacatcagagaattatttaaacatgtaactgattccgatagtatacaacttccgatggaagacaattctgatattatagaaaatatcagaaaaatactatatagacgattaaaaaatgtagaatgtgttgacatcgataacacaataacttttatgaaatacgatccaaatgatgataataagcgtacgtgttctaattgggtacccttaactaataactatatggaatattgtctagtaatatatttggaaacaccgatatgtggaggcaaaataaaattataccaccctacaggaaatataaagtcggataaggatattatgtttgcaaagactctagactttaaatcaacgaaagtgttaactggacgtaaaacaattgccgttctagacatatccgtttcatataatagatcaatgactactattcactacaacgacgacgttgatatagatatacatactgataaaaatggaaaagagttatgttattgttatataacaatagatgatcattacttggttgatgtggaaactataggagttatagtcaatagatctggaaaatgtctgttagtaaataaccatctaggtataggtatcgttaaagataaacgtataagcgatagttttggagatgtatgtatggatacaatatttgacttttctgaagcacgagagttattttcattaactaatgatgataacaggaatatagcatgggacactgataaactagacgatgatacagatatatggactcccgtcacagaagatgattacaaatttctttctagactagtattgtatgcaaaatctcaatcggatactgtatttgactattatgttcttactggtgatacggaaccacccactgtattcattttcaaggtaactagattttactttaatatgccgaaataaaaaatttttgtataatatctagaggtagaggtattgtttagataaatacaaataacatagatacatcgcatacttagcatttttataaatatacataagacatacactttatacatttttgtaaaaatactcataaaaaaatttataaaaattatggcacaaccatatcttgtataggtagtttagttcgtcgagtgaacctataaacagataatagacaacacataataatgcctactaatacaagcataataccgggagatgggatatatgacgttgtagtgtttgggttttctgaacgttgatagtctactaatactacatgctgacatctaatgcctgtataaccatgagagcatctacaatacataccgtcaatatctctagcgtggatacagtcaccgtgtaaacaatatccatctccctctggaccgcataatctgatagctggaatatctgttgtagcgtttgtaatttctggcaatgtcgtttcgatagcgttaccactatcggcgaatgatctgattatcatagcagcgaacaacaacatcagataatttatcaacatttttgatggattctgtgtttatgctgtttctcagtgtgtgtttatgacaagattgggaattttatattattaattcagtaatataaactaataatatattgttaattgtgtaaataatataaaaataacaatacaatattgaatgtgttgctgttaaaaatgtatgtgttaatataatagaataaaataaatgagtatgatcattttagataacgattgattttatcattaccgcttcattcttatattctttgcttacggaacctatatttagaaacatctactaacaattttttatgcttgcattattaatggtatgtaatatgattgattgtgtacgcaataccaatttgttaagtatgaatacggggtacaaacataaattgaaatttaacattatttatttatgatatatatcgttatcgttaggtctataccatggatatctttaaagaactaatcttaaaacaccctgatgaaaatgttttgatttctccagtttccattttatctactttatctattctaaatcatggagcagctggttctacagctgaacaactatcaaaatatatagagaatatgaatgagaatacacccgatgacaataatgatgacatggaggtagatattccgtattgtgcgacactagctaccgcaaataaaatatacggtagcgatagtatcgagttccacgcctccttcctacaaaaaataaaagacgattttcaaactgtaaactttaataatgctaaccaaacaaaggaactaatcaacgaatgggttaagacaatgacaaatggtaaaattaattccttattgactagtccgctatccattaatactcgtatgacagttgttagcgccgtccattttaaagcaatgtggaaatatccattttctaaacatcttacatatacagacaagttttatatttctaagaatatagttaccagcgttgatatgatggtgggtaccgagaataacttgcaatatgtacatattaatgaattattcggaggattctctattatcgatattccatacgagggaaactctagtatggtaattatactaccggacgacatagaaggtatatataacatagaaaaaaatataacagatgaaaaatttaaaaaatggtgtggtatgttatctactaaaagtatagacttgtatatgccaaagtttaaagtggaaatgacagaaccgtataatctggtaccgattttagaaaatttaggacttactaatatattcggatattatgcagattttagcaagatgtgtaatgaaactatcactgtagaaaaatttctacatacgacgtttatagatgttaatgaggagtatacagaagcatcggccgttacaggagtatttacgattaacttttcgatggtatatcgtacgaaggtctacataaaccatccattcatgtacatgattaaagacaccacaggacgtatactttttatagggaaatactgctatccgcaataaatataaacaaatagacttttataaagagtcttcaacgataagtatatcgacatactacttatgctgcgaaagattctgaacgagaacgactatctcaccctcttggatcatatccgcactgctaaatactaaatctccactacactttttatcatcttatgaggaatgattgccttcgtgaaataggaataattagcaccagaatagctatggattattgtggtagagagtgcactattctatgtcgtctactggatgaagatgtgacgtacaaaaaaataaaactagaaattgaaacgtgtcacaacttatcaaaacatatagatagacgaggaaacaatgcgctacattgttacgtctccaataaatgcgatacagacattaagattgttctctcgcggagtcgagagactttgtagaaacaacgaaggattaactccgctaggagtatacagtaagcatagatacgtaaaatctcagattgtgcatctactgatatccagctattcaaattcctctaacgaactcaagtcgaatataaatgatttcgatctgtattcggataatatcgacttacgtctgctaaaatacctaattgtggataaacggatacgtccgtccaagaatacgaattatgcaatcaatggtctcggattggtggatatatacgtaacgacgcctaatccgagaccagaagtattgctatggcttcttaaatcagaatgttacagcaccggttacgtatttcgtacctgtatgtacgacagtgatatgtgtaagaactctcttcattactatatatcgtctcatagagaatctcaatctctatccaaggatgtaattaaatgtttgatcgataacaatgtttccatccatggcagagacgaaggaggatctttacccatccaatactactggtctttctcaaccatagatatagagattgttaaattattattaataaaggatgtggacacgtgtagagtatacgacgtcagccctatattagaggcgtattatctaaacaagcgatttagagtaaccccatataatgtagacatggaaatcgttaatcttcttattgagagacgtcatactcttgtcgacgtaatgcgtagtattacttcgtacgattccagagaatataaccactacatcatcgataacattctaaagagatttagacaacaggatgaatccatcgtacaagccatactgataaactacttacattacggcgatatggtcgttcgatgcatgttagataacggacaacaactatcctctacacgactactttgttaataataatctcgtcgatgtaaacgtcgtaaggtttatcgtggaaaatatggacacgcggctgtaaatcacgtatcgaacaatggccgtctatgtatgtacggtctgatattatcgagatttaataattgcgggtatcactgttatgaaaccatactgatagatgtatttgatatactaagcaagtacatggatgatatagatatgatcgataactctactatattacgcggtcgatgtcaataatatacaatttgcaaagcggttattggaatatggagcgagtatcacgctcgataatcaatacggccatccagaaaagcagttacagaagagaaaacaaaacgaaatcgttgttctacaagatgtctctccctacgacgattactacgtaaaaaagatactagcctactgcctattaagggacgagtcattcgcggaactacatagtaaattctgtttaaacgaggactataaaagtgtatttatgaaaaatatatcattcgataagatagattccatcatcgtgacataagtcgcctcaaagagattcgaatctccgacaccgacctgtatacggtatcacagctatcttaaagccatacattcagacagtcacatttcatttcccatgtacgacgatctcatagaacagtgccatctatcgatggagcgtaaaagtaaactcgtcgacaaagcactcaataaattagagtctaccatcggtcaatctagactatcgtatttgcctccggaaattatgcgcaatatcatctaaacagtatgttgtacggaaagaaccattacaaatattatccatgatagaaagaaaatatctatatgattggagaagtaggaaacaggaacaagacaacgattactacattattaaatcatgaagtccgtattatactcgtatatattgtttctctcatgtataataataaacggaagagatatagcaccgcatgcaccatccgatggaaagtgtaaagacaacgaatacaaacgccataatttgtgtccgggaacatacgcttccagattatgcgatagcaagactaacacacgatgtacgccgtgtggttcgggtaccttcacatctcgcaataatcatttacccgcttgtctaagttgtaacggaagacgcgatcgtgtaacacgactcacaatagaatctgtgaatgctctcccggatattattgtcttctcaaaggatcatccggatgcaaggcatgtgtttcccaaacaaaatgtggaataggatacggagtatccggagacgtcatctgttctccgtgtggtctcggaacatattctcacaccgtctcttccgcagataaatgcgaacccgtacccagaaatacgtttaactatatcgatgtggaaattaacctgtatccagttaacgacacgtcgtgtactcggacgaccactaccggtctcagcgaatccatctcaacgtcggaactaactattactatgaatcataaagactgtaatcccgtatttcgtgatggatacttctccgttcttaataaggtagcgacttcaggtttctttacaggagaaaggtgtgcactctgaatttcgagattaaatgcaataacaaagattcttcctccaaacagttaacgaaagcaaagaatgatactatcatgccgcattcggagacagtaactctagtgggcgacatctatatactatatagtaataccaatactcaagactacgaaactgatacaatctcttatcatgtgggtaatgttctcgatgtcgatagccatatgcccggtagttgcgatatacataaactgatcactaattccaaacccacccactttttatagtaagtttttcacccataaataataaatacaataattaatttctcgtaaaagtagaaaatatattctaatttattgcacggtaaggaagtagaatcataaagaacagtactcaatcaatagcaattatgaaacaatatatcgtcctggcatgcatgtgcctggcggcagctgctatgcctgccagtcttcagcaatcatcctcatcctcctcctcgtgtacggaagaagaaaacaaacatcatatgggaatcgatgttattatcaaagtcacaaagcaagaccaaacaccgaccaatgataagatttgccaatccgtaacggaaattacagagtccgagtcagatccagatcccgaggtggaatcagaagatgattccacatcagtcgaggatgtagatcctcctaccacttattactccatcatcggtggaggtctgagaatgaactttggattcaccaaatgtcctcagattaaatccatctcagaatccgctgatggaaacacagtgaatgctagattgtccagcgtgtccccaggacaaggtaaggactctcccgcgatcactcatgaagaagctcttgctatgatcaaagactgtgaagtgtctatcgacatcagatgtagcgaagaagagaaagacagcgacatcaagacccatccagtactcgggtctaacatctctcataagaaagtgagttacgaagatatcatcggttcaacgatcgtcgatacaaaatgcgtcaagaatctagagtttagcgttcgtatcggagacatgtgcaaggaatcatctgaacttgaggtcaaggatggattcaagtatgtcgacggatcggcatctgaaggtgcaaccgatgatacttcactcatcgattcaacaaaactcaaagcgtgtgtctgaatcgataactctattcatctgaaattggatgagtagggttaatcgaacgattcaggcacaccacgaattaaaaaagtgtaccggacactatattccggtttgcaaaacaaaaatgttcttaactacattcacaaaaagttacctctcgcgacttcttctttttctgtctcaatagtgtgatacgattatgacactattcctattcctattcctatttcctttcagagtatcacaaaaatattaaacctctttctgatggtctcataaaaaaagttttacaaaaatatttttattctctttctctctttgatggtctcataaaaaaagttttacaaaaatatttttattctctttctctctttgatggtctcataaaaaaagttttacaaaaatatttttattctctttctctctttgatggtctcataaaaaaagttttacaaaaatatttttattctctttctctctttgatggtctcataaaaaaagttttacaaaaatatttttattctctttctctctttgatggtctcataaaaaaagttttacaaaaatatttttattctctttctctctttgatggtctcataaaaaaagttttacaaaaatatttttattctctttctctctttgatggtctcataaaaaaagttttacaaaaatatttttattctctttctctctttgatggtctcataaaaaaagttttacaaaaatatttttattctctttctctctttgatggtctcataaaaaaagttttacaaaaatatttttattctctttctctctttgatggtctcataaaaaaagttttacaaaaatatttttattctctttctctctttgatggtctcataaaaaaagttttacaaaaatatttttattctctttctctctttgatggtctcataaaaaagttttacaaaaatatttttattctctttctctctttgatggtctcataaaaaagttttacaaaaatatttttattctctttctctctttgatggtctcataaaaaaagttttacaaaaatatttttattctctttctctctttgatggtctcataa

SEQ ID NO: 4 - DNA, 201471 bp, Artificial Sequence
  GLV-1h189 genome
ttatgagaccatcaaagagagaaagagaataaaaatatttttgtaaaactttttttatgagaccatcaaagagagaaagagaataaaaatatttttgtaaaacttttttatgagaccatcaaagagagaaagagaataaaaatatttttgtaaaacttttttatgagaccatcaaagagagaaagagaataaaaatatttttgtaaaactttttttatgagaccatcaaagagagaaagagaataaaaatatttttgtaaaactttttttatgagaccatcaaagagagaaagagaataaaaatatttttgtaaaactttttttatgagaccatcaaagagagaaagagaataaaaatatttttgtaaaactttttttatgagaccatcaaagagagaaagagaataaaaatatttttgtaaaactttttttatgagaccatcaaagagagaaagagaataaaaatatttttgtaaaactttttttatgagaccatcaaagagagaaagagaataaaaatatttttgtaaaactttttttatgagaccatcaaagagagaaagagaataaaaatatttttgtaaaactttttttatgagaccatcaaagagagaaagagaataaaaatatttttgtaaaactttttttatgagaccatcaaagagagaaagagaataaaaatatttttgtaaaactttttttatgagaccatcaaagagagaaagagaataaaaatatttttgtaaaactttttttatgagaccatcaaagagagaaagagaataaaaatatttttgtaaaactttttttatgagaccatcagaaagaggtttaatatttttgtgatactctgaaaggaaataggaataggaataggaatagtgtcataatcgtatcacactattgagacagaaaaagaagaagtcgcgagaggtaactttttgtgaatgtagttaagaacatttttgttttgcaaaccggaatatagtgtccggtacacttttttaattcgtggtgtgcctgaatcgttcgattaaccctactcatccaatttcagatgaatagagttatcgattcagacacacgctttgagttttgttgaatcgatgagtgaagtatcatcggttgcaccttcagatgccgatccgtcgacatacttgaatccatccttgacctcaagttcagatgattccttgcacatgtctccgatacgaacgctaaactctagattcttgacgcattttgtatcgacgatcgttgaaccgatgatatcttcgtaactcactttcttatgagagatgttagacccgagtactggatgggtcttgatgtcgctgtctttctcttcttcgctacatctgatgtcgatagacacttcacagtctttgatcatagcaagagcttcttcatgagtgatcgcgggagagtccttaccttgtcctggggacacgctggacaatctagcattcactgtgtttccatcagcggattctgagatggatttaatctgaggacatttggtgaatccaaagttcattctcagacctccaccgatgatggagtaataagtggtaggaggatctacatcctcgactgatgtggaatcatcttctgattccacctcgggatctggatctgactcggactctgtaatttccgttacggattggcaaatcttatcattggtcggtgtttggtcttgctttgtgactttgataataacatcgattcccatatgatgtttgttttcttcttccgtacacgaggaggaggatgaggatgattgctgaagactggcaggcatagcagctgccgccaggcacatgcatgccaggacgatatattgtttcataattgctattgattgagtactgttctttatgattctacttccttaccgtgcaataaattagaatatattttctacttttacgagaaattaattattgtatttattatttatgggtgaaaaacttactataaaaagtgggtgggtttggaattagtgatcagtttatgtatatcgcaactaccgggcatatggctatcgacatcgagaacattacccacatgataagagattgtatcagtttcgtagtcttgagtattggtattactatatagtatatagatgtcgcccactagagttactgtctccgaatgcggcatgatagtatcattctttgctttcgttaactgtttggaggaagaatctttgttattgcatttaatctcgaaattcagagtgcacacctttctcctgtaaagaaacctgaagtcgctaccttattaagaacggagaagtatccatcacgaaatacgggattacagtctttatgattcatagtaatagttagttccgacgttgagatggattcgctgagaccggtagtggtcgtccgagtacacgacgtgtcgttaactggatacaggttaatttccacatcgatatagttaaacgtatttctgggtacgggttcgcatttatctgcggaagagacggtgtgagaatatgttccgagaccacacggagaacagatgacgtctccggatactccgtatcctattccacattttgtttgggaaacacatgccttgcatccggatgatcctttgagaagacaataatatccgggagagcattcacagattctattgtgagtcgtgttacacgatcgcgtcttccgttacaacttagacaagcgggtaaatgattattgcgagatgtgaaggtacccgaaccacacggcgtacatcgtgtgttagtcttgctatcgcataatctggaagcgtatgttcccggacacaaattatggcgtttgtattcgttgtctttacactttccatcggatggtgcatgcggtgctatatctcttccgtttattattatacatgagagaaacaatatatacgagtataatacggacttcatgatttaataatgtagtaatcgttgtcttgttcctgtttcctacttctccaatcatatagatattttctttctatcatggataatatttgtaatggttctttccgtacaacatactgtttagatgatattgcgcataatttccggaggcaaatacgatagtctagattgaccgatggtagactctaatttattgagtgctttgtcgacgagtttacttttacgctccatcgatagatggcactgttctatgagatcgtcgtacatgggaaatgaaatgtgactgtctgaatgtatggctttaagatagctgtgataccgtatacaggtcggtgtcggagattcgaatctctttgaggcgacttatgtcacgatgatggaatctatcttatcgaatgatatatttttcataaatacacttttatagtcctcgtttaaacagaatttactatgtagttccgcgaatgactcgtcccttaataggcagtaggctagtatcttttttacgtagtaatcgtcgtagggagagacatcttgtagaacaacgatttcgttttgttttctcttctgtaactgcttttctggatggccgtattgattatcgagcgtgatactcgctccatattccaataaccgctttgcaaattgtatattattgacatcgaccgcgtaatatagtagagttatcgatcatatctatatcatccatgtacttgcttagtatatcaaatacatctatcagtatggtttcataacagtgatacccgcaattattaaatctcgataatatcagaccgtacatacatagacggccattgttcgatacgtgatttacagccgcgtgtccatattttccacgataaaccttacgacgtttacatcgacgagattattattaacaaagtagtcgtgtagaggatagttgttgtccgttatctaacatgcatcgaacgaccatatcgccgtaatgtaagtagtttatcagtatggcttgtacgatggattcatcctgttgtctaaatctctttagaatgttatcgatgatgtagtggttatattctctggaatcgtacgaagtaatactacgcattacgtcgacaagagtatgacgtctctcaataagaagattaacgatttccatgtctacattatatggggttactctaaatcgcttgtttagataatacgcctctaatatagggctgacgtcgtatactctacacgtgtccacatcctttattaataataatttaacaatctctatatctatggttgagaaagaccagtagtattggatgggtaaagatcctccttcgtctctgccatggatggaaacattgttatcgatcaaacatttaattacatccttggatagagattgagattctctatgagacgatatatagtaatgaagagagttcttacacatatcactgtcgtacatacaggtacgaaatacgtaaccggtgctgtaacattctgatttaagaagccatagcaatacttctggtctcggattaggcgtcgttacgtatatatccaccaatccgagaccattgattgcataattcgtattcttggacggacgtatccgtttatccacaattaggtattttagcagacgtaagtcgatattatccgaatacagatcgaaatcatttatattcgacttgagttcgttagaggaatttgaatagctggatatcagtagatgcacaatctgagattttacgtatctatgcttactgtatactcctagcggagttaatccttcgttgtttctacaaagtctctcgactccgcgagagaacaatcttaatgtctgtatcgcatttattggagacgtaacaatgtagcgcattgtttcctcgtctatctatatgttttgataagttgtgacacgtttcaatttctagttttatttttttgtacgtcacatcttcatccagtagacgacatagaatagtgcactctctaccacaataatccatagctattctggtgctaattattcctatttcacgaaggcaatcattcctcataagatgataaaaagtgtagtggagatttagtatttagcagtgcggatatgatccaagagggtgagatagtcgttctcgttcagaatctttcgcagcataagtagtatgtcgatatacttatcgttgaagactctttataaaagtctatttgtttatatttattgcggatagcagtatttccctataaaaagtatacgtcctgtggtgtctttaatcatgtacatgaatggatggtttatgtagaccttcgtacgatataccatcgaaaagttaatcgtaaatactcctgtaacggccgatgcttctgtatactcctcattaacatctataaacgtcgtatgtagaaatttttctacagtgatagtttcattacacatcttgctaaaatctgcataatatccgaatatattagtaagtcctaaattttctaaaatcggtaccagattatacggttctgtcatttccactttaaactttggcatatacaagtctatacttttagtagataacataccacaccattttttaaatttttcatctgttatatttttttctatgttatatataccttctatgtcgtccggtagtataattaccatactagagtttccctcgtatggaatatcgataatagagaatcctccgaataattcattaatatgtacatattgcaagttattctcggtacccaccatcatatcaacgctggtaactatattcttagaaatataaaacttgtctgtatatgtaagatgtttagaaaatggatatttccacattgctttaaaatggacggcgctaacaactgtcatacgagtattaatggatagcggactagtcaataaggaattaattttaccatttgtcattgtcttaacccattcgttgattagttcctttgtttggttagcattattaaagtttacagtttgaaaatcgtcttttattttttgtaggaaggaggcgtggaactcgatactatcgctaccgtatattttatttgcggtagctagtgtcgcacaatacggaatatctacctccatgtcatcattattgtcatcgggtgtattctcattcatattctctatatattttgatagttgttcagctgtagaaccagctgctccatgatttagaatagataaagtagataaaatggaaactggagaaatcaaaacattttcatcagggtgttttaagattagttctttaaagatatccatggtatagacctaacgataacgatatatatcataaataaataatgttaaatttcaatttatgtttgtaccccgtattcatacttaacaaattggtattgcgtacacaatcaatcatattacataccattaataatgcaagcataaaaaattgttagtagatgtttctaaatataggttccgtaagcaaagaatataagaatgaagcggtaatgataaaatcaatcgttatctaaaatgatcatactcatttattttattctattatattaacacatacatttttaacagcaacacattcaatattgtattgttatttttatattatttacacaattaacaatatattattagtttatattactgaattaataatataaaattcccaatcttgtcataaacacacactgagaaacagcataaacacagaatccatcaaaaatgttgataaattatctgatgttgttgttcgctgctatgataatcagatcattcgccgatagtggtaacgctatcgaaacgacattgccagaaattacaaacgctacaacagatattccagctatcagattatgcggtccagagggagatggatattgtttacacggtgactgtatccacgctagagatattgacggtatgtattgtagatgctctcatggttatacaggcattagatgtcagcatgtagtattagtagactatcaacgttcagaaaacccaaacactacaacgtcatatatcccatctcccggtattatgcttgtattagtaggcattattatgtgttgtctattatctgtttataggttcactcgacgaactaaactacctatacaagatatggttgtgccataatttttataaatttttttatgagtatttttacaaaaatgtataaagtgtatgtcttatgtatatttataaaaatgctaagtatgcgatgtatctatgttatttgtatttatctaaacaatacctctacctctagatattatacaaaaattttttatttcggcatattaaagtaaaatctagttaccttgaaaatgaatacagtgggtggttccgtatcaccagtaagaacataatagtcaaatacagtatccgattgagattttgcatacaatactagtctagaaagaaatttgtaatcatcttctgtgacgggagtccatatatctgtatcatcgtctagtttatcagtgtcccatgctatattcctgttatcatcattagttaatgaaaataactctcgtgcttcagaaaagtcaaatattgtatccatacatacatctccaaaactatcgcttatacgtttatctttaacgatacctatacctagatggttatttactaacagacattttccagatctattgactataactcctatagtttccacatcaaccaagtaatgatcatctattgttatataacaataacataactcttttccatttttatcagtatgtatatctatatcaacgtcgtcgttgtagtgaatagtagtcattgatctattatatgaaacggatatgtctagaacggcaattgttttacgtccagttaacactttcgttgatttaaagtctagagtctttgcaaacataatatccttatccgactttatatttcctgtagggtggtataattttattttgcctccacatatcggtgtttccaaatatattactagacaatattccatatagttattagttaagggtacccaattagaacacgtacgcttattatcatcatttggatcgtatttcataaaagttattgtgttatcgatgtcaacacattctacattttttaatcgtctatatagtatttttctgatattttctataatatcagaattgtcttccatcggaagttgtatactatcggaatcagttacatgtttaaataattctctgatgtcattccttatacaatcaaattcattattaaacagtttaatagtctgtagacctttatcgtcgtaaatatccattgtcttattagttacgcttatttttatgtgtttttacgttgctttattatattttataagaatgattgtttgacgaatcacgagaactattaagacacattattaggtatatattataaaaaagtttttgattacgatgttataagaggaaagaggacacattaacatcatacatcaattaactacattcttataacatcgtaatcaaaagaattgcaattttgatgtataacaactgtcaatgggttatggaattgtatattacatattatacggtatgttggtaacgacaaataccggtcggtaattgtctgccggtgtaatagaattatatatatctatctattacaccggccttgtatacataataataagttgtggtagtatgatctccatatttataatttaggactttgtattcagtatttttggaatcataaaaaataaaaaaaagttttactaatttaaaatttaaaaagtatttacatttttttcactgtttagtcgcggatatggaattcgatcctgccaaaatcaatacatcatctatagatcatgtaacaatattacaatacatagatgaaccaaatgatataagactaacagtatgcattatccgaaatattatatcaatatcacaaaaataaatacacatttggctaatcaatttcgggcttggaaaaaacgtatcgccggaagggactatatgactaacttatctagagatacaggaatacaacaatcaaaacttactgaaactatacgtaactgtcaaaaaaatagaaacatatatggtctatatatacactacaatttagttattaattggataaccgatgtgattatcaatcaatattaagagggttggtaaattggtacatagctaataatacctatactccaaatacacccaataatacaacaaccatttctgagttggatatcatcaaaatactaaataaatacgaggacgtgtatagagtaagtaaagaaaaagaatgtggaatttgctatgaagttgtttactcaaaacgatagatactttggtttattggattcgtgtactcatatattttgcataacatgcatcaatatatggcatagaacacgaagagaaaccggtgcgtcggataattgtcctatatgccgtacccgttttagaaacataacaatgagcaagttctataagctagttaactaataaataaaaagtttaatttgttgacgacgtatgtcgttattttttctcgtataaaagattaatttgattctaatataatctttagtattggataaatatcaattcaaattaattccattagattatatcataaataaaaatagtagcacacaactacttcagcaaacattctttttataaatgccatctagcgtagcgaggacacaagtgaacctataattatcaaatttattagtatcagtcacatgaaggactttacgtagagtgacgattccactatctgtggtacgaacggtttcatcttctttgatgccatcacccagatgttctataaacttggtatcctcgtccgatttcatatcctttgccaaccaatacatatagctaaactcaggcatatgttccacacatcctgaacaatgaaattctccagaagatgttacaatgtctagatttggacatttggtttcaaccgcgttaacatatgagtgaacacacccatacatgaaagcgatgagaaataggattctcatcttgccaaaatatcactagaaaaaatttatttatcagttttaaaggtataaaaaatacttattgttgctcgaatattttgtatttgatggtatacggaagattagaaatgtaggtattatcatcaactgattctatggttttatgtattctatcatgtttcactattgcgttggaaataatatcatatgcttccacatatattttattttgttttaactcataatactcacgtaattctggattattggcatatctatgaataattttagctccatgatcagtaaatattaatgagaacatagtattaccacctaccattatttttttcatctcattcaattcttaattgcaaagatctatataatcattatagcgttgacttatggactctggaatcttagacgatgtacagtcatctataatcatggcatatttaatacattgttttatagcatagtcgttatctacgatgttagatatttctctcaatgaatcaatcacacaatctaatgtaggtttatgacataatagcattttcagcagttcaatgtttttagattcgttgatggcaatggctatacatgtatatccgttatttgatctaatgttgacatctgaaccggattctagcagtaaagatactagagattgtttattatatctaacagccttgtgaagaagtgtttctcctcgtttgtcaatcatgttaatgtctttaagataaggtaggcaaatgtttatagtactaagaattgggcaagcataagacatgtcacaaagacccttttttgtatgtataagtgtaaaaattataacatccatagttggatttacataggtgtccaatcgggatctctccatcatcgagataattgatggcatctcccttccttttttagtagatatttcatcgtgtaagaatcaatattaatatttctaaagtatccgtgtatagcctctttatttaccacagctccatattccactagagggatatcgccgaatgtcatatactcaattagtatatgttggaggacatccgagttcattgttttcaatatcaaagagatggtttccttatcatttctccatagtggtacaatactacacattattccgtgcggctttccattttccaaaaacaatttgaccaaatctaaatctacatctttattgtatctataatcactatttagataatcagccataattcctcgagtgcaacatgttagatcgtctatatatgaataagcagtgttatctattcctttcattaacaatttaacgatgtctatatctatatgagatgacttaatataatattgaagagctgtacaatagtttttatctataaaagacggcttgattccgtgattaattagacatttaacaacttccggacgcacatatgctctcgtatccgactctgaatacagatgagagatgatatacagatgcaatacggtaccgcaatttcgtagttgataatcatcatacgcgtatcagtactcgtcctcataaagaacactgcagccattttctatgaacaaatcaataattttagaaacaggatcattgtcattacataattttctataactgaacgatggttttcacatttaacactcaagtcaaatccatgttctaccaacacctttatcaagtcaacgtctacatttttggatttcatatagctgaatatattaaagttatttatgttgctaaatccagtggcttctagtagagccatcgctatatccttattaactttaacatgtctactatttgtgtattcttctaatggggtaagctgtctccaatttttgcgtaatggattagtgccactgtctagtagtagtttgacgacctcgacattattacaatgctcattaaaaaggtatgcgtgtaaagcattattcttgaattggttcctggtatcattaggatctctgtctttcaacatctgtttaagttcatcaagagccacctcctcattttccaaatagtcaaacattttgactgaatgagctactgtgaactctatacacccacacaactaatgtcattaaatatcatgtcaaaaacttgtacaattattaataaaaataatttagtgtttaaattttaccagttccagattttacacctccgttaatacctccattaaccccactggacgatcctcctccccacattccaccgccaccagatgtataagttttagatcctttattactaccatcatgtccatggataaagacactccacatgccgccactaccccctttagaagacatattaataagacttaaggacaagtttaacaataaaattaatcacgagtaccctactaccaacctacactattatatgattatagtttctatttttacagtaccttgactaaagtttctagtcacaagagcaatactaccaacctacactattatatgattatagtttctatttttataggaacgcgtacgagaaaatcaaatgtctaatttctaacggtagtgttgataaacgattgttatccgcggatacctcctctatcatgtcgtctattttcttactttgttctattaacttattagcattatatattatttgattataaaacttatattgcttattagcccaatctgtaaatatcggattattaacatatcgtttctttgtaggtttatttaacatgtacatcactgtaagcatgtccttaccatttattttaatttgacgcatatccgcaatttctttttcgcagtcggttataaattctatatatgatggatacatgctacatgtgtacttataatcgactaatatgaagtacttgatacatattttcagtaacgatttattattaccacctatgaataagtacctgtgatcgtctaggtaatcaactgttttcttaatacattcgatggttggtaatttactcagaataatttccaatatcttaatatataattctgctatttctgggatatatttatctgccagtataacacaaatagtaatacatgtaaacccatattttgttattatattaatgtctgcgccattatctattaaccattctactaggctgacactatgcgactcaatacaatgataaagtatactacatccatgtttatctattttgtttatatcatcaatatacggcttacaaagttttagtatcgataacacatccaactcacgcatagagaaggtagggaataatggcataatatttattaggttatcatcattgtcattatctacaactaagtttccattttttaaaatatactcgacaactttaggatctctattgccaaatttttgaaaatatttatttatatgcttaaatctatataatgtagctccttcatcaatcatacatttaataacattgatgtatactgtatgataagatacatattctaacaatagatcttgtatagaatctgtatatcttttaagaattgtggatattaggatattattacataaactattacacaattctaaaatataaaacgtatcacggtcgaataatagttgatcaactatataattatcgattttgtgatttttcttcctaaactgtttacgtaaatagttagatagaatattcattagttcatgaccactatagttactatcgaataacgcgtcaaatatttcccgtttaatatcgcatttgtcaagataataatagagtgtggtatgttcacgataagtataataacgcatctctttttcgtgtgaaattaaatagtttattacgtccaaagatgtagcataaccatcttgtgacctagtaataatataataatagagaactgttttacccattctatcatcataatcagtggtgtagtcgtaatcgtaatcgtctaattcatcatcccaattataatattcaccagcacgtctaatctgttctattttgatcttgtatccatactgtatgttgctacatgtaggtattcctttatccaataatagtttaaacacatctacattgggatttgatgttgtagcgtatttttctacaatattaataccatttttgatactatttatttctatacctttcgaaattagtaatttcaataagtctatattgatgttatcagaacatagatattcgaatatatcaaaatcattgatatttttatagtcgactgacgacaataacaaaatcacaacatcgtttttgatattattatttttcttggtaacgtatgcctttaatggagtttcaccatcatactcatataatggatttgcaccactttctatcaatgattgtgcactgctggcatcgatgttaaatgttttacaactatcatagagtatcttatcgttaaccatgattggttgttgatgctatcgcattttttggtttctttcatttcagttatgtatggatttagcacgtttgggaagcatgagctcatatgatttcagtactgtagtgtcagtactattagtttcaataagatcaatctctagatctatagaatcaaaacacgataggtcagaagataatgaatatctgtaggcttcttgttgtactgtaacttctggttttgttagatggttgcatcgtgctttaacgtcaatggtacaaattttatcctcgctttgtgtatcatattcgtccctactataaaattgtatattcagattatcatgcgatgtgtatacgctaacggtatcaataaacggagcacaccatttagtcataaccgtaatccaaaaatttttaaagtatatcttaacgaaagaagttgtgtcattgtctacggtgtatggtactagatcctcataagtgtatatatctagagtaatgtttaatttattaaatggttgataatatggatcctcgtgacaatttccgaagatggaaataagacataaacacgcaataaatctaattgcggacatggttactccttaaaaaaatacgaataatcaccttggctatttagtaagtgtcatttaacactatactcatattaatccatggactcataatctctatacgggattaacggatgttctatatacggggatgagtagttctcttctttaactttatactttttactaatcatatttagactgatgtatgggtaatagtgtttgaagagctcgttctcatcatcagaataaatcaatatctctgtttttttgttatacagatgtattacagcctcatatattacgtaatagaacgtgtcatctaccttattaactttcaccgcatagttgtttgcaaatacggttaatcctttgacctcgtcgatttccgaccaatctgggcgtataatgaatctaaactttaattgcttgtaatcattcgaaataatttttagtttgcatccgtagttatcccctttatgtaactgtaaatttctcaacgcgatatctccattaataatgatgtcgaattcgtgctgtatacccatactgaatggatgaacgaataccgacggcgttaatagtaatttactttttcatctttacatattgggtactagttttactatcataagtttataaattccacaagctactatggaataagccaaccatcttagtataccacacatgtcttaaagtttattaattaattacatgttgttttatatatatcgctacgaatttaaagagaaattagtttaggaagaaaaattatctatctacatcatcacgtctctgtattctacgatagagtgctactttaagatgcgacagatccgtgtcatcaaatatatactccattaaaatgattattccggcagcgaacttgatattggatatatcacaacctttgttaatatctacgacaatagacagcagtcccatggttccataaacagtgagtttatctttctttgaagagatattttgtagagatcttataaaactgtcgaatgacatcgcatttatatctttagctaaatcgtatatgttaccatcgtaatatctaaccgcgtctatcttaaacgtttccatcgctttaaagacgtttccgatagatggtctcatttcatcagtcatactgagccaacaaatataatcgtgtataacatctttgatagaatcagactctaaagaaaacgaatcggctttattatacgcattcatgataaacttaatgaaaaatgtttttcgttgtttaagttggatgaatagtatgtcttaataattgttattatttcattaattaatatttagtaacgagtacactctataaaaacgagaatgacataactaatcataactagttatcaaagtgtctaggacgcgtaattttcatatggtatagatcctgtaagcattgtctgtattctggagctattttctctatcgcattagtgagttcagaatatgttataaatttaaatcgaataacgaacataactttagtaaagtcgtctatattaactcttttattttctagccatcgtaataccatgtttaagatagtatattctctagttactacgatctcatcgttgtctagaatatcacatactgaatctacatccaattttagaaattggtctgtgttacatatctcttctatattattgttgatgtattgtcgtagaaaactattacgtagaccattttctttataaaacgaatatatagtactccaattatctttaccgatatatttgcacacataatccattctctcaatcactacatctttaagattttcgttgttaagatatttggctaaactatataattctattagatcatcaacagaatcagtatatatttttctagatccaaagacgaactctttggcgtcctctataatattcccagaaaagatattttcgtgttttagtttatcgagatctgatctgttcatatacgccatgattgtacggtacgttatgataaccgcataaaataaaaatccattttcatttttaaccaatactattcataattgagattgatgtaatactttgttactttgaacgtaaagacagtacacggatccgtatctccaacaagcacgtagtaatcaaatttggtgttgttaaacttcgcaatattcatcaatttagatagaaacttatactcatcatctgttttaggaatccatgtattattaccactttccaacttatcattatcccaggctatgtttcgtccatcatcgttgcgcagagtgaataattcttttgtattcggtagttcaaatatatgatccatgcatagatcggcaaagctattgtagatgtgatttttcctaaatctaatataaaactcgtttactagcaaacactttcctgatttatcgaccaagacacatatggtttctaaatctatcaagtggtggggatccatagttatgacgcagtaacatatattattacattcttgactgtcgctaatatctaaatatttattgttatcgtattggattctgcatatagatggcttgtatgtcaaagatatagaacacataaccaatttatagtcgcgctttacattctcgaatctaaagttaagagatttagaaaacattatatcctcggatgatgttatcactgtttctggagtaggatatattaaagtctttacagatttcgtccgattcaaataaatcactaaataatatcccacattatcatctgttagagtagtatcattaaatctattatattttatgaaagatatatcactgctcacctctatatttcgtacatttttaaactgtttgtataatatctctctgatacaatcagatatatctattgtgtcggtagacgataccgttacatttgaattaatggtgttccattttacaacttttaacaagttgaccaattcatttctaatagtatcaaactctccatgattaaatattttaatagtatccattttatatcactacggacacaaagtagctgacataaaccattgtataatttttatgttttatgtttattagcgtacacattttggaagttccggcttccatgtatttcctggagagcaagtagatgatgaggaaccagatagtttatatccgtacttgcacttaaagtctacattgtcgttgtatgagtatgatcttttaaacccgctagacaagtatccgtttgatattgtaggatgtggacatttaacaatctgacacgtgggtggatcggaccattctcctcctgaacacaggacactagagttaccaatcaacgaatatccactattgcaactataagttacaacgctcccatcggtataaaaatcctcgtatccgttatgtcttccgttggatatagatggaggggattggcatttaacagattcacaaataggtgcctcgggattccataccatagatccagtagatcctaattcacaatacgatttagattcaccgatcaactgatatccgctattacaagagtacgttatactagagccaaagtctactccaccaatatcaagttggccattatcgatatctcgaggcgatgggcatctccgtttaatacattgattaaagagtgtccatccagtacctgtacatttagcatatataggtcccattttttgctttctgtatccaggtagacatagatattctatagtgtctcctatgttgtaattagcattagcatcagtctccacactattcttaaatttcatattaatgggtcgtgacggaatagtacagcatgatagaacgcatcctattcccaacaatgtcaggaacgtcacgctctccaccttcatatttatttatccgtaaaaatgttatcctggacatcgtacaaataataaaaagcccatatatgttcgctattgtagaaattgtttttcacagttgctcaaaaacgatggcagtgacttatgagttacgttacactttggagtctcatctttagtaaacatatcataatattcgatattacgagttgacatatcgaacaaattccaagtatttgattttggataatattcgtattttgcatctgctataattaagatataatcaccgcaagaacacacgaacatctttcctacatggttaaagtacatgtacaattctatccatttgtcttccttaactatatatttgtatagataattacgagtctcgtgagtaattccagtaattacatagatgtcgccgtcgtactctacagcataaactatactatgatgtctaggcatgggagacttttttatccaacgatttttagtgaaacattccacatcgtttaatactacatatttctcatacgtggtataaactccacccattacatatatatcatcgtttacgaataccgacgcgcctgaatatctaggagtaattaagtttggaagtcttatccatttcgaagtgccgtgtttcaaatattctgccacacccgttgaaatagaaaattctaatcctcctattacatataactttccatcgttaacacaagtactaacttctgattttaacgacgacatattagtaaccgttttccattttttcgttttaagatctacccgcgatacggaataaacatgtctattgttaatcatgccgccaataatgtatagacaattatgtaaaacatttgcattatagaattgtctatctgtattaccgactatcgtccaatattctgttctaggagagtaatgggttattgtggatatataatcagagtttttaatgactactatattatgttttataccatttcgtgtcactggctttgtagatttggatatagttaatcccaacaatgatatagcattgcgcatagtattagtcataaacttgggatgtaaaatgttgatgatatctacatcgtttggatttttatgtatccactttaataatatcatagctgtaacatcctcatgatttacgttaacgtcttcgtgggataagatagttgtcagttcatcctttgataattttccaaattctggatcggatgtcaccgcagtaatattgttgattatttctgacatcgacgcattatatagttttttaattccatatcttttagaaaagttaaacatccttatacaatttgtgaaattaatattatgaatcatagtttttacacatagatctactacaggcggaacatcaattattatggcagcaactagtatcatttctacattgtttatggtgatgtttatcttcttccagcgcatatagtctaatagcgattcaaacgcgtgatagtttataccattcaatataatcgcttcatcctttagatggtgatcctgaatgcgtttaaaaaaattatacggagacgccgtaataatttccttattcacttgtataatttccccattgatagaaaatattacgctttccattcttaaagtactataagtaattatagtataatgtaaacgtttatatattcaatatttttataaaaatcattttgacattaattcctttttaaatttccgtctatcatctatagaaacgtattctatgaatttataaaatgcttttacgtgtcctatcgtaggcgatagaaccgctaaaaagcctatcgaatttctacaaaagaatctgttatatggtatagggagagtataaaacattaaatgtccgtacttattaaagtattcagtagccaatcctaactctttcgaatacttattaatggctcttgttctgtacgaatctatttttttgaacaacggacctagtggtatatcttgttctatgtatctaaaataatgtctgactagatccgttagtttaatatccgcagtcatcttgtctagaatggcaaatctaactgcgggtttaggctttagtttagtttctatatctacatctatgtctttatctaacaccaaaaatataatagctaatattttattacaatcatccggatattcttctacgatctcactaactaatgtttctttggttatactagtatagtcactatcggacaaataaagaaaatcagatgatcgatgaataatacatttaaattcatcatctgtaagatttttgagatgtctcattagaatattattagggttagtactcattatcattcggcagctattacttattttattatttttcaccatatagatcaatcattagatcatcaaaatatgtttcaatcatcctaaagagtatggtgaatgactcttcccatctaatttctgaacgttcaccaatgtctctagccactttggcactaatagcgatcattcgcttagcgtcttctatattattaactggttgatttaatctatctagcaatggaccgtcggacagcgtcattctcatgttcttaatcaatgtacatacatcgccgtcatctaccaattcatccaacaacataagctttttaaaatcatcattataataggtttgatcgttgtcatttctccaaagaatatatctaataagtagagtcctcatgcttagttaacaactattttttatgttaaatcaattagtacaccgctatgtttaatacttattcatattttagtttttaggattgagaatcaatacaaaaattaatgcatcattaattttagaaatacttagtttccacgtagtcaatgaaacatttgaactcatcgtacaggacgttctcgtacaggacgtaactataaaccggtttatatttgttcaagatagatacaaatccgataactttttttacgaattctacgggatccactttaaaagtgtcataccgggttctttttatttttttaaacagatcaatggtgtgatgttgattaggtcttttacgaatttgatatagaatagcgtttacatattctccataatggtcaatcgccatttgttcgtatgtcataaattctttaattatatgacactgtgtattatttagttcatccttgttcattgttaggaatctatccaaaatggcaattatactagaactataggtgcgttgtatacacatattgatgtgtctgtttatacaatccatgatatttggatccatgctactaccttcgggtaaaattgtagcatcatataccatttctagtactttaggttcattattatccattgcagaggacgtcatgatcgaatcataaaaaaatatattatttttatgttattttgttaaaaataatcatcgaatacttcgtaagatactccttcatgaacataatcagttacaaaacgtttatatgaagtaaagtatctacgatttttacaaaagtccggatgcataagtacaaagtacgcgataaacggaataataatagatttatctagtctatctttttctatagctttcatagttagatacatggtctcagaagtaggattatgtaacatcagcttcgataaaatgactgggttatttagtcttacacattcgctcatacatgtatgaccgttaactacagagtctacactaaaatgattgaacaatagatagtctaccattgtttcgtattcagatagtacagcgtagtacatggcatcttcacaaattatatcattgtctaatagatatttgacgcatcttatggatcccacttcaacagccatcttaaaatcatattgctttcctttatcattaataatttctagaacatcatctctatcataaaagatacaaatattaactgtttgatccgtaataacattgctagtcaatagcaatttgttaataagatgcgctgggctcaatgtcttaataagaagtgtaagaggactatctccgaatttgttttgtttattaacatccgttgatggaagtaaaagatctataatgtctacattcttgactgttttagagcatacaatatggagaggtgtatttccatcatgatctggttttgagggactaattcctagtttcatcatccatgagattgtagaagcttttggattgtctgacataagatgtctatgaatatgatttttgccaaatttatccactatcctggcttcgaatccgatggacattatttttttaaacactctttctgaaggatctgtacacgccaacaacggaccacatccttcttcatcaaccgagttgttaatcttggctccatactgtaccaataaatttattctctctatgacttcatcatctgttcccgagagataatatagaggtgttttatgctgtttatcacacgcgtttggatctgcgccgtgcgtcagcagcatcgcgactattctattattattaattttagaagctatatgcaatggataatttccatcatcatccgtctcatttggagagtatcctctatgaagaagttcttcgacaaatcgttcatctagtcctttaattccacaatacgcatgtagaatgtgataattatttccagaaggttcgatagcttgtagcatattcctaaatacatctaaatttttactattatatttggcataaagagatagataatactcggccgacataatgttgtccattgtagtataaaaattaatatttctatttctatttctgtatatttgcaacaatttactctctataacaaatatcataacttagtttttttatgtcaagaaggcactggtttagttcatctataaatgtcacgccataactaccacgcatgccatactcagaattatgataaagatatttatccttggggtgtaggtaatggggattaatctttgttggatcagtctctaagttaacacatgtcacacatgatccatttatagttatatcacacgatgatgatttatgaattgattccggaagatcgctatcgtattttgtggttccacaattcatttccatacatgttattgtcacactaatattatgatgaactttatctagccgctgagtggtaaacaacagaacagatagtttattatctttaccaacaccctcagccgctgccacaaatctctgatccgtatccatgatggtcatgtttatttctagtccgtatccagtcaacactatgttagcatttctgtcgatatagctttcactcatatgacactcaccaataatagtagaattaatgtcgtaatttacaccaatagtgagttcggcggcaaagtaccaataccggtaatcttgtcgaggaggacatatagtattcttgtattctaccgaatacccgagagatgcgatacaaaagagcaagactaatttgtaaaccatcttactcaaaatatgtaacaatagtacgatgcaatgagtaagacaataggaaatctatcttatatacacataattattctatcaattttaccaattagttagtgtaatgttaacaaaaatgtgggagaatctaattagtttttctttacacaattgacgtacatgagtctgagttccttgtttttgctaattatttcatccaatttattattcttgacgatatcgagatcttttgtataggagtcaaacttgtattcaacatgcttttctataatcattttagctatttcggcatcatccaatagtacattttccagattagcagaatagatattaatgtcgtatttgaacagagcctgtaacatctcaatgtctttattatctatagccaatttaatgtccggaatgaagagaagggaattattggtgtttgtcgacgtcatatagtcgagcaagagaatcatcatatccacgtgtccattttttatagtgatgtgaatacaactaaggagaatagccagatcaaaagtagatggtatctctgaaagaaagtaggaaacaatacttacatcattaagcatgacggcatgataaaatgaagttttccatccagttttcccatagaacatcagtctccaatttttcttaacaaacagttttaccgtttgcatgttaccactatcaaccgcataatacaatgcggtgtttcccttgtcatcaaattgtgaatcatccagtccactgaatagcaaaatctttactattttggtatcttccaatgtggctgcctgatgtaatggaaattcattctctagaagatttttcaatgctccagcgttcaacaacgtacatactagacgcacgttattatcagctattgcataatacaaggcactatgtccatggacatccgccttaaatgtatctttactagagagaaagcttttcagctgcttagacttccaagtattaattcgtgacagatccatgtctgaaacgagacgctaattagtgtatattttttcattttttataattttgtcatattgcaccagaattaataatatctttaatagatctgattagtagatacatggctatcgcaaaacaacatatacacatttaataaaaataatatttattaagaaaattcagatttcacgtacccatcaatataaataaaataatgattccttacaccgtacccatattaaggagattccaccttacccataaacaatataaatccagtaatatcatgtctgatgatgaacacaaatggtgtattaaattccagtttttcaggagatgatctcgccgtagctaccataatagtagatgcctctgctacagttccttgttcgtcgacatctatctttgcattctgaaacattttataaatatataatgggtccctagtcatatgtttaaacgacgcattatctggattaaacatactaggagccatcatttcggctatcgacttaatatccctcttattttcgatagaaaatttagggagtttaagattgtacactttattccctaattgagacgaccaatagtctaattttgcagccgtgatagaatctgtgaaatgggtcatattatcacctattgccaggtacatactaatattagcatccttatacggaaggcgtaccatgtcatattctttgtcatcgattgtgattgtatttccttgcaatttagtaactacgttcatcatgggaaccgttttcgtaccgtacttattagtaaaactagcattgcgtgttttagtgatatcaaacggatattgccatatacctttaaaatatatagtattaatgattgcccatagagtattattgtcgagcatattagaatctactacattagacataccggatctacgttctactatagaattaattttattaaccgcatctcgtctaaagtttaatctatataggccgaatctatgatattgttgataatacgacggtttaatgcacacagtattatctacgaaactttgataagttagatcagtgtacgtatatttagatgttttcagcttagctaatcctgatattaattctgtaaatgctggacccagatctctttttctcaaatccatagtcttcaataattctattctagtattacctgatgcaggcaatagcgacataaacatagaaaacgaataaccaaacggtgagaagacaatattatcatcttgaatatttttatacgctactataccggcattggtaaatccttgtagacgataggcggacgctgaacacgctaacgatagtatcaataacgcaatcatgattttatggtattaataattaaccttatttttatgttcggtataaaaaaattattgatgtctacacatccttttgtaattgacatctatatatccttttgtataatcaactctaatcactttaacttttacagttttccctaccagtttatccctatattcaacatatctatccatatgcatcttaacactctctgccaagatagcttcagagtgaggatagtcaaaaagataaatatatagagcataatcattctcgtatactctgccctttattacatcacccgcattgggcaacgaataacaaaatgcaagcatcttgttaacgggctcgtaaattgggataaaaattatgtttttattgtcttatatctattttattcaagagaatattcaggaatttctttttccggttgtatctcgtcgcagtatatatcatttgtacattgtttcatattttttaatagtttacaccttttagtaggactagtatcgtacaattcatagctgtattttgaattccaatcacgcataaaaatatcttccaattgttgacgaagacctaatccatcatccggtgtaatattaatagatgctccacatgtatccgtaaagtaatttcctgtccaatttgaggtacctatataggccgttttatcggttaccatatatttggcatggtttaccctagaatacggaatgggaggatcagcatctggtacaataaatagctttacttctatatttatgtttttagattttagcatagcgatagatcttaaaaagtttctcatgataaacgaagatcgttgccagcaactaatcaatagcttaacggatacttgtctgtctatagcggatcttcttaattcatcttctatataaggccaaaacaaaattttacccgccttcgaataaataatagggataaagttcataacagatacataaacgaatttactcgcatttctaatacatgacaataaagcggttaaatcattggttctttccatagtacatagttgttgcggtgcagaagcaataaatacagagtgtggaacgccgcttacgttaatactaagaggatgatctgtattataatacgacggataaaagtttttccaattatatggtagattgttaactccaagataccagtatacctcaaaaatttgagtgagatccgctgccaagttcctattattgaagatcgcaatacccaattccttgacctgagttagtgatctccaatccatgttagcgcttcctaaataaatatgtgtattatcagatatccaaaattttgtatgaagaactcctcctaggatatttgtaatatctatgtatcgtacttcaactccggccatttgtagtctttcaacatcctttaatggtttgttagatttattaacggctactctaactcgtactcctcttttgggtaattgtacaatctcgtttaatattatcgtgccgaaattcgtacccacttcatccgataaactccaataaaaagatgatatatctagtgtttttgtggtattggatagaatttccctccacatgttaaatgtagacaaatatactttatcaaattgcatacctataggaatagtttctgtaatcactgcgattgtattatccggattcattttatttgttaaaagaataatcctatatcacttcactctattaaaaatccaagtttctatttctttcatgactgattttttaacttcatccgtttccttatgaagatgatgtttggcaccttcataaatttttatttctctattacaatttgcatgttgcatgaaataatatgcacctaaaacatcgctaatcttattgtttgttccctggagtatgagagtcggggggtgttaatcttggaaattatttttctaaccttgttggtagccttcaagacctgactagcaaatccagccttaattttttcatgattgactaatgggtcgtattggtatttataaactttatccatatctctagatactgattctggacatagctttccgactggcgcatttggtgtgatggttcccataagtttggcagctagcagattcagtcttgaaacagcatctgcattaactagaggagacattagaatcattgctgtaaacaagtttggattatcgtaagaggctagctcccatggaatgacccaataagtagatttaatagttaccacgtgctgtaccaaagtcatcaatcatcattttttcaccattacttcttccatgtccaatatgatcatgtgagaatactaaaattcctaacgatgatatgttttcagctagttcgtcataacgtccagaatgtttaccagctccatgacttatgaatactaatgccttaggatatgtaataggtttccaatatttacaatatatgtaatcattgtccagattgaacatacagtttgcactcatgattcacgttatataactatcaatattaacagttcgtttgatgatcatattatttttatgttttattgataattgtaaaaacatacaattaaatcaatatagaggaaggagacggctactgtcttttgtaagatagtcatggcgactaaattagattatgaggatgctgttttttactttgtggatgatgataaaatatgtagtcgcgactccatcatcgatctaatagatgaatatattacgtggagaaatcatgttatagtgtttaacaaagatattaccagttgtggaagactgtacaaggaattgatgaagttcgatgatgtcgctatacggtactatggtattgataaaattaatgagattgtcgaagctatgagcgaaggagaccactacatcaattttacaaaagtccatgatcaggaaagtttattcgctaccataggaatatgtgctaaaatcactgaacattggggatacaaaaagatttcagaatctagattccaatcattgggaaacattacagatttgatgaccgacgataatataaacatcttgatactttttctagaaaaaaaattgaattgatgatataggggtcttcataacgcataattattacgttagcattctatatccgtgttaaaaaaaattatcctatcatgtatttgagagttttatatgtagcaaacatgatagctgtgatgccaataagctttagatattcacgcgtgctagtgttagggatggtattatctggtggtgaaatgtccgttatataatctacaaaacaatcatcgcatatagtatgcgatagtagagtaaacatttttatagtttttactggattcatacatcgtctacccaattcggttataaatgaaattgtcgccaatcttacacccaaccccttgttatccattagcatagtattaacttcgttatttatgtcataaactgtaaatgattttgtagatgccatatcatacatgatattcatgtccctattataatcattactaactttatcacaatatatgttgataatatctatatatgatctagtctttgtgggcaactgtctatacaagtcgtctaaacgttgtttactcatatagtatcgaacagccatcattacatggtcccgttccgttgatagataatcgagtatgttagtggacttgtcaaatctatataccatattttctggaagtggatatacatagtcgtgatcaacattattgctagcctcatcttctatatcctgtactataccattatctatatcatctacataatctatgatattattacacataaacatcgacaacatactattgtttattatctaagtcctgttgatccaaacccttgatctcctctatttgtactatctagagattgtacttcttccagttctggataatatatacgttgatagattagctgagctattctatctccagtatttacattaaacgtacattttccattattaataagaatgactcctatgtttcccctataatcttcgtctattacaccacctcctatatcaatgccttttagtgacagaccagacctaggagctattctaccatagcagaacttaggcatggacatactaatatctgtcttaattaactgtctttctcctggagggatagtataatcgtaagcgctatacaaatcatatccggcagcacccggcgattgcctagtaggagatttagctctgttagtttccttaacaaatctaactggtgagttaatattcatgttgaacataaaactaatattttatttcaaaattatttaccatcccatatattccatgaataagtgtgatgattgtacacttctatagtatctatatacgatccacgataaaatcctcctatcaatagcagtttattatccactatgatcaattctggattatccctcggataaataggatcatctatcagagtccatgtattgctggattcacaataaaattccgcatttctaccaaccaagaataaccttctaccgaacactaacgcgcatgatttataatgaggataataagtggatggtccaaactgccactgatcatgattgggtagcaaatattctgtagttgtatcagtttcagaatgtcctcccattacgtatataacattgtttatggatgccactgctggattacatctaggtttcagaagactcggcatattaacccaagcagcatccccgtggaaccaacgctcaacagatgtgggatttggtagacctcctactacgtataatttattgttagcgggtatcccgctagcatacagtctggggctattcatcggaggaattggaatccaattgtttgatatataatttacagctatagcattgttatgtatttcattgttcatccatccaccgatgagatatactacttctccaacatgagtacttgtacacatatggaatatatctataatttgatccatgttcataggatactctatgaatggatacttgtatgatttgcgtggttgtttatcacaatgaaatattttggtacagtctagtatccattttacattatttatacctctgggagaaagataatttgacctgattacatttttgataaggagtagcagatttcctaatttatttcttcgcctcatataccacttaatgacaaaatcaactacataatcctcatctggaacatttagttcatcgctttctagaataagtttcatagatagataatcaaaattgtctatgatgtcatcttccagttccaaaaagtgtttggcaataaagtttttagtatgacataagagattggatagtccgtattctatacccatcatgtaacactcgacacaatattcctttctaaaatctcgtaagataaagtttatacaagtgtagatgataaattctacagaggttaatatagaagcacgtaataaattgacgacgttatgactatctatatatacctttccagtatatgagtaaataactatagaagttaaactgtgaatgtcaaggtctagacaaacccttgtaactggatctttatttttcgtgtatttttgacgtaaatgtgtgcgaaagtaaggagataactttttcaatatcgtagaattgactattatattgcctcctatggcatcaataattgttttgaatttcttagtcatagacaatgctaatatattcttacagtacacagtattgacaaatatcggcatttatgtttctttaaaagtcaacatctagagaaaaatgattatctttttgagacataactcccattttttggtattcacccacacgtttttcgaaaaaattagtttttccttccaatgatatattttccatgaaatcaaacggattggtaacattataaatttttttaaatcccaattcagaaatcaatctatccgcgacgaattctatatatgttttcatcatttcacaattcattcctataagtttaactggaagagccgcagtaagaaattcttgttcaatggatactgcatctgttataatagatctaacggtttcttcactcggtggatgcaataaatgtttaaacatcaaacatgcgaaatcgcagtgcagaccctcgtctctactaattagttcgttggaaaacgtgagtccgggcattaggccacgctttttaagccaaaatatggaagcgaatgatccagaaaagaaaattccttctactgcagcaaaggcaataagtctctctccataaccggcgctgtcatgtatccacttttgagcccaatcggccttcttttttacacaaggcatcgtttctatggcattaaagagatagtttttttcattactatctttaacataagtatcgatcaaaagactatacatttccgaatgaatgttttcaatggccatctgaaatccgtagaaacatctagcctcggtaatctgtacttctgtacaaaatcgttccgccaaattttcattcactattccgtcactggctgcaaaaaacgccaatacatgttttataaaatatttttcgtctggtgttagtttattccaatcattgatatctttagatatatctacttcttccactgtccaaaatgatgcctctgcctttttatacatgttccagatgtcatgatattggattgggaaaataacaaatctatttggatttggtgcaaggatgggttccataactaaattaacaataacaataaattttttttcagttatctatatgcctgtacttggattttttgtacatcgatatcgccgcaatcactacaataattacaagtattattgatagcattgttattagtactatcataattaaattatctacattcatgggtgctgaataatcgttattatcatcattatcattttgtaattgtgacatcatactagataaatcgtttgcgagattgttgtgggaagcgggcatggaggatgcattatcattattatttaacgccttccatttggattcacaaatgttacgcacattcaacattttatggaaactataattttgtgaaaacaaataacaagaaaactcgtcatcgttcaaatttttaacgatagtaaaccgattaaacgtcgagctaatttctaacgctagcgactctgttggatatgggtttccagatatatatcttttcagttcccctacgtatctataatcatctgtaggaaatggaagatatttccatttatctactgttcctaatatcatatgtggtggtgtagtagaaccattaagcgcgaaagatgttatttcgcatcgtattttaacttcgcaataatttctggttagataacgcactctaccagtcaagtcaatgatattagcctttacagatatattcatagtagtcgtaacgatgactccatcttttagatgcgatactcctttgtatgtaccagaatcttcgtacctcaaactcgatatatttaaacaagttaatgagatattaacgcgttttatgaatgatgatatataaccagaagttttatcctcggtggctagcgctataaccttatcattataataccaactagtgtgattaatatgtgacacgtcagtgtgggtacaaatatgtacattatcgtctacgtcgtattcgatacatccgcatacagccaacaaatataaaatgacaaatactctaacgccgttcgtacccatcttgatgcggtttaataaatgttttgatttcaatttattgtaaaaaaagattcggttttatactgttcgatattctcattgcttatattttcatctatcatctccacacagtcaaatccgtggttagcatgcacctcatcaaccggtaaaagactatcggactcttctatcattataactctagaatatttaatttggtcattattaatcaagtcaattatcttatttttaacaaacgtgagtattttactcattttttataaaaacttttagaaatatacagactctatcgtgtgtctatatcttctttttatatccaatgtatttatgtctgatttttcttcatttatcatatataatggtccaaattctacacgtgcttcggattcatccagatcattaaggttcttataattgtaacatccttctcttccctcttctacatcttccttcttattcttattcttagcgtcacagaatctaccacagcaggatcccatgacgagcgtcatattaaactaatccattttcaattataatatatgattagtaatgaccattaaaataaaaaatattcttcataaccggcaagaaagtgaaaagttcacattgaaactatgtcagtagtatacatcatgaaatgatgatatatatatactctattttggtggaggattatatgatataattcgtggataatcatttttaagacacatttctttattcgtaaatcttttcacgttaaatgagtgtccatattttgcaatttcttcatatgatggcggtgtacgtggacgaggctgctcctgttcttgttgtggtcgccgactgtcgtgtctgcgtttagatccctccattatcgcgattgcgtagatggagtactattttataccttgtaattaaatttttttattaattaaacgtataaaaacgttccgtatctgtatttaagagccagatttcgtctaatagaacaaatagctacagtaaaaataactagaataattgctacacccactagaaaccacggatcgtaatacggcaatcggttttcgataataggtggaacgtatattttatttaaggacttaacaattgtctgtaaaccacaatttgcttccgcggatcctgtattaactatctgtaaaagcatatgttgaccgggcggagccgaacattctccgatatctaatttctgtatatctataatattattaacctccgcatacgcattacagttcttttctagcttggataccgcactaggtacatcgtctagatctattcctatttcctcagcgatagctcttctatccttttccggaagcaatgaaatcacttcaataaatgattcaaccatgagtgtgaaactaagtcgagaattactcatgcatttgttagttattcggagcgcgcaatttttaaactgtcctataacctctcctatatgaatagcacaagtgacattagtagggatagaatgttgagctaatttttgtaaataactatctataaaaagattatacaaagttttaaactctttagtttccgccatttatccagtctgagaaaatgtctctcataataaatttttccaagaaactaattgggtgaagaatggaaacctttaatctatatttatcacagtctgttttggtacacatgatgaattcttccaatgccgtactaaattcgatatctttttcgatttctggatatgtttttaataaagtatgaacaaagaaatggaaatcgtaataccagttatgtttaactttgaaattgttttttattttcttgttaatgattccagccacttgggaaaagtcaaagtcgtttaatgccgatttaatacgttcattaaaaacaaactttttatcctttagatgaattattattggttcattggaatcaaaaagtaagatattatcgggtttaagatctgcgtgtaaaaagttgtcgcaacagggtagttcgtagattttaatgtataacagagccatctgtaaaaagataaactttatgtattgtaccaaagatttaaatcctaatttgatagctaactcggtatctactttatctgccgaatacagtgctaggggaaaaattataatgtttcctctttcatattcgtagttagttctcttttcatgttcgaaaaagtgaaacatgcggttaaaatagtttataacattaatattactgttaataactgccggataaaagtgggatagtaatttcacgaatttgatactgtcctttctctcgttaaacgcctttaaaaaaactttagaagaatatctcaatgagagttcctgaccatccatagtttgtatcaataatagcaacatatgaagaacacgtttatacagagtatgtaaaaatgttaatttatagtttaatcccatggcccacgcacacacgattaattttttttcatctccctttagattgttgtatagaaatttgggtactgtgaactccgccgtagtttccatgggactatataattttgtggcctcgaatacaaattttactacatagttatctatcttaaagactataccatatcctcctgtagatatgtgataaaaatcgtcgtttataggataaaatcgtttatccttttgttggaaaaaggatgaattaatgtaatcattctcttctatctttagtagtgtttccttattaaaattcttaaaataatttaacaatctaactgacggagcccaattttggtgtaaatctaattgggacattatattgttaaaatacaaacagtctcctaatataacagtatctgataatctatggggagacatccattgatattcaggggatgaatcattggcaacacccatttattgtacaaaaagccccaatttacaaacgaaagtccaggtttgatagagacaaacaattaactattttgtctctgtttttaacacctccacagtttttaatttctttagtaatgaaattattcacaatatcagtatcttctttatctaccagagattttactaacttgataaccttggctgtctcattcaatagggtagtaatatttgtatgtgtgatattgatatctttttgaattgtttcttttagaagtgattctttgatggtgccagcatacgaattacaataatgcagaaactcggttaacatgcaggaattatagtaagccaattccaattgttgcctgtgttgtattagagtgtcaatatgagcaatggtgtccttgcgtttctctgatagaatgcgagcagcgattttggcgttatcatttgacgatatttctggaatgacgaatcctgtttctactaactttttggtaggacaaagtgaaacaatcaagaagatagcttctcctcctatttgtggaagaaattgaactcctctagatgatctactgacgatagtatctccttgacagatattggaccgaattacagaagtacctggaatgtaaagccctgaaaccccctcattttttaagcagattgttgccgtaaatcctgcactatgcccaagatagagagctcctttggtgaatccatctctatgtttcagtttaaccaagaaacagtcagctggtctaaaatttccatctctatctaatacagcatctaacttgatgtcaggaactatgaccggtttaatgttatatgtaacattgagtaaatccttaagttcataatcatcactgtcatcagttatgtacgatccaaacaatgtttctaccggcatagtggatacgaagatgctatccatcagaatgtttccctgattagtattttctatatagctattcttctttaaacgattttccaaatcagtaactatgttcatttttttaggagtaggacgcctagccagtatggaagaggattttctagatcctctcttcaacatctttgatctcgatggaatgcaaaaccccatagtgaaacaaccaacgataaaaataatattgtttttcactttttataattttaccatctgactcatggattcattaatatctttataagagctactaacgtataattctttataactgaactgagatatatacaccggatctatggtttccataattgagtaaatgaatgctcggcaataactaatggcaaatgtatagaacaacgaaattatactagagttgttaaagttaatattttctatgagctgttccaataaattatttgttgtgactgcgttcaagtcataaatcatcttgatactatccagtaaaccgtttttaagttctggaatattatcatcccattgtaaagcccctaattcgactatcgaatatcctgctctgatagcagtttcaatatcgacggacgtcaatactgtaataaaggtggtagtattgtcatcatcgtgataaactacgggaatatggtcgttagtaggtacggtaactttacacaacgcgatatataactttccttttgtaccatttttaacgtagttgggacgtcctgcagggtattgttttgaagaaatgatatcgagaacagatttgatacgatatttgttggattcctgattattcactataatataatctagacagatagatgattcgataaatagagaaggtatatcgttggtaggataatacatccccattccagtattctcggatactctattgatgacactagttaagaacatgtcttctattctagaaaacgaaaacatcctacatggactcattaaaacttctaacgctcctgattgtgtctcgaatgcctcgtacaaggatttcaaggatgccatagattctttgaccaacgatttagaattgcgtttagcatctgatttttttattaaatcgaatggtcggctctctggtttgctaccccaatgataacaatagtcttgtaaagataaaccgcaagaaaatttatacgcatccatccaaataaccctagcaccatcggatgatattaatgtattattatagattttccatccacaattattgggccagtatactgttagcaacggtatatcgaatagattactcatgtaacctactagaatgatagttcgtgtactagtcataatatctttaatccaatctaaaaaatttaaaattagattttttacactgttaaagttaacaaaagtattacccgggtacgtggatatcatatatggcattggtccattatcagtaatagctccataaactgatacggcgatggtttttatatgtgtttgatctaacgaggaagaaattcgcgcccacaattcatctctagatatgtatttaatatcaaacggtaacacatcaatttcgggacgcgtatatgtttctaaatttttaatccaaatataatgatgacctatatgccctattatcatactgtcaactatagtacacctagggaacttacgatacatctgtttcctataatcgttaaattttacaaatctataacatgctaaaccttttgacgacagccattcattaatttctgatatggaatctgtattctcgataccgtatcgttctaaagccagtgctatatctccctgttcgtgggaacgctttcgtataatatcgatcaacggataatctgaagtttttggagaataatatgactcatgatctatttcgtccataaacaatctagacataggaattggaggcgatgatcttaattttgtgcaatgagtcgtcaatcctataacttctaatcttgtaatattcatcatcgacataatactatctatgttatcatcgtatattagtataccatgaccttcttcatttcgtgccaaaatgatatacagtcttaaatagttacgcaatatctcaatagtttcataattgttagctgttttcatcaaggtttgtatcctgtttaacatgatggcgttctataacgtctctattttctatttttaattttttaaatttttaacgatttactgtggctagatacccaatctctctcaaatatttttttagcctcgcttacaagctgtttatctatactattaaaactgacgaatccgtgattttggtaatgggttccgtcgaaatttgccgaagtgatatgaacatattcgtcgtcgactatcaacaattttgtattattctgaatagtgaaaaccttcacagatagatcattttgaacacacaacgcatctagacttttggcggttgccatagaatatacgtcgttcttatcccaattaccaactagaagtctgatcttaactcctctattaatggctgcttctataatggagttgtaaatgtcgggccaatagtagctattaccgtcgacacgtgtagtgggaactatggccaaatgttcaatatctatactagtcttagctgacctgagtttatcaataactacatcggtatctagatctctagaatatcccaataggtgttccggagaatcagtaaagaacactccacctataggattcttaatatgatacgcagtgctaactggcaaacaacaagccgcagagcataaattcaaccatgaattttttgcgctattaaaggctttaaaagtatcaaatcttctacgaagatctgtggccagcgggggataatcagaatatacacctaacgttttaatcgtatgtatagatcctccagtaaatgacgcgtttcctacataacatctttcatcatctgacacccaaaaacaaccgagtagtagtcccacattattttttttatctatattaacggttataaaatttatatccgggcagtgactttgtagctctcccagatttcttttccctcgttcatctagcaaaactattattttaatccctttttcagatgcctcttttagtttatcaaaaataagcgctcccctagtcgtactcagaggattacaacaaaaagatgctatgtatatatatttcttagctagagtgataatttcgttaaaacattcaaatgttgttaaatgatcggatctaaaatccatattttctggtagtgtttctaccagcctacattttgctcccgcaggtaccgatgcaaatggccacatttagttaacataaaaacttatacatcctgttctatcaacgattctagaatatcatcggctatatcgctaaaattttcatcaaagtcgacatcacaacctaactcagtcaatatattaagaagttccatgatgtcatcttcgtctatttctatatccgtatccattgtagattgttgaccgattatcgagtttaaatcattactaatactcaatccttcagaatacaatctgtgtttcattgtaaatttataggcggtgtatttaagttggtagattttcaattatgtattaatatagcaacagtagttcttgctcctccttgattctagcatcctcttcattattttcttctacgtacataaacatgtccaatacgttagacaacacaccgacgatggcggccgcagatctcgagttatgatctacttccttaccgtgcaataaattagaatatattttctacttttacgagaaattaattattgtatttattatttatgggtgaaaaacttactataaaaagcgggtgggtttggaattagtgaaagcttaaaaattgaaattttattttttttttttggaatataaataagctcgaagtcgacagatctaggcctggtaccaggaggaggaattcagcttaaagatgacttcgaaagtttatgatccagaacaaaggaaacggatgataactggtccgcagtggtgggccagatgtaaacaaatgaatgttcttgattcatttattaattattatgattcagaaaaacatgcagaaaatgctgttatttttttacatggtaacgcggcctcttcttatttatggcgacatgttgtgccacatattgagccagtagcgcggtgtattataccagatcttattggtatgggcaaatcaggcaaatctggtaatggttcttataggttacttgatcattacaaatatcttactgcatggtttgaacttcttaatttaccaaagaagatcatttttgtcggccatgattggggtgcttgtttggcatttcattatagctatgagcatcaagataagatcaaagcaatagttcacgctgaaagtgtagtagatgtgattgaatcatgggatgaatggcctgatattgaagaagatattgcgttgatcaaatctgaagaaggagaaaaaatggttttggagaataacttcttcgtggaaaccatgttgccatcaaaaatcatgagaaagttagaaccagaagaatttgcagcatatcttgaaccattcaaagagaaaggtgaagttcgtcgtccaacattatcatggcctcgtgaaatcccgttagtaaaaggtggtaaacctgacgttgtacaaattgttaggaattataatgcttatctacgtgcaagtgatgatttaccaaaaatgtttattgaatcggatccaggattcttttccaatgctattgttgaaggcgccaagaagtttcctaatactgaatttgtcaaagtaaaaggtcttcatttttcgcaagaagatgcacctgatgaaatgggaaaatatatcaaatcgttcgttgagcgagttctcaaaaatgaacaagcggccgccgccaccatgagcaagggcgaggaactgttcactggcgtggtcccaattctcgtggaactggatggcgatgtgaatgggcacaaattttctgtcagcggagagggtgaaggtgatgccacatacggaaagctcaccctgaaattcatctgcaccactggaaagctccctgtgccatggccaacactggtcactaccttcacctatggcgtgcagtgcttttccagatacccagaccatatgaagcagcatgactttttcaagagcgccatgcccgagggctatgtgcaggagagaaccatctttttcaaagatgacgggaactacaagacccgcgctgaagtcaagttcgaaggtgacaccctggtgaatagaatcgagctgaagggcattgactttaaggaggatggaaacattctcggccacaagctggaatacaactataactcccacaatgtgtacatcatggccgacaagcaaaagaatggcatcaaggtcaacttcaagatcagacacaacattgaggatggatccgtgcagctggccgaccattatcaacagaacactccaatcggcgacggccctgtgctcctcccagacaaccattacctgtccacccagtctgccctgtctaaagatcccaacgaaaagagagaccacatggtcctgctggagtttgtgaccgctgctgggatcacacatggcatggacgagctgtacaagtgagcggccgccctgctagcaagcttgctagcggccgctcgagatctgcggccgctacagacacgaatatgactaaaccgatgaccatttaaaaacccctctctagctttcacttaaactgtatcgatcattcttttagcacatgtataatataaaaacattattctatttcgaatttaggcttccaaaaatttttcatccgtaaaccgataataatatatatagacttgttaatagtcggaataaatagattaatgcttaaactatcatcatctccacgattagagatacaatatttacattctttttgctgtttcgaaactttatcaatacacgttaatacaaacccaggaaggagatattgaaactgaggctgttgaaaatgaaacggtgaatacaataattcagataatgtaaaatcatgattccgtattctgatgatattagaactgctaatggatgtcgatggtatgtatctaggagtatctattttaacaaagcatcgatttgctaatatacaattatccttttgattaattgttattttattcatattcttaaaaggtttcatatttatcaattcttctacattaaaaatttccatttttaatttatgtagccccgcaatactcctcattacgtttcattttttgtctataatatccattttgttcatctcggtacatagattatccaattgagaagcgcatttagtagttttgtacattttaagtttattgacgaatcgtcgaaaactagttatagttaacattttattatttgataccctgatattaatacccctgccgttactattatttataactgatgtaatccacgtaacattggaattaactatcgatagtaatgcatcgacgcttccaaaattgtctattataaactcaccgataatttttttattgcatgttttcatattcattaggattatcaaatctttaatcttattacgattgtatgcgttgatattacaagacgtcattctaaaagacggaggatctccatcaaatgccagacaatcacgtacaaagtacatggaaataggttttgttctattgcgcatcatagatttatatagaacacccgtagaaatactaatttgttttactctataaaatactaatgcatctatttcatcgttttgtataacgtctttccaagtgtcaaattccaaatttttttcattgatagtaccaaattcttctatctctttaactacttgcatagataggtaattacagtgatgcctacatgccgttttttgaaactgaatagatgcgtctagaagcgatgctacgctagtcacaatcaccactttcatatttagaatatatatatgtaaaaatatagtagaatttcattttgtttttttctatgctataaatgaattctcattttgcatctgctcatactccgttttatattaataccaaagaaggaagatatctggttctaaaagccgttaaagtatgcgatgttagaactgtagaatgcgaaggaagtaaagcttcctgcgtactcaaagtagataaaccctcatcgcccgcgtgtgagagaagaccttcgtccccgtccagatgcgagagaatgaataaccctggaaaacaagttccgtttatgaggacggacatgctacaaaatatgttcgcggctaatcgcgataatgtagcttctagacttttgtcctaaaatactattatatccttttcgatattaataaatccgtgtcgtccaggttttttatctctttcagtatgtgaatagataggtattttatctctattcatcatcgaatttaagagatccgataaacattgtttgtattctccagatgtcagcatctgatacaacaatatatgtgcacataaacctctggcacttatttcatgtaccttccccttatcactaaggagaatagtatttgagaaatatgtatacatgatattatcatgaattagatatacagaatttgtaacactctcgaaatcacacgatgtgtcggcgttaagatctaatatatcactcgataacacattttcatctagatacactagacattttttaaagctaaaatagtctttagtagtaacagtaactatgcgattattttcatcgatgatacatttcatcggcatattattacgcttaccatcaaagactataccatgtgtatatctaacgtattctagcatggttgccatacgcgcattaaacttttcaggatctttggatagatcttccaatctatctatttgagaaaacatttttatcatgttcaatagttgaaacgtcggatccactatatagatattatctataaagattttaggaactacgttcatggtatcctggcgaatattaaaactatcaatgatatgattatcgttttcatcttttatcaccatatagtttctaagatatgggattttacttaatataatattatttcccgtgataaattttattagaaaggccaaatctataagaaaagtcctagaattagtctgaagaatatctatatcgccgtatagtatatttggattaattagatatagagaatatgatccgtaacatatacaacttttattatggcgtctaagatattcttccatcaacttattaacatttttgactagggaagatacattatgacgtcccattacttttgccttgtctattactgcgacgttcatagaatttagcatatctcttgccaattcttccattgatgttacattataagaaattttagatgaaattacatttggagctttaatagtaagaactcctaatatgtccgtgtatgtggtcactaatacagattgtagttctataatcgtaaataatttacctatattatatgtttgagtctgtttagaaaagtagctaagtatacgatcttttatttctgatgcagatgtattaacatcggaaaaaaatctttttttattcttttttactaaagatacaaatatgtctttgttaaaaacagttattttctgaatatttctagcttgtaattttaacatatgatattcgttcacactaggtactctgcctaaataggtttctataatctttaatgtaatattaggaaaagtattctgatcaggattcctattcattttgaggatttaaaactctgattattgtctaatatggtctctacgcaaactttttcacagagcgatagagtttttgataactcgtttttcttaagaaatataaaactactgtctccagagctcgctctatcttttattttatctaattcgatacaaactcctgatactggttcagaaagtaattcattaattttcagtcctttatagaagatatttaatatagataatacaaaatcttcagtttttgatatcgatctgattgatcctagaactagatatattaataacgtgctcattaggcagtttatggcagcttgataattagatatagtatattccagttcatatttattagataccgcattgcccagattttgatattctatgaattcctctgaaaataaatccaaaataactagacattctattttttgtggattagtgtactctcttccctctatcatgttcactactggtgtccacgatgataaatatctagagggaatataatatagtccataggatgccaatctagcaatgtcgaataactgtaattttattcttcgctcttcattatgaattgattcttgaggtataaacctaacacaaattatattattagacttttcgtatgtaatgtctttcatgttataagtttttaatcctggaatagaatctattttaatgaggcttttaaacgcagagttctccaacgagtcaaagcataatactctgttgtttttcttatatacgatgttacgattttcttctttgaatggaataggtttttgaattagtttataattacaacataatagataaggaagtgtgcaaatagtacgcggaaaaaacataatagctcccctgttttcatccatggttttaagtaaatgatcactggcttctttagtcaatggatattcgaacattaaccgtttcatcatcattggacagaatccatatttcttaatgtaaagagtgatcaaatcattgtgtttattgtaccatcttgttgtaaatgtgtattcggttatcggatctgctcctttttctattaaagtatcgatgtcaatctcgtctaagaattcaactatatcgacatatttcatttgtatacacataaccattactaacgtagaatgtataggaagagatgtaacgggaacagggtttgttgattcgcaaactattctaatacataattcttctgttaatacgtcttgcacgtaatctattatagatgccaagatatctatataattattttgtaagatgatgttaactatgtgatctatataagtagtgtaataattcatgtattttgatatatgttccaactctgtctttgtgatgtctagtttcgtaatatctatagcatcctcaaaaaatatattcgcatatattcccaagtcttcagttctatcttctaaaaaatcttcaacgtatggaatataataatctattttacctcttctgatatcattaatgatatagtttttgacactatcttctgtcaattgattcttattcactatatctaagaaacggatagcgtccctaggacgaactactgccattaatatctctattatagcttctggacataattcatctattataccagaattaatgggaactattccgtatctatctaacatagttttaagaaagtcagaatctaagacttgatgttcatatattggttcatacatgaaatgatctctattgatgatagtgactatttcattctctgaaaattggtaactcattctatatatgctttccttgttgatgaaggatagaatatactcaatagaatttgtaccaacaaactgttctcttatgaatcgtatatcatcatctgaaataatcatgtaaggcatacatttaacaattagagacttgtctcctgttatcaatatactattcttgtgataatttatgtgtgaggcaaatttgtccacgttctttaattttgttatagtagatatcaaatccaatggagctacagttcttggcttaaacagatatagtttttctggaacaaattctacaacattattataaaggactttgggtagataagtgggatgaaatcctattttaattaatgcgatagccttgtcctcgtgcagatatccaaacgcttttgtgatagtatggcattcattgtctagaaacgctctacgaatatctgtgacagatatcatctttagagaatatactagtcgcgttaatagtactacaatttgtattttttaatctatctcaataaaaaaattaatatgtatgattcaatgtataactaaactactaactgttattgataactagaatcagaatctaatgatgacgtaaccaagaagtttatctactgccaatttagctgcattatttttagcatctcgtttagattttccatcggccttatcgaatactcttccgtcgatgtctacacaggcataaaatgtaggagagttactaggcccaactgattcaatacgaaaagaccaatctctcctagtaatttggcagtactcattaataacggtgacagggttagcatctttccaatcaataatttttttagccggaataacatcatcaaaagacttatgatcctctctcattgatttttcgcgggatacatcatctattatgacgtcagccatagcatcagcatccggcttatccgcctccgttgtcataaaccaacgaggaggaatatcgtcggagctgtacaccatagcactacgttgaagatcgtacagagctttattaacttctcgcttctccatattaagttgtctagttagttgtgcagcagtagctccttcgattccaatgtttttaatagccgcacacacaatctctgcgtcagaacgctcgtcaatatagatcttagacatttttagagagaactaacgcaaccagcaataaaactgaacctactttatcatttttttattcatcatcctctggtggttcgtcgttcctatcaaatgtagctctgattaacccgtcatctataggtgatgctggttctggagattctggaggagatggattattatctggaagaatctctgttatttccttgttttcatgtatcgattgcgttgtaacattaagattgcgaaatgctctaaatttgggaggcttaaagtgttgtttgcaatctctacacgcgtgtctaactagtggaggttcgtcagctgctctagtttgaatcatcatcggcgtagtattcctacttttacagttaggacacggtgtattgtatttctcgtcgagaacgttaaaataatcgttgtaactcacatcctttattttatctatattgtattctactcctttcttaatgcattttataccgaataagagatagcgaaggaattctttttcggtgccgctagtacccttaatcatatcacatagtgttttatattccaaatttgtggcaatagacggtttatttctatacgatagtttgtttctggaatcctttgagtattctataccaatattattctttgattcgaatttagtttcttcgatattagattttgtattacctatattcttgatgtagtactttgatgatttttccatggcccattctattaagtcttccaagttggcatcatccacatattgtgatagtaattctcggatatcagtagcggctaccgccattgatgtttgttcattggatgagtaactactaatgtatacattttccatttataacacttatgtattaactttgttcatttatattttttcattattatgttgatattaacaaaagtgaatatatatatgttaataattgtattgtggttatacggctacaattttataatgagtgaaagtcagtgtccgatgatcaatgacgatagctttactctgaaaagaaagtatcaaatcgatagtgcggagtcaacaataaaaatggataagaagaggataaagtttcagaatagagccaaaatggtaaaagaaataaatcagacaataagagcagcacaaactcattacgagacattgaaactaggatacataaaatttaagagaatgattatgactactactctagaagatatagcaccatctattccaaataatcagaaaacttataaactattctcggacatttcagccatcggcaaagcatcacagaatccgagtaagatggtatatgctctgctgctttacatgtttcccaatttgtttggagatgatcatagattcattcgttatagaatgcatccaatgagtaaaatcaaacacaagatcttctctcctttcaaacttaatcttattagaatattagtggaagaaagattctataataatgaatgcagatctaataaatggagaataattggaacacaagttgataaaatgttgatagctgaatctgataaatatacaatagatgcaaggtataacctaaaacccatgtatagaatcaagggagaatctgaagaagataccctctttatcaaacagatggtagaacaatgtgtgacatcccaggaattggtggaaaaagtgttgaagatactgtttagagatttgttcaagagtggagaatacaaagcgtacagatacgatgatgatgtagaaaatggatttattggattggatacactaaaattaaacattgttcatgatatagttgaaccatgtatgcctgttcgtaggccagtggctaagatactgtgtaaagaaatggtaaataaatactttgagaatccgctacatattattggtaaaaatcttcaagagtgcattgactttgttagtgaataggcatttcatctttctccaatactaattcaaattgttaaattaataatggatagtataaatagttattagttataagatagtaaaaataattattagaataagagtgtagtatcatagataactctcttctataaaaatggattttattcgtagaaagtatcttatatacacagtagaaaataatatagattttttaaaggatgatacattaagtaaagtaaacaattttaccctcaatcatgtactagctctcaagtatctagttagcaattttcctcaacacgttattactaaggatgtattagctaataccaatttttttgttttcatacatatggtacgatgttgtaaagtgtacgaagcggttttacgacacgcatttgatgcacccacgttgtacgttaaagcattgactaagaattatttatcgtttagtaacgcaatacaatcgtacaaggaaaccgtgcataaactaacacaagatgaaaaatttttagaggttgccgaatacatggacgaattaggagaacttataggcgtaaattatgacttagttcttaatccattatttcacggaggggaacccatcaaagatatggaaatcatttttttaaaactgtttaagaaaacagacttcaaagttgttaaaaaattaagtgttataagattacttatttgggcatacctaagcaagaaagatacaggcatagagtttgcggataatgatagacaaaatatatacactctatttcaacaaactggtagaatcgtccatagcaatctaacagaaacgtttagagattatatctttcccggagataagactagctattgggtgtggttaaacgaaagtatagctaatgatgcggatatcgttcttaatagacacgccattaccatgtatgataaaattcttagttatatatactctgagataaaacaaggacgcgttaataaaaacatgcttaagttagtttatatctttgagcctgaaaaagatatcagagaacttctgctagaaatcatatatgatattcctggagatatcctatctattattgatgcaaaaaacgacgattggaaaaaatattttattagtttttataaagctaattttattaacggtaatacatttattagtgatagaacgtttaacgaggacttattcagagttgttgttcaaatagatcccgaatatttcgataatgaacgaattatgtctttattctctacgagtgctgcggacattaaacgatttgatgagttagatattaataacagttatatatctaatataatttatgaggtgaacgatatcacattagatacaatggatgatatgaagaagtgtcaaatctttaacgaggatacgtcgtattatgttaaggaatacaatacatacctgtttttgcacgagtcggatcccatggtcatagagaacggaatactaaagaaactgtcatctataaaatccaagagtagacggctgaacttgtttagcaaaaacattttaaaatattatttagacggacaattggctcgtctaggtcttgtgttagatgattataaaggagacttgttagttaaaatgataaaccatcttaagtctgtggaggatgtatccgcattcgttcgattttctacagataaaaaccctagtattcttccatcgctaatcaaaactattttagctagttataatatttccatcatcgtcttatttcaaaggtttttgagagataatctatatcatgtagaagaattcttggataaaagcatccatctaaccaagacggataagaaatatatacttcaattgataagacacggtagatcatagaacagaccaaatatattattaataatttgtatatacatagatataattatcacacatttttgataaatgggaactgctgcaacaattcagactcccaccaaattaatgaataaagaaaatgcagaaatgattttggaaaaaattgttgatcatatagttatgtatattagtgacgaatcaagtgattcagaaaataatcctgaatatattgattttcgtaacagatacgaagactatagatctctcattataaaaagtgatcacgagtttgtaaagctatgtaaaaatcatgcggagaaaagttctccagaaacgcaacaaatgattatcaaacacatatacgaacaatatcttattccagtatctgaagtactattaaaacctataatgtccatgggtgacataattacatataacggatgtaaagacaatgaatggatgctagaacaactctctaccctaaactttaacaatctccgcacatggaactcatgtagcataggcaatgtaacgcgtctgttttatacattttttagttatctgatgaaagataaactaaatatataagtataatcccattctaatactttaacctgatgtattagcatcttattagaatattaacctaactaaaagacataacataaaaactcattacatagttgataaaaagcggtaggatataaatattatggctgccaccgttccgcgttttgacgacgtgtacaaaaatgcacaaagaagaattctagatcaagaaacattttttagtagaggtctaagtagaccgttaatgaaaaacacatatctatttgataattacgcgtatggatggataccagaaactgcaatttggagtagtagatacgcaaacctagatgctagtgactattatcccatttcgttgggattacttaaaaagttcgagtttctcatgtctctatataaaggtcctattcccgtatatgaagaaaaagtaaatactgaattcatagccaatggatcgttctctggtagatacgtatcatatcttcgaaagttttctgcccttccaacaaacgagtttattagttttttgttactgacttccattccaatctataatatcttgttctggtttaaaaacacacagtttgatattactaaacacacattattcagatacgtctatacagataatgccaaacacctggcgttggctaggtatatgcatcaaacaggagactataagcctttgtttagtcgtctcaaagagaattatatatttaccggtcccgttccaataagtatcaaagatatagatcaccctaatcttagtagagcaagaagtccatccgattatgagacattagctaatattagtactatattgtactttaccaagtatgatccggtattaatgtttttattgttttacgtacctgggtattcaattactacaaaaattactccagccgtagaatatctaatggataaactgaatctaacaaagagcgacgtacaactgttgtaaattattttatgcttcgtaaaatgtaggttttgaaccaaacattctttcaaagaatgagatgcataaaactttattatccaatagattgactatttcggacgtcaatcgtttaaagtaaacttcgtaaaatattctttgatcactgccgagtttaaaacttctatcgataattgtctcatatgttttaatatttacaagttttttggtccatggtacattagccggacaaatatatgcaaaataatatcgttctccaagttctatagtttctggattatttttattatattcagtaactaaatacatattagggttatctgcggatttataatttgagtgatgcattctactcaacataaataattctagaggagacgatctactatcaaattcggatcgtaaatctgtttctaaagaacggagaatatctatacatacctgattagaattcatccgtccttcagacaacatctcagacagtctggttttgtacatcttaatcatattcttatgaaacttggaaacatctcttctagtttcactagtacctttattaattctctcaggtacagattttgaattcgacgatgctgagtatttcatcgttgtatatttcttcttcgattgcataatcagattcttatataccgcctcaaactctattttaaaattattaaacaatactctattattaatcagtcgttctaactctttcgctatttctatagacttatctacatcttgactgtctatctctgtaaacacggagtcggtatctccatacacgctacgaaaacgaaatctgtaatctataggcaacgatgttttcacaatcggattaatatctctatcgtccatataaaatggattacttaatggattggcaaaccgtaacataccgttagataactctgctccatttagtaccgattctagatacaagatcattctacgtcctatggatgtgcaactcttagccgaagcgtatgagtatagagcactatttctaaatcccatcagaccatatactgagttggctactatcttgtacgtatattgcatggaatcatagatggccttttcagttgaactggtagcctgttttagcatctttttatatctggctctctctgccaaaaatgttcttaatagtctaggaatggttccttctatcgatctatcgaaaattgctatttcagagatgaggttcggtagtctaggttcacaatgaaccgtaatatatctaggaggtggatatttctgaagcaatagctgattatttatttcttcttccaatctattggtactaacaacgacaccgactaatgtttccggagatagatttccaaagatacacacattaggatacagactgttataatcaaagattaatacattattactaaacattttttgttttggagcaaataccttaccgccttcataaggaaacttttgttttgtttctgatctaactaagatagttttagtttccaacaatagctttaacagtggacccttgatgactgtactcgctctatattcgaataccatggattgaggaagcacatatgttgacgcacccgcgtctgtttttgtttctactccataatactcccacaaatactgacacaaacaagcatcatgaatacagtatctagccatatctaaagctatgtttagattataatccttatacatctgagctaaatcaacgtcatcctttccgaaagataatttatatgtatcattaggtaaagtaggacataatagtacgactttaaatccattttcccaaatatctttacgaattactttacatataatatcctcatcaacagtcacataattacctgtggttaaaacctttgcaaatgcagcggctttgcctttcgcgtctgtagtatcgtcaccgatgaacgtcatttctctaactcctctatttaatactttacccatgcaactgaacgcgttcttggatatagaatccaatttgtacgaatccaatttttcaaatttttgaatgaatgaatatagatcgaaaaatatagttccattattgttattaacgtgaaacgtagtattggccatgccgcctactcccttatgactagactgatttctctcataaatacagagatgtacagcttcctttttgtccggagatctaaagataattttctctcctgttaataactctagacgattagtaatatatctcagatcaaagttatgtccgttaaaggtaacgacgtagtcgaacgttagttccaacaattgtttagctattcgtaacaaaactatttcagaacatagaactagttctcgttcgtaatccatttccattagtgactgtatcctcaaacatcctctatcgacggcttcttgtatttcctgttccgttaacatctcttcattaatgagcgtaaacaataatcgtttaccacttaaatcgatataacagtaacttgtatgcgagattgggttaataaatacagaaggaaacttcttatcgaagtgacactctatatctagaaataagtacgatcttgggatatcgaatctaggtatttttttagcgaaacagttacgtggatcgtcacaatgataacatccattgttaatctttgtcaaatattgctcgtccaacgagtaacatccgtctggagatatcccgttagaaatataaaaccaactaatattgagaaattcatccatggtggcattttgtatgctgcgtttctttggctcttctatcaaccacatatctgcgacggagcattttctatctttaatatctagattataacttattgtctcgtcaatgtctatagttctcatctttcccaacggcctcgcattaaatggaggaggagacaatgactgatatatttcgtccgtcactacgtaataaaagtaatgaggaaatcgtataaatacggtctcgccatttcgacatctggatttcagatataaaaatctgttttcaccgtgactttcaaaccaattaatgcaccgaacatccatttatagaatttagaaatatattttcatttaaatgaatcccaaacattggggaagagccgtatggaccattatttttatagtactttcgcaagcgggtttagacggcaacatagaagcgtgtaaacgaaaactatatactatagttagcactcttccatgtcctgcatgtagacggcacgcgactatcgctatagaggacaataatgtcatgtctagcgatgatctgaattatatttattattttttcatcagattatttaacaatttggcatctgatcccaaatacgcgatcgatgtgacaaaggttaaccctttataaacttaacccattataaaacttatgattagtcacaactgaaataaccgcgtgattattttttggtataattctacacggcatggtttctgtgactatgaattcaacccccgttacattagtgaaatctttaacaaacagcaagggttcgtcaaagacataaaactcattgtttacaatcgaaatagaccccctatcacacttaaaataaaaaatatccttatcctttaccaccaaataaaattctgattggtcaatgtgaatgtattcacttaacagttccacaaatttatttattaactccgaggcacatacatcgtcggtattttttatggcaaactttactcttccagcatccgtttctaaaaaaatattaacgagttccatttatatcatccaatattattgaaatgacgttgatggacagatgatacaaataagaaggtacggtacctttgtccaccatctcctccaattcatgctctattttgtcattaactttaatgtatgaaaacagtacgccacatgcttccatgacagtgtgtaacactttggatacaaaatgtttgacattagtataattgtccaagactgtcaatctataatagatagtagctataatatattctatgatggtattgaagaagatgacaaccttggcatattgatcatttaacacagacatggtatcaacagatagcttgaatgaaagagaatcagtaattggaataagcgtcttctcgatagagtgtccgtataccaacatgtctgatattttgatgtattccattaaattatttagttttttctttttattctcgttaaacagcatttctgtcaacggaccccaacatcgttgaccgattaagttttgattgatttttccgtgtaaggcgtatctagtcagatcgtatagcctatccaataatccatcgtctgtgtgtagatcacatcgtacactttttaattctctatagaagagcgacagacatctggagcaattacagacagcaatttctttattctctacagatgtaagatacttgaagacattcctatgatgatgcagaattttggataacacggtattgatggtatctgttaccataattcctttgatggctgatagtgtcagagcacaagatttccaatctttgacaatttttagcaccattatctttgttttgatatctatatcagacagcatggtgcgtctgacaacacagggattaagacggaaagatgaaatgattctctcaacatcttcaatagataccttgctattttttctggcattatctatatgtgcgagaatatcctctagagaatcagtatcctttttgatgatagtggatctcaatgacatgggacgtttaaaccttcttattctatcaccagattgcatggtgatttgtcttctttcttttatcataatgtaatctctaaattcatcggcaaattgtctatatctaaaatcataatatgagatgtttacctctacaaatatctgttcgtccaatgttagagtatttacatcagttttgtattccaaattaaacatggcaacggatttaattttatattcctctattaagtcctcgtcgataataacagaatgtagataatcatttaatccgtcgtacatggttggaagatgcttgttgacaaaatctttaattgtcttgatgaaggtgggactatatctaacatcttgattaataaaatttataacattgtccataggatactttgtaactagttttatacacatctcttcatcggtaagtttagacagaatatcgtgaacaggtggtatattatattcatcagatatacgaagaacaatgtccaaatctatattgtttaatatattatatagatgtagcgtagctcctacaggaatatctttaactaagtcaatgatttcatcaaccgttagatctattttaaagttaatcatataggcattgatttttaaaaggtatgtagccttgactacattctcattaattaaccattccaagtcattgtgtgtaagaagattatattctatcataagcttgactacatttggtcccgataccattaaagaattcttatgatataaggaaacagattttaggtactcatctactctacaagaattttggagagccttaacgatatcagtgacgtttattatttcaggaggaaagaatctaacattgagaatatcggaattaatagcttccagatacagtgattttggcaatagtccgtgtaatccataatccagtaacacgagctggtgcttgctagacaccttttcaatgtttaatttttttgaaataagctttgataaagccttcctcgcaaattccggatacatgaacatgtcggcgacatgattaagtattgttttttcattatttttatattttctcaacaagttctcaataccccaatagatgatagaatatcacccaatgcgtccatgttgtctatttccaacaggtcgctatatccaccaatagaagtttttccaaaaaagattctaggaacagttctaccaccagtaatttgttcaaaataatcccgcaattcattttcgggtttaaattctttaatatcgacaatttcatacgctcctcttttgaaactaaacttatttagaatatccagtgcatttctacaaaaaggacatgtatacttgacaaaaattgtcactttgttattggccaacctttgttgtacaaattcctcggccattttaatatttaagtgatataaaactatctcgacttatttaactctttagtcgagatatatggacgcagatagctatatgatagccaactacagaaggcaaacgctataaaaaacataattacgacgagcatatttataaatatttttattcagcattacttgatatagtaatattaggcacagtcaaacattcaaccactctcgatacattaactctctcattttctttaacaaattctgcaatatcttcgtaaaaagattcttgaaactttttagaatatctatcgactctagatgaaatagcgttcgtcaacatactatgttttgtatacataaaggcgcccattttaacagtttctagtgacaaaatgctagcgatcctaggatcctttagaatcacatagattgacgattcgtctctcttagtaactctagtaaaataatcatacaatctagtacgcgaaataatattatccttgacttgaggagatctaaacaatctagttttgagaacatcgataagttcatcgggaatgacatacatactatctttaatagaactcttttcatccagttgaatggattcgtccttaaccaactgattaatgagatcttctattttatcattttccagatgatatgtatgtccattaaagttaaattgtgtagcgcttctttttagtctagcagccaatactttaacatcactaatatcgatatacaaaggagatgatttatctatggcattaagaattcgtttttcgacatccgtcaaaaccaattcctttttgcctgtatcatccagttttccatcctttgtaaagaaattattttctactagactattaataagactgataaggattcctccataattgcacaatccaaactttttaacaaaactagactttacgagatctacaggaatgcgtacttcaggttttttagcttgtgattttttcttttgcggacattttctagtaaccaactcatctaccatttcattgattttagcagtgaaataagctttcaatgcacgggcactgatactattgaaaacgagttgatcttcaaattccgccatttaagttcaccaaacaacttttaaatacaaatatatcaatagtagtagaataagaactataaaaaaaataataattaaccaaccccaacaaccggtattattagttgatgtggtagttttctcatcacttagaacagatttaacaatttctataaagtctgtcaaatcatcttccggagaccccataaatacaccaaatatagcggcgtacaacttatccatttatacattgaatattggcttttctttatcgctatcttcatcatattcatcatcaatatcaacaagtcccagattacgagccagatcttcttctacattttcagtcattgatacacgttcactatctccagagagtccgataacgttagccaccacttctctatcaatgattagtttcttgagcgcgaaagtaatttttgtttccgttccggatctatagaagacgataggtgtgataattgccttggccaattgtctttctcttttactgagtgattctagttcaccttctatagatctgagaatggatgattctccagtcgaaacatattctaccatggatccgtttaatttgttgatgaagatggattcatccttaaatgttttctctgtaatagtttccaccgaaagactatgcaaagaatttggaatgcgttccttgtgcttaatgtttccatagacggcttctagaagttgatacaacataggactagccgcggtaacttttatttttagaaagtatccatcgcttctatcttgtttagatttatttttataaagtttagtctctccttccaacataataaaagtggaagtcatttgactagataaactatcagtaagttttatagagatagacgaacaattagcgtattgagaagcatttagtgtaacgtattcgatacattttgcattagatttactaatcgattttgcatactctataacacccgcacaagtctgtagagaatcgctagatgcagtaggtcttggtgaagtttcaactctcttcttgattaccttactcatgattaaacctaaataattgtactttgtaatataatgatatatattttcactttatctcatttgagaataaaaatgtttttgtttaaccactgcatgatgtacagatttcggaatcgcaaaccaccagtggttttattttatccttgtccaatgtgaattgaatgggagcggatgcgggtttcgtacgtagatagtacattcccgtttttagaccgagactccatccgtaaaaatgcatactcgttagtttggaataactcggatctgctatatggatattcatagattgactttgatcgatgaaggctcccctgtctgcagccatttttatgatcgtcttttgtggaatttcccaaatagttttataaactcgcttaatatcttctggaaggtttgtattctgaatggatccaccatctgccataatcctattcttgatctcatcattccataattttctctcggttaaaactctaaggagatgcggattaactacttgaaattctccagacaatactctccgagtgtaaatattactggtatacggttccaccgactcattatttcccaaaatttgagcagttgatgcagtcggcataggtgccaccaataaactatttctaagaccgtatgttctgattttatcttttagaggttcccaattccaaagatccgacggtacaacattccaaagatcatattgtagaataccgttactggcgtacgatcctacatatgtatcgtatggtccttccttctcagctagttcacaactcgcctctaatgcaccgtaataaatggtttcgaagatcttcttatttagatcttgtgcttccaggctatcaaatggataatttaagagaataaacgcgtccgctaatccttgaacaccaataccgataggtctatgtctcttattagagatttcagcttctggaataggataataattaatatctataattttattgagatttctgacaattactttgaccacatccttcagtttgagaaaatcaaatcgcccatctattacaaacatgttcaaggcaacagatgccagattacaaacggctacctcattagcatccgcatattgtattatctcagtgcaaagattactacacttgatagttcctaaattttgttgattactctttttgttacacgcatccttataaagaatgaatggagtaccagtttcaatctgagattctataatcgctttccagacgactcgagcctttattatagatttgtatctcctttctctttcgtatagtgtatacaatcgttcgaactcgtctccccaaacattgtccaatccaggacattcatccggacacatcaacgaccactctccgtcatccttcactcgtttcataaagagatcaggaatccaaagagctataaatagatctctggttctatgttcctcgtttcctgtattctttttaagatcgaggaacgccataatatcagaatgccacggttccaagtatatggccataactccaggccgtttgtttcctccctgatctatgtatctagcggtgttattataaactctcaacattggaataataccgtttgatataccattggtaccggagatatagcttccactggcacgaatattactaattgatagacctattccccctgccattttagagattaatgcgcatcgttttaacgtgtcatagataccctctatgctatcatcgatcatgttaagtagaaaacagctagacatttggtgacgactagttcccgcattaaataaggtaggagaagcgtgcgtaaaccatttttcagaaagtagattgtacgtctcaatagctgagtctatatcccattgatgaattcctactgcgacacgcattaacatgtgctgaggtctttcaacgatcttgttgtttattttcaacaagtaggatttttccaaagttttaaaaccaaaatagttgtatgaaaagtctcgttcgtaaataataaccgagttgagtttatccttatatttgttaactatatccatggtgatacttgaaataatcggagaatgtttcccatttttaggattaacatagttgaataaatcctccatcacttcactaaatagtttttttgtttccttgtgtagatttgatacggctattctggcggctagaatggcataatccggatgttgtgtagtacaagtggctgctatttcggctgccagagtgtccaattctaccgttgttactccattatatattccttgaataaccttcatagctattttaataggatctatatgatccgtgtttaagccataacataattttctaatacgagacgtgattttatcaaacatgacattttccttgtatccatttcgtttaatgacaaacatttttgttggtgtaataaaaaaattatttaacttttcattaatagggatttgacgtatgtagcgtacaaaatgattgttcctggtatatagataaagagtcctatatatttgaaaatcgttacggctcgattaaactttaatgattgcatagtgaatatatcattaggatttaactccttgactatcatggcggcgccagaaattaccatcaaaagcattaatacagttataccgatcgcagttagaacggttatagcatccaccatttatatctaaaaattagatcaaagaatatgtgacaaagtcctagttgtatactgagaattgacgaaacaatgtttcttacatatttttttcttattagtaaccgacttaatagtaggaactggaaaactagacttgattattctataagtatagatacccttccaaataatattctctttgataaaagttccagaaaatgtagaattttttaaaaagttatcttttgctattaccaagattgtgtttagacgcttattattaatatgagtgatgaaatccacaccgcctctagatatcgcctttatttccacattagatggtaaatccaatagtgaaactatctttttaggaatgtatggactcgcgtttagaggagtaaacgtcttaggcgtcggaaaggatgattcatcaaacgaataaacaatttcacaaatggatgttaatgtattagtaggaaattttttgacgctattggaattgaagattctaatggatgatgttctacctatttcatccgataacatgttaatttccgacaccaacggttttaatatttcgatgatatacggtagtctctctttcggacttatatagcttattccacaatacgagtcattatatactccaaaaaacaaaataactagtataaaatctgtatcgaatgggaaaaacgaaattatcgacataggtatagaatccggaacattgaacgtattaatacttaattctttttctgtggtaagtaccgataggttattgacattgtatggttttaaatattctataacttgagacttgatagatattagtgatgaattgaaaattatttttatcaccacgtgtgtttcaggatcatcgtcgacgcccgtcaaccaaccgaacggagtaaaataaatatcattaatatatgctctagatattagtatttttatcaatcctttgattatcatcttctcgtaggcgaatgattccatgatcaagagtgatttaagaacatcctccggagtattaatgggcttagtaaacagtccatcgttgcaataataaaagttatccaagttaaaggatattatgcattcgtttaaagatatcacctcatctgacggagacaattttttggtaggttttagagactttgaagctacttgtttaacaaagttattcatcgtcgtctactattctatttaattttgtagttaatttatcacatatcacattaattgactttttggtccacttttccatacgtttatattcttttaatcctgcgttatccgtttccgttatatccagggatagatcttgcaagttaaatagaatgctcttaaataatgtcattttcttatccgctaaaaatttaaagaatgtataaacctttttcagagatttgaaactcttaggtggtgtcctagtacacaatatcataaacaaactaataaacattccacattcagattccaacagctgattaacttccacattaatacagcctattttcgctccaaatgtacattcgaaaaatctgaataaaacatcgatgtcacaatttgtattatccaatacagaatgtttgtgattcgtgttaaaaccatcggagaaggaatagaaataaaaattattatagtggtggaattcagttggaatattgcctccggagtcataaaaggatactaaacattgttttttatcataaattacacatttccaatgagacaaataacaaaatccaaacattacaaatctagaggtagaacttttaattttgtctttaagtatatacgataagatatgtttattcataaacgcgtcaaatttttcatgaatcgctaaggagtttaagaatctcatgtcaaattgtcctatataatccacttcggatccataagcaaactgagagactaagttcttaatacttcgattgctcatccaggctcctctctcaggctctattttcatcttgacgacctttggattttcaccagtatgtattcctttacgtgataaatcatcgattttcaaatccatttgtgagaagtctatcgccttagatactttttcccgtagtcgaggtttaaaaaaatacgctaacggtatactagtaggtaactcaaagacatcatatatagaatggtaacgcgtctttaactcgtcggttaactctttcttttgatcgagttcgtcgctactattgggtctgctcaggtgccccgactctactagttccaacatcataccgataggaatacaagacactttgccggcggttgtagatttatcatatttttccactacatatccgttacaatttgttaaaaatttagatacatctatattgctacataatccagctagtgaatatatatgacataataaattggtaaatcctagttctggtattttactaattactaaatctgtatatctttccatttatcatggaaaagaatttaccagatatcttcttttttccaaactgcgttaatgtattctcttacaaatattcacaagatgaattcagtaatatgagtaaaacggaacgtgatagtttctcattggccgtgtttccagttataaaacatagatggcataacgcacacgttgtaaaacataaaggaatatacaaagttagtacagaagcacgtggaaaaaaagtatctcctccatcactaggaaaacccgcacacataaacctaaccgcgaagcaatatatatacagtgaacacacaataagctttgaatgttatagttttctaaaatgtataacaaatacagaaatcaattcgttcgatgagtatatattaagaggactattagaagctggtaatagtttacagatattttccaattccgtaggtaaacgaacagatactataggtgtactagggaataagtatccatttagcaaaattccattggcctcattaactcctaaagcacaacgagagatattttcagcgtggatttctcatagacctgtagttttaactggaggaactggagtgggtaagacgtcacaggtacccaagttattgctttggtttaattatttatttggtggattctctactctagataaaatcactgactttcacgaaagaccagtcattctatctcttcctaggatagctttagttagattgcatagcaataccattttaaaatcattgggatttaaggtactagatggatctcctatttctttacggtacggatctataccggaagaattaataaacaaacaaccaaaaaaatatggaattgtattttctacccataagttatctctaacaaaactatttagttatggcactcttattatagacgaagttcatgagcatgatcaaataggagatattattatagcagtagcgagaaagcatcatacgaaaatagattctatgtttttaatgactgccacgttagaggatgacagggaacggctaaaagtatttttacctaatcccgcatttatacatattcctggagatacactgtttaaaattagcgaggtatttattcataataagataaatccatcttccagaatggcatacatagaagaagaaaagagaaatttagttactgctatacagatgtatactcctcctgatggatcatccggtatagtctttgtggcatccgttgcacagtgtcacgaatataaatcatatttagaaaaaagattaccgtatgatatgtatattattcatggtaaggtcttagatatagacgaaatattagaaaaagtgtattcatcacctaatgtatcgataattatttctactccttatttggaatccagcgttactatacgcaatgttacacacatttatgatatgggtagagtttttgtccccgctccttttggaggatcgcaacaatttatttctaaatctatgagagatcaacgaaaaggaagagtaggaagagttaatcctggtacatacgtctatttctatgatctgtcttatatgaagtctatacagcgaatagattcagaatttctacataattatatattgtacgctaataagtttaatctaacactccccgaagatttgtttataatccctacaaatttggatattctatggcgtacaaaggaatatatagactcgttcgatattagtacagaaacatggaataaattattatccaattattatatgaagatgatagagtatgctaaactttatgtactaagtcctattctcgctgaggagttggataactttgagaggacgggagaattaactagtattgtacgagaagccattttatctctaaatttacaaattaagattttaaattttaaacataaagatgatgatacgtatatacacttttgtaaaatattattcggtgtctataacggaacaaacgctactatatattatcatagacctctaacgggatatatgaatatgatttcagatactatatttgttcctgtagataataactaaaaatcaaactctaatgaccacatctttttttagagatgaaaaattttccacatctccttttgtagacacgactaaacattttgcagaaaaaagtttattagtgtttagataatcgtatacttcatcagtgtagatagtaaatgtgaacagataaaaggtattcttgctcaatagattggtaaattccatagaatatattaatcctttcttcttgagatcccacatcatttcaaccagagacgttttatccaatgatttacctcgtactataccacatacaaaactagattttgcagtgacgtcgtacctggtattcctaccaaacaaaattttacttttagttcttttagaaaattctaaggtagaatctctatttgccaatatgtcatctatggaattaccactagcaaaaaatgatagaaatatatattgatacatcgcagctggttttgatctactatactttaaaaacgaatcagattccataattgcctgtatatcatcagctgaaaaactatgttttacacgtattccttcggcatttctttttaatgatatatcttgtttagacaatgataaagttatcatgtccatgagagacgcgtctccgtatcgtataaatatttcattagatgttagacgcttcattaggggtatacttctataaggtttcttaatcagtccatcattggttgcgtcaagaactactatcggatgttgttgggtatctctagtgttacacatggccttactaaagtttgggtaaataactatgatatctctattaattatagatgcatatatttcattcgtcaaggatattagtatcgacttgctatcgtcattaatacgtgtaatgtaatcatataaatcatgcgatagccaaggaaaatttaaatagatgttcatcatataatcgtcgctataattcatattaatacgttgacattgactaatttgtaatatagcctcgccacgaagaaagctctcgtattcagtttcatcgataaaggataccgttaaatataactggttgccgatagtctcatagtctattaagtggtaagtttcgtacaaatacagaatccctaaaatattatctaatgttggattaatctttaccataactgtataaaatggagacggagtcataactattttaccgtttgtacttactggaatagatgaaggaataatctccggacatgctggtaaagacccaaatgtctgtttgaagaaatccaatgttccaggtcctaatctcttaacaaaaattacgatattcgatcccgatatcctttgcattctatttaccagcatatcacgaactatattaagattatctatcatgtctattctcccaccgttatataaatcgcctccgctaagaaacgttagtatatccatacaatggaatacttcatttctaaaatagtattcgttttctaattctttaatgtgaaatcgtatactagaaagggaaaaattatctttgagttttccgttagaaaagaaccacgaaactaatgttctgattgcgtccgattccgttgctgaattaatggatttacaccaaaaactcatataacttctagatgtagaagcattcgctaaaaaattagtagaatcaaaggatataagtagatgttccaacaagtgagcaattcccaagatttcatctatatcattctcgaatccgaaattagaaattcccaagtagatatcctttttcatccgatcgttgatgaaaatacgaactttattcggtaagacaatcatttactaaggagtaaaataggaagtaatgttcgtatgtcgttatcatcgtataaattaaaggtgtgttttttaccattaagtgacattataattttaccaatattggaattataatataggtgtatttgcgcactcgcgacggttgatgcatcggtaaatatagctgtatctaatgttctagtcggtatttcatcatttcgctgtctaataatagcgttttctctatctgtttccattacagctgcctgaagtttattggtcggataatatgtaaaataataagaaatacatacgaataacaaaaataaaataagatataataaagatgccatttagagatctaattttgtttaacttgtccaaattcctacttacagaagatgaggaatcgttggagatagtgtcttccttatgtagaggatttgaaatatcttataatgacttgataacttactttccagataggaaataccataaatatatttataaagtatttgaacatgtagatttatcggaggaattaagtatggaattccatgatacaactctgagagatttagtctatcttagattgtacaagtattccaagtgtatacggccgtgttataaattaggagataatctaaaaggcatagttgttataaaggacaggaatatttatattagggaagcaaatgatgacttgatagaatatctcctcaaggaatacactcctcagatttatacatattctaatgagcgcgtccccataactggttcaaaattaattctttgtggattttctcaagttacatttatggcgtatacaacgtcgcatataacaacaaataaaaaggtagatgttctcgtttccaaaaaatgtatagatgaactagtcgatccaataaattatcaaatacttcaaaatttatttgataaaggaagcggaacaataaacaaaatactcaggaagatattttattcggtaacaggtggccaaactccataggtagctttttctatttcggattttagaatttccaaattcaccagcgatttatcggttttggtgaaatccaaggatttattaatgtccacaaatgccatttgttttgtctgtggattgtatttgaaaatggaaacgatgtagttagatagatgcgctgcgaagtttcctattagggttccgcgcttcacgtcacccagcatacttgaatcaccatcctttaaaaaaaatgataagatatcaacatggagtatatcatactcgaattttaattcttctactgactcactgacattttcacaaatactacaatacggtttaccgaaaataatcagtacgttcttcatttatgggtatcaaaaacttaaaatcgttactgctggaaaataaatcactgacgatattagatgataatttatacaaagtatacaatggaatatttgtggatacaatgagtatttatatagccgtcgccaattgtgtcagaaacttagaagagttaactacggtattcataaaatacgtaaacggatgggtaaaaaagggagggcatgtaaccctttttatcgatagaggaagtataaaaattaaacaagacgttagagacaagagacgtaaatattctaaattaaccaaggacagaaaaatgttagaattagaaaagtgtacatccgaaatacaaaatgttaccggatttatggaagaagaaataaaggcagaaatgcaattaaaaatcgataaactcacatttcaaatatatttatctgattctgataacataaaaatatcattgaatgagatactaacacatttcaacaataatgagaatgttacattattttattgtgatgaacgagacgcagaattcgttatgtgtctcgaggctaaaacacatttctctaccacaggagaatggccgttgataataagtaccgatcaggatactatgctatttgcatctgctgataatcatcctaagatgataaaaaacttaactcaactgtttaaatttgttccctcggcagaggataactatttagcaaaattaacggcgttagtgaatggatgtgatttctttcctggactctatggggcatctataacacccaccaacttaaacaaaatacaattgtttagtgattttacaatcgataatatagtcactagtttggcaattaaaaattattatagaaagactaactctaccgtagacgtgcgtaatattgttacgtttataaacgattacgctaatttagacgatgtctactcgtatattcctccttgtcaatgcactgttcaagaatttatattttccgcattagatgaaaaatggaatgaatttaaatcatcttatttagaaagcgtgccgttaccctgccaattaatgtacgcgttagaaccacgcaaggagattgatgtttcagaagttaaaactttatcatcttatatagatttcgaaaatactaaatcagatatcgatgttataaaatctatatcctcgatcttcggatattctaacgaaaactgtaacacgatagtattcggcatctataaggataatttactactgagtataaataattcattttactttaacgatagtctgttaataaccaatactaaaagtgataatataataaatataggttactagattaaaaatggtgttccaactcgtgtgctctacatgcggtaaagatatttctcacgaacgatataaattgattatacgaaaaaaatcattaaaggatgtactcgtcagtgtaaagaacgaatgttgtaggttaaaattatctacacaaatagaacctcaacgtaacttaacagtgcaacctctattggatataaactaatatggatccggttaattttatcaagacatatgcgcctagaggttctattatttttattaattataccatgtcattaacaagtcatttgaatccatcgatagaaaaacatgtgggtatttattatggtacgttattatcggaacacttggtagttgaatctacctatagaaaaggagttcgaatagtcccattggatagtttttttgaaggatatcttagtgcaaaagtatacatgttagagaatattcaagttatgaaaatagcagctgatacgtcattaactttattgggtattccgtatggatttggtcatgatagaatgtattgttttaaattggtagctgactgttataaaaatgccggtattgatacatcgtctaaacgaatattgggcaaagatatttttctgagccaaaacttcacagacgataatagatggataaagatatatgattctaataatttaacattttggcaaattgattaccttaaagggtgagttaatatgcataactactcctccgttgttttttccctcgttctttttcttaacgttgtttgccatcactctcataatgtaaagatattctaaaatggtaaacttttgcatatcggacgcagaaattggtataaatgttgtaattgtattatttcccgtcaatggactagtcacagctccatcagttttatatcctttagagtatttctcactcgtgtctaacattctagagcattccatgatctgtttatcgttgatattggccggaaagatagattttttattttttattatattactattggcaattgtagatataacttctggtaaatatttttctaccttttcaatctcttctattttcaagccggctatatattctgctatattgttgctagtatcaataccttttctggctaagaagtcatatgtggtattcactatatcagttttaactggtagttccattagcctttccacttctgcagaataatcagaaattggttctttaccagaaaatccagctactataataggctcaccgatgatcattggcaaaatcctatattgtaccagattaatgagagcatatttcatttccaataattctgctagttcttgagacattgatttatttgatgaatctagttggttctctagatactctaccatttctgccgcatacaataacttgttagataaaatcagggttatcaaagtgtttagcgtggctagaatagtgggcttgcatgtattaaagaatgcggtagtatgagtaaaccgttttaacgaattatatagtctccagaaatctgtggcgttacatacatgagccgaatgacatcgaagattgtccaatatttttaatagctgctctttgtccattatttctatatttgactcgcaacaattgtagataccattaatcaccgattcctttttcgatgccggacaatagcacaattgtttagctttggactctatgtattcagaattaatagatatatctctcaatacagattgcactatacattttgaaactatgtcaaaaattgtagaacgacgctgttctgcagccatttaactttaaataatttacaaaaatttaaaatgagcatccgtataaaaatcgataaactgcgccaaattgtggcatatttttcagagttcagtgaagaagtgtctataaatgtagactcgacggatgagttaatgtatatttttgccgccttgggcggatctgtaaacatttgggcaattatacctctaagtgcatcagtgttttaccgaggagccgaaaatattgtgtttaatcttcctgtgtccaaggtaaaatcgtgtttgtgtagttttcacaatgatgccatcatagatatagaacctgatctggaaaataatctagtaaaactttctagttatcatgtagtaagtgtcgattgtaacaaggaactgatgcctattaggacagatactactatttgtctaagtatagatcaaaagaaatcttacgtgtttaattttcacaagtatgaagaaaaatgttgtggtagaaccgtcattcatctagaatggttgttgggctttatcaagtgtattagtcagcatcagcatctggctattatgtttaaagatgacaatattattatgaagactcctggtaatactgatgcgttttccagggaatattctatgactgaatgttctcaagaactacaaaagttttctttcaaaatagctatctcgtctctcaacaaactacgaggattcaaaaagagagtcaatgtttttgaaactagaatcgtaatggataatgacgataacattttaggaatgttgttttcggatagagttcaatcctttaagatcaacatctttatggcgtttttagattaatactttcaatgagataaatatgggtggcggagtaagtgttgagctccctaaacgggatccgcctccgggagtacccactgatgagatgttattaaacgtggataaaatgcatgacgtgatagctcccgctaagcttttagaatatgtgcatataggaccactagcaaaagataaagaggataaagtaaagaaaagatatccagagtttagattagtcaacacaggacccggtggtctttcggcattgttaagacaatcgtataatggaaccgcacccaattgctgtcgcacttttaatcgtactcattattggaagaaggatggaaagatatcagataagtatgaagagggtgcagtattagaatcgtgttggccagacgttcacgacactggaaaatgcgatgttgatttattcgactggtgtcagggggatacgttcgatagaaacatatgccatcagtggatcggttcagcctttaataggagtaatagaactgtagagggtcaacaatcgttaataaatctgtataataagatgcaaacattatgtagtaaagatgctagtgtaccaatatgcgaatcatttttgcattatttacgcgcacacaatacagaagatagcaaagagatgatcgattatattctaagacaacagtctgcggactttaaacagaaatatatgagatgtagttatcccactagagataagttagaagagtcattaaaatatgcggaacctcgagaatgttgggatccagagtgttcgaatgccaatgttaatttcttactaacacgtaattataataatttaggactttgcaatattgtacgatgtaataccagcgtgaacaacttacagatggataaaacttcctcattaagattgtcatgtggattaagcaatagtgatagattttctactgttcccgtcaatagagcaaaagtagttcaacataatattaaacactcgttcgacctaaaattgcatttgatcagtttattatctctcttggtaatatggatactaattgtagctatttaaatgggtgccgcggcaagcatacagacgacggtgaatacactcagcgaacgtatctcgtctaaattagaacaagaagcgaacgctagtgctcaaacaaaatgtgatatagaaatcggaaatttttatatccgacaaaaccatggatgtaacctcactgttaaaaatatgtgctctgcggacgcggatgctcagttggatgctgtgttatcagccgctacagaaacatatagtggattaacaccggaacaaaaagcatacgtgccagctatgtttactgctgcgttaaacattcagacgagtgtaaacactgttgttagagattttgaaaattatgtgaaacagacttgtaattctagcgcggtcgtcgataacaaattaaagatacaaaacgtaatcatagatgaatgttacggagccccaggatctccaacaaatttggaatttattaatacaggatctagcaaaggaaattgtgccattaaagcgttgatgcaattgacgactaaggccactactcaaatagcacctagacaagttgctggtacaggagttcagttttatatgattgttatcggtgttataatattggcagcgttgtttatgtactatgccaagcgtatgttgttcacatccaccaatgataaaatcaaacttattttagccaataaggaaaacgtccattggactacttacatggacacattctttagaacttctccgatggttattgctaccacggatatgcaaaactgaaaatatattgataatattttaatagattaacatggaagttatcgctgatcgtctagacgatatagtgaaacaaaatatagcggatgaaaaatttgtagattttgttatacacggtctagagcatcaatgtcctgctatacttcgaccattaattaggttgtttattgatatactattatttgttatagtaatttatatttttacggtacgtctagtaagtagaaattatcaaatgttgttggtggtgctagtcatcacattaactattttttattactttatactataatagtactagactgacttctaacaaacatctcacctgccataaataaatgcttgatattaaagtcttctatttctaacactattccatctgtggaaaataatactctgacattatcgctaattgacacatcggtgagtgatatgcctataaagtaataatcttctttgggcacatataccagtgtaccaggttctaacaacctatttactggtgctcctgtagcatactttttctttaccttgagaatatccatcgtttgcttggtcaatagcgatatgtgattttttatcaaccactcaaaaaagtaattggagtgttcatatcctctacgggctattgtctcatggccgtgtatgaaatttaagtaacacgactgtggtagatttgttctatagagccgattgccgcaaatagatagaactaccaatatgtctgtacaaatgttaaacattaattgattaacagaaaaaacaatgttcgttctgggaatagaaaccagatcaaaacaaaattcgttagaatatatgccacgtttatacatggaatataaaataactacagtttgaaaaataacagtatcatttaaacatttaacttgcggggttaatctcacaactttactgtttttgaactgttcaaaatatagcatcgatccgtgagaaatacgtttagccgcctttaatagaggaaatcccaccgcctttctggatctcaccaacgacgatagttctgaccagcaactcatttcttcatcatccacctgttttaacatataataggcaggagatagatatccgtcattgcaatattccttctcgtaggcacacaatctaatattgataaaatctccattctcttctctgcatttattatcttgtctcggtggctgattaggctgtggtcttggtttaggccttggtctatcgttgttgaatctattttggtcattaaatctttcatttcttcctggtatatttctatcacctcgtttggttggatttttgtctatattatcgtttgtaacatcggtacgggtattcatttatcacaaaaaaaacttctctaaatgagtctactgctagaaaacctcatcgaagaagataccatattttttgcaggaagtatatctgagtatgatgatttacaaatggttattgccggcgcaaaatccaaatttccaagatctatgctttctatttttaatatagtacctagaacgatgtcaaaatatgagttggagttgattcataacgaaaatatcacaggagcaatgtttaccacaatgtataatataagaaacaatttgggtctaggagatgataaactaactattgaagccattgaaaactatttcttggatcctaacaatgaagttatgcctcttattattaataatacggatatgactgccgtcattcctaaaaaaagtggtaggagaaagaataagaacatggttatcttccgtcaaggatcatcacctatcttgtgcattttcgaaactcgtaaaaagattaatatttataaagaaaatatggaatccgcgtcgactgagtatacacctatcggagacaacaaggctttgatatctaaatatgcgggaattaatgtcctgaatgtgtattctccttccacatccataagattgaatgccatttacggattcaccaataaaaataaactagagaaacttagtactaataaggaactagaatcgtatagttctagccctcttcaagaacccattaggttaaatgattttctgggactattggaatgtgttaaaaagaatattcctctaacagatattccgacaaaggattgattactataaatggagaatgttcctaatgtatactttaatcctgtgtttatagagcccacgtttaaacattctttattaagtgtttataaacacagattaatagttttatttgaagtattcgttgtattcattctaatatatgtattttttagatctgaattaaatatgttcttcatgcctaaacgaaaaatacccgatcctattgatagattacgacgtgctaatctagcgtgtgaagacgataaattaatgatctatggattaccatggatgacaactcaaacatctgcgttatcaataaatagtaaaccgatagtgtataaagattgtgcaaagcttttgcgatcaataaatggatcacaaccagtatctcttaacgatgttcttcgcagatgatgattcattttttaagtatttggctagtcaagatgatgaatcttcattatctgatatattgcaaatcactcaatatctagactttctgttattattattgatccaatcaaaaaataaattagaagctgtgggtcattgttatgaatctctttcagaggaatacagacaattgacaaaattcacagactttcaagattttaaaaaactgtttaacaaggtccctattgttacagatggaagggtcaaacttaataaaggatatttgttcgactttgtgattagtttgatgcgattcaaaaaagaatcctctctagctaccaccgcaatagatcctgttagatacatagatcctcgtcgcaatatcgcattttctaacgtgatggatatattaaagtcgaataaagtgaacaataattaattctttattgtcatcatgaacggcggacatattcagttgataatcggccccatgttttcaggtaaaagtacagaattaattagacgagttagacgttatcaaatagctcaatataaatgcgtgactataaaatattctaacgataatagatacggaacgggactatggacgcatgataagaataattttgaagcattggaagcaactaaactatgtgatgtcttggaatcaattacagatttctccgtgataggtatcgatgaaggacagttctttccagacattgttgaattagatcgataaaaattaattaattacccgggtaccaggcctagatctgtcgagatccggtggtggtgcaaatcaaagaactgctcctcagtggatgttgcctttacttctaggcctgtacggaagtgttacttctgctctaaaagctgctgcagggggggggggggggtgggggggccggttagggccgccatcccctcagagcgtcgggatatcgggtggcggctcgggacggaggacgcgctagtgttcttctgtgtggcagttcagaatgatggatcaagctagatcagcattctctaacttgtttggtggagaaccattgtcatatacccggttcagcctggctcggcaagtagatggcgataacagtcatgtggagatgaaacttgctgtagatgaagaagaaaatgctgacaataacacaaaggccaatgtcacaaaaccaaaaaggtgtagtggaagtatctgctatgggactattgctgtgatcgtctttttcttgattggatttatgattggctacttgggctattgtaaaggggtagaaccaaaaactgagtgtgagagactggcaggaaccgagtctccagtgagggaggagccaggagaggacttccctgcagcacgtcgcttatattgggatgacctgaagagaaagttgtcggagaaactggacagcacagacttcaccagcaccatcaagctgctgaatgaaaattcatatgtccctcgtgaggctggatctcaaaaagatgaaaatcttgcgttgtatgttgaaaatcaatttcgtgaatttaaactcagcaaagtctggcgtgatcaacattttgttaagattcaggtcaaagacagcgctcaaaactcggtgatcatagttgataagaacggtagacttgtttacctggtggagaatcctgggggttatgtggcgtatagtaaggctgcaacagttactggtaaactggtccatgctaattttggtactaaaaaagattttgaggatttatacactcctgtgaatggatctatagtgattgtcagagcagggaaaatcacctttgcagaaaaggttgcaaatgctgaaagcttaaatgcaattggtgtgttgatatacatggaccagactaaatttcccattgttaacgcagaactttcattctttggacatgctcatctggggacaggtgacccttacacacctggattcccttccttcaatcacactcagtttccaccatctcggtcatcaggattgcctaatatacctgtccagacaatctccagagctgctgcagaaaagctgtttgggaatatggaaggagactgtccctctgactggaaaacagactctacatgtaggatggtaacctcagaaagcaagaatgtgaagctcactgtgagcaatgtgctgaaagagataaaaattcttaacatctttggagttattaaaggctttgtagaaccagatcactatgttgtagttggggcccagagagatgcatggggccctggagctgcaaaatccggtgtaggcacagctctcctattgaaacttgcccagatgttctcagatatggtcttaaaagatgggtttcagcccagcagaagcattatctttgccagttggagtgctggagactttggatcggttggtgccactgaatggctagagggatacctttcgtccctgcatttaaaggctttcacttatattaatctggataaagcggttcttggtaccagcaacttcaaggtttctgccagcccactgttgtatacgcttattgagaaaacaatgcaaaatgtgaagcatccggttactgggcaatttctatatcaggacagcaactgggccagcaaagttgagaaactcactttagacaatgctgctttccctttccttgcatattctggaatcccagcagtttctttctgtttttgcgaggacacagattatccttatttgggtaccaccatggacacctataaggaactgattgagaggattcctgagttgaacaaagtggcacgagcagctgcagaggtcgctggtcagttcgtgattaaactaacccatgatgttgaattgaacctggactatgagaggtacaacagccaactgctttcatttgtgagggatctgaaccaatacagagcagacataaaggaaatgggcctgagtttacagtggctgtattctgctcgtggagacttcttccgtgctacttccagactaacaacagatttcgggaatgctgagaaaacagacagatttgtcatgaagaaactcaatgatcgtgtcatgagagtggagtatcacttcctctctccctacgtatctccaaaagagtctcctttccgacatgtcttctggggctccggctctcacacgctgccagctttactggagaacttgaaactgcgtaaacaaaataacggtgcttttaatgaaacgctgttcagaaaccagttggctctagctacttggactattcagggagctgcaaatgccctctctggtgacgtttgggacattgacaatgagttttaaatgtgatacccatagcttccatgagaacagcagggtagtctggtttctagacttgtgctgatcgtgctaaattttcagtagggctacaaaacctgatgttaaaattccatcccatcatcttggtactactagatgtctttaggcagcagcttttaatacagggtagataacctgtacttcaagttaaagtgaataaccacttaaaaaatgtccatgatggaatattcccctatctctagaattttaagtgctttgtaatgggaactgcctctttcctgttgttgttaatgaaaatgtcagaaaccagttatgtgaatgatctctctgaatcctaagggctggtctctgctgaaggttgtaagtggtcgcttactttgagtgatcctccaacttcatttgatgctaaataggagataccaggttgaaagaccttctccaaatgagatctaagcctttccataaggaatgtagctggtttcctcattcctgaaagaaacagttaactttcagaagagatgggcttgttttcttgccaatgaggtctgaaatggaggtccttctgctggataaaatgaggttcaactgttgattgcaggaataaggccttaatatgttaacctcagtgtcatttatgaaaagaggggaccagaagccaaagacttagtatattttcttttcctctgtcccttcccccataagcctccatttagttctttgttatttttgtttcttccaaagcacattgaaagagaaccagtttcaggtgtttagttgcagactcagtttgtcagactttaaagaataatatgctgccaaattttggccaaagtgttaatcttaggggagagctttctgtccttttggcactgagatatttattgtttatttatcagtgacagagttcactataaatggtgtttttttaatagaatataattatcggaagcagtgccttccataattatgacagttatactgtcggttttttttaaataaaagcagcatctgctaataaaacccaacagatactggaagttttgcatttatggtcaacacttaagggttttagaaaacagccgtcagccaaatgtaattgaataaagttgaagctaagatttagagatgaattaaatttaattaggggttgctaagaagcgagcactgaccagataagaatgctggttttcctaaatgcagtgaattgtgaccaagttataaatcaatgtcacttaaaggctgtggtagtactcctgcaaaattttatagctcagtttatccaaggtgtaactctaattcccattttgcaaaatttccagtacctttgtcacaatcctaacacattatcgggagcagtatcttccataatgtataaagaacaaggtagtttttacctaccacagtgtctgtatcggagacagtgatctccatatgttacactaagggtgtaagtaattatcgggaacagtgtttcccataattttcttcatgcaatgacatcttcaaagcttgaagatcgttagtatctaacatgtatcccaactcctataattccctatcttttagttttagttgcagaaacattttgtggtcattaagcattgggtgggtaaattcaaccactgtaaaatgaaattactacaaaatttgaaatttagcttgggtttttgttacctttatggtttctccaggtcctctacttaatgagatagtagcatacatttataatgtttgctattgacaagtcattttaactttatcacattatttgcatgttacctcctataaacttagtgcggacaagttttaatccagaattgaccttttgacttaaagcagagggactttgtatagaaggtttgggggctgtggggaaggagagtcccctgaaggtctgacacgtctgcctacccattcgtggtgatcaattaaatgtaggtatgaataagttcgaagctccgtgagtgaaccatcattataaacgtgatgatcagctgtttgtcatagggcagttggaaacggcctcctagggaaaagttcatagggtctcttcaggttcttagtgtcacttacctagatttacagcctcacttgaatgtgtcactactcacagtctctttaatcttcagttttatctttaatctcctcttttatcttggactgacatttagcgtagctaagtgaaaaggtcatagctgagattcctggttcgggtgttacgcacacgtacttaaatgaaagcatgtggcatgttcatcgtataacacaatatgaatacagggcatgcattttgcagcagtgagtctcttcagaaaacccttttctacagttagggttgagttacttcctatcaagccagtacgtgctaacaggctcaatattcctgaatgaaatatcagactagtgacaagctcctggtcttgagatgtcttctcgttaaggagatgggccttttggaggtaaaggataaaatgaatgagttctgtcatgattcactattctagaacttgcatgacctttactgtgttagctctttgaatgttcttgaaattttagactttctttgtaaacaaatgatatgtccttatcattgtataaaagctgttatgtgcaacagtgtggagattccttgtctgatttaataaaatacttaaacactgaaaaaaaaaaaaaaaaaaaaaaaaaaaaaaaaaaaaaaaaaaaaaaaaaaaaaaaaaaaaaaaaaaaaaaaaaaaaaaaaagtaccttctgaggcggaaagaaccagccggatctcgacttcgagcttatttatattccaaaaaaaaaaaataaaatttcaatttttaagctttcactaattccaaacccacccgctttttatagtaagtttttcacccataaataataaatacaataattaatttctcgtaaaagtagaaaatatattctaatttattgcacggtaaggaagtagatcataactcgagcatgggagatcccgtcgttttacaacgtcgtgactgggaaaaccctggcgttacccaacttaatcgccttgcagcacatccccctttcgccagctggcgtaatagcgaagaggcccgcaccgatcgcccttcccaacagttgcgcagcctgaatggcgaatggcgctttgcctggtttccggcaccagaagcggtgccggaaagctggctggagtgcgatcttcctgaggccgatactgtcgtcgtcccctcaaactggcagatgcacggttacgatgcgcccatctacaccaacgtgacctatcccattacggtcaatccgccgtttgttcccacggagaatccgacgggttgttactcgctcacatttaatgttgatgaaagctggctacaggaaggccagacgcgaattatttttgatggcgttaactcggcgtttcatctgtggtgcaacgggcgctgggtcggttacggccaggacagtcgtttgccgtctgaatttgacctgagcgcatttttacgcgccggagaaaaccgcctcgcggtgatggtgctgcgctggagtgacggcagttatctggaagatcaggatatgtggcggatgagcggcattttccgtgacgtctcgttgctgcataaaccgactacacaaatcagcgatttccatgttgccactcgctttaatgatgatttcagccgcgctgtactggaggctgaagttcagatgtgcggcgagttgcgtgactacctacgggtaacagtttctttatggcagggtgaaacgcaggtcgccagcggcaccgcgcctttcggcggtgaaattatcgatgagcgtggtggttatgccgatcgcgtcacactacgtctgaacgtcgaaaacccgaaactgtggagcgccgaaatcccgaatctctatcgtgcggtggttgaactgcacaccgccgacggcacgctgattgaagcagaagcctgcgatgtcggtttccgcgaggtgcggattgaaaatggtctgctgctgctgaacggcaagccgttgctgattcgaggcgttaaccgtcacgagcatcatcctctgcatggtcaggtcatggatgagcagacgatggtgcaggatatcctgctgatgaagcagaacaactttaacgccgtgcgctgttcgcattatccgaaccatccgctgtggtacacgctgtgcgaccgctacggcctgtatgtggtggatgaagccaatattgaaacccacggcatggtgccaatgaatcgtctgaccgatgatccgcgctggctaccggcgatgagcgaacgcgtaacgcgaatggtgcagcgcgatcgtaatcacccgagtgtgatcatctggtcgctggggaatgaatcaggccacggcgctaatcacgacgcgctgtatcgctggatcaaatctgtcgatccttcccgcccggtgcagtatgaaggcggcggagccgacaccacggccaccgatattatttgcccgatgtacgcgcgcgtggatgaagaccagcccttcccggctgtgccgaaatggtccatcaaaaaatggctttcgctacctggagagacgcgcccgctgatcctttgcgaatacgcccacgcgatgggtaacagtcttggcggtttcgctaaatactggcaggcgtttcgtcagtatccccgtttacagggcggcttcgtctgggactgggtggatcagtcgctgattaaatatgatgaaaacggcaacccgtggtcggcttacggcggtgattttggcgatacgccgaacgatcgccagttctgtatgaacggtctggtctttgccgaccgcacgccgcatccagcgctgacggaagcaaaacaccagcagcagtttttccagttccgtttatccgggcaaaccatcgaagtgaccagcgaatacctgttccgtcatagcgataacgagctcctgcactggatggtggcgctggatggtaagccgctggcaagcggtgaagtgcctctggatgtcgctccacaaggtaaacagttgattgaactgcctgaactaccgcagccggagagcgccgggcaactctggctcacagtacgcgtagtgcaaccgaacgcgaccgcatggtcagaagccgggcacatcagcgcctggcagcagtggcgtctggcggaaaacctcagtgtgacgctccccgccgcgtcccacgccatcccgcatctgaccaccagcgaaatggatttttgcatcgagctgggtaataagcgttggcaatttaaccgccagtcaggctttctttcacagatgtggattggcgataaaaaacaactgctgacgccgctgcgcgatcagttcacccgtgcaccgctggataacgacattggcgtaagtgaagcgacccgcattgaccctaacgcctgggtcgaacgctggaaggcggcgggccattaccaggccgaagcagcgttgttgcagtgcacggcagatacacttgctgatgcggtgctgattacgaccgctcacgcgtggcagcatcaggggaaaaccttatttatcagccggaaaacctaccggattgatggtagtggtcaaatggcgattaccgttgatgttgaagtggcgagcgatacaccgcatccggcgcggattggcctgaactgccagctggcgcaggtagcagagcgggtaaactggctcggattagggccgcaagaaaactatcccgaccgccttactgccgcctgttttgaccgctgggatctgccattgtcagacatgtataccccgtacgtcttcccgagcgaaaacggtctgcgctgcgggacgcgcgaattgaattatggcccacaccagtggcgcggcgacttccagttcaacatcagccgctacagtcaacagcaactgatggaaaccagccatcgccatctgctgcacgcggaagaaggcacatggctgaatatcgacggtttccatatggggattggtggcgacgactcctggagcccgtcagtatcggcggaattccagctgagcgccggtcgctaccattaccagttggtctggtgtcaaaaataataataaccgggcaggggggatccaattctgtgagcgtatggcaaacgaaggaaaaatagttatagtagccgcactcgatgggacatttcaacgtaaaccgtttaataatattttgaatcttattccattatctgaaatggtggtaaaactaactgctgtgtgtatgaaatgctttaaggaggcttccttttctaaacgattgggtgaggaaaccgagatagaaataataggaggtaatgatatgtatcaatcggtgtgtagaaagtgttacatcgactcataatattatattttttatctaaaaaactaaaaataaacattgattaaattttaatataatacttaaaaatggatgttgtgtcgttagataaaccgtttatgtattttgaggaaattgataatgagttagattacgaaccagaaagtgcaaatgaggtcgcaaaaaaactgccgtatcaaggacagttaaaactattactaggagaattattttttcttagtaagttacagcgacacggtatattagatggtgccaccgtagtgtatataggatctgctcccggtacacatatacgttatttgagagatcatttctataatttaggagtgatcatcaaatggatgctaattgacggccgccatcatgatcctattttaaatggattgcgtgatgtgactctagtgactcggttcgttgatgaggaatatctacgatccatcaaaaaacaactgcatccttctaagattattttaatttctgatgtgagatccaaacgaggaggaaatgaacctagtacggcggatttactaagtaattacgctctacaaaatgtcatgattagtattttaaaccccgtggcgtctagtcttaaatggagatgcccgtttccagatcaatggatcaaggacttttatatcccacacggtaataaaatgttacaaccttttgctccttcatattcagctgaaatgagattattaagtatttataccggtgagaacatgagactgactcgagttaccaaattagacgctgtaaattatgaaaaaaagatgtactaccttaataagatcgtccgtaacaaagtagttgttaactttgattatcctaatcaggaatatgactattttcacatgtactttatgctgaggaccgtgtactgcaataaaacatttcctactactaaagcaaaggtactatttctacaacaatctatatttcgtttcttaaatattccaacaacatcaactgaaaaagttagtcatgaaccaatacaacgtaaaatatctagcaaaaattctatgtctaaaaacagaaatagcaagagatccgtacgcggtaataaatagaaacgtactactgagatatactaccgatatagagtataatgatttagttactttaataaccgttagacataaaattgattctatgaaaactgtgtttcaggtatttaacgaatcatccataaattatactccggttgatgatgattatggagaaccaatcattataacatcgtatcttcaaaaaggtcataacaagtttcctgtaaattttctatacatagatgtggtaatatctgacttatttcctagctttgttagactagatactacagaaactaatatagttaatagtgtactacaaacaggcgatggtaaaaagactcttcgtcttcccaaaatgttagagacggaaatagttgtcaagattctctatcgccctaatataccattaaaaattgttagatttttccgcaataacatggtaactggagtagagatagccgatagatctgttatttcagtcgctgattaatcaattagtagagatgagataagaacattataataatcaataatatatcttatatcttatatcttatatcttatatcttgtttagaaaaatgctaatattaaaatagctaacgctagtaatccaatcggaagccatttgatatctataatagggtatctaatttcctgatttaaatagcggacagctatattctcggtagctactcgtttggaatcacaaacattatttacatctaatttactatctgtaatggaaacgtttcccaatgaaatggtacaatccgatacattgcattttgttatatttttttttaaagaggctggtaacaacgcatcgcttcgtttacatggctcgtaccaacaataatagggtaatcttgtatctattcctatccgtactatgcttttatcaggataaatacatttacatcgtatatcgtctttgttagcatcacagaatgcataaatttgttcgtccgtcatgataaaaatttaaagtgtaaatataactattatttttatagttgtaataaaaagggaaatttgattgtatactttcggttctttaaaagaaactgacttgataaaaatggctgtaatctctaaggttacgtatagtctatatgatcaaaaagagattaatgctacagatattatcattagtcatgttaaaaatgacgacgatatcggtaccgttaaagatggtagactaggtgctatggatggggcattatgtaagacttgtgggaaaacggaattggaatgtttcggtcactggggtaaagtaagtatttataaaactcatatagttaagcctgaatttatttcagaaattattcgtttactgaatcatatatgtattcactgcggattattgcgttcacgagaaccgtattccgacgatattaacctaaaagagttatcgggacacgctcttaggagattaaaggataaaatattatccaagaaaaagtcatgttggaacagtgaatgtatgcaaccgtatcaaaaaattactttttcaaagaaaaaggtttgtttcgtcaacaagttggatgatattaacgttcctaattctctcatctatcaaaagttaatttctattcatgaaaagttttggccattattagaaattcatcaatatccagctaacttattttatacagactactttcccatccctccgttgattattagaccggctattagtttttggatagatagtatacccaaagagaccaatgaattaacttacttattaggtatgatcgttaagaattgtaacttgaatgctgatgaacaggttatccagaaggcggtaatagaatacgatgatattaaaattatttctaataacactaccagtatcaatttatcatatattacatccggcaaaaataatatgattagaagttatatcgtcgcccgacgaaaagatcagaccgctagatctgtaattggtcccagtacatctatcaccgttaatgaggtaggaatgcccgcatatattagaaatacacttacagaaaagatatttgttaatgcctttacagtggataaagttaaacaactattagcgtcaaaccaagttaaattttactttaataaacgattaaaccaattaacaagaatacgccaaggaaagtttattaaaaataaaatacatttattgcctggtgattgggtagaagtagctgttcaagaatatacaagtattatttttggaagacagccgtctctacatagatacaacgtcatcgcttcatctatcagagctaccgaaggagatactatcaaaatatctcccggaattgccaactctcaaaatgctgatttcgacggggatgaggaatggatgatattagaacaaaatcctaaagctgtaattgaacaaagtattcttatgtatccgacgacgttactcaaacacgatattcatggagcccccgtttatggatctattcaagatgaaatcgtagcagcgtattcattgtttaggatacaagatctttgtttagatgaagtattgaacatcttggggaaatatggaagagagttcgatcctaaaggtaaatgtaaattcagcggtaaagatatctatacttacttgataggtgaaaagattaattatccgggtctcttaaaggatggtgaaattattgcaaacgacgtagatagtaattttgttgtggctatgaggcatctgtcattggctggactcttatccgatcataagtcgaacgtggaaggtatcaactttattatcaagtcatcttatgtttttaagagatatctatctatttacggttttggggtgacattcaaagatctgagaccaaattcgacgttcactaataaattggaggccatcaacgtagaaaaaatagaacttatcaaagaagcatacgccaaatatctcaacgatgtaagagacgggaaaatagttccattatctaaagctttagaggcggactatgtggaatccatgttatccaacttgacaaatcttaatatccgagagatagaagaacatatgagacaaacgctgatagatgatccagataataacctcctgaaaatggccaaagcgggttataaagtaaatcccacagaactaatgtatattctaggtacgtatggacaacaaaggattgatggtgaaccagcagagactcgagtattgggtagagttttaccttactatcttccagactctaaggatccagaaggaagaggttacattcttaattctttaacaaaaggattaacgggttctcaatattacttttcgatgctggttgccagatctcaatctactgatatcgtctgtgaaacatcacgtaccggaacactggctagaaaaatcattaaaaagatggaggatatggtggtcgacggatacggacaagtagttataggtaatacgctcatcaagtacgccgccaattataccaaaattctaggctcagtatgtaaacctgtagatcttatctatccagatgagtccatgacttggtatttggaaattagtgctctgtggaataaaataaaacagggattcgtttactctcagaaacagaaacttgcaaagaagacattggcgccgtttaatttcctagtattcgtcaaacccaccactgaggataatgctattaaggttaaggatctgtacgatatgattcataacgtcattgatgatgtgagagagaaatacttctttacggtatctaatatagattttatggagtatatattcttgacgcatcttaatccttctagaattagaattacaaaagaaacggctatcactatctttgaaaagttctatgaaaaactcaattatactctaggtggtggaactcctattggaattatttctgcacaggtattgtctgagaagtttacacaacaagccctgtccagttttcacactactgaaaaaagtggtgccgtcaaacaaaaacttggtttcaacgagtttaataacttgactaatttgagtaagaataagaccgaaattatcactctggtatccgatgatatctctaaacttcaatctgttaagattaatttcgaatttgtatgtttgggagaattaaatccaaacatcactcttcgaaaagaaacagataaatatgtagtagatataatagtcaatagattatacatcaagagagcagaaataaccgaattagtcgtcgaatatatgattgaacgatttatctcctttagcgtcattgtaaaggaatggggtatggagacattcattgaggacgaggataatattagatttactgtctacctaaatttcgttgaaccggaagaattgaatcttagtaagtttatgatggttcttccgggggcagccaacaagggaaagattagtaaattcaagattcctatctctgattatacgggatatgacgacttcaatcaaacaaaaaagctcaataagatgactgtagaactcatgaatctaaaagaattgggttctttcgatttggaaaacgtcaacgtgtatcctggagtatggaatacatacgatatcttcggtatcgaggccgctcgtgaatacttgtgcgaagccatgttaaacacctatggagaagggttcgattatctgtatcagccttgtgatcttctcgctagtttactatgtgctagttacgaaccagaatcagtgaataaattcaagttcggcgcagctagtactcttaagagagctacgttcggagacaataaagcattgttaaacgcggctcttcataaaaagtcagaacctattaacgataatagtagctgccacttttttagcaaggtccctaatataggaactggatattacaaatactttatcgacttgggtcttctcatgagaatggaaaggaaactatctgataagatatcttctcaaaagatcaaggaaatggaagaaacagaagacttttaattcttatcaataacatatttttctatgatctgtcttttaaacgatggattttccacaaatgcgcctctcaagtccctcatagaatgatacacgtataaaaaatatagcataggcaatgactccttatttttagacattagatatgccaaaatcatagccccgcttctatttactcccgcagcacaatgaaccaacacgggctcgtttcgttgatcacatttagataaaaaggcggttacgtcgtcaaaatatttactaatatcggtagttgtatcatctaccaacggtatatgaataatattaatattagagttaggtaatgtatatttatccatcgtcaaatttaaaacatatttgaacttaacttcagatgatggtgcatccatagcatttttataatttcccaaatacacattattggttacccttgtcattatagtgggagatttggctttgtgcatatctccagttgaacgtagtagtaagtatttatacaaacttttcttatccatttataacgtacaaatggataaaactactttatcggtaaacgcgtgtaatttagaatacgttagagaaaaggctatagtaggcgtacaagcagccaaaacatcaacacttatattctttgttattatattggcaattagtgcgctattactctggtttcagacgtctgataatccagtctttaatgaattaacgagatatatgcgaattaaaaatacggttaacgattggaaatcattaacggatagcaaaacaaaattagaaagtgatagaggtagacttctagccgctggtaaggatgatatatttgaattcaaatgtgtggatttcggcgcctattttatagctatgcgattggataagaaaacatatctgccgcaagctattaggcgaggtactggagacgcgtggatggttaaaaaggcggcaaaggtcgatccatctgctcaacaattttgtcagtatttgataaaacacaagtctaataatgttattacttgtggtaatgagatgttaaatgaattaggttatagcggttattttatgtcaccgcattggtgttccgattttagtaatatggaatagtgttagataaatgcggtaacgaatgttcctgtaaggaaccataacagcttagatttaacgttaaagatgagcataaacataataaacaaaattacaatcaaacttataacattaatatcaaacaatccaaaaaatgaaatcagtggagtagtaaacgcgtacataactcctggataacgtttagcagctgccgttcctattctagaccaaaaattcggtttcatgttttcgaaacggtattctgcaacaagtcgaggatcgtgttctacatatttggcggcattatccagtatctgcctattgatcttcatttcgttttcgattctggctatttcaaaataaaatcccgatgatagacctccagactttataatttcatctacgatgttcagcgccgtagtaactctaataatataggctgataagctaacatcataccctcctgtatatgtgaatatggcatgatttttgtccattacaagctcggttttaactttattgcctgtaataatttctctcatctgtaggatatctatttttttgtcatgcattgccttcaagacgggacgaagaaacgtaatatcctcaataacgttatcgttttctacaataactacatattctacctttttattttctaactcggtaaaaaaattagaatcccatagggctaaatgtctagcgatatttcttttcgtttcctctgtacacatagtgttacaaaaccctgaaaagaagtgagtatacttgtcatcatttctaatgtttcctccagtccactgtataaacgcataatccttgtaatgatctggatcatccttgactaccacaacatttcttttttctggcataacttcgttgtcctttacatcatcgaacttctgatcattaatatgctcatgaacattaggaaatgtttctgatggaggtctatcaataactggcacaacaataacaggagttttcaccgccgccatttagttattgaaattaatcatatacaactctttaatacgagttatattttcgtctatccattgtttcacattgacatatttcgacaaaaagatataaaatgcgtattccaatgcttctctgtttaatgaattactaaaatatacaaacacgtcactgtctggcaataaatgatatcttagaatattgtaacaatttattttgtattgcacatgttcgtgatctatgagttcttcttcgaatggcataggatctccgaatctgaaaacgtataaataggagttagaataataatatttgagagtattggtaatatataaactctttagcggtataattagtttttttctctcaatttctatttttagatgtgatggaaaaatgactaattttgtagcattagtatcatgaactctaatcaaaatcttaatatcttcgtcacacgttagctctttgaagtttttaagagatgcatcagttggttctacagatggagtaggtgcaacaattttttgttctacacatgtatgtactggagccattgttttaactataatggtgcttgtatcgaaaaactttaatgcagatagcggaagctcttcgccgcgactttctacgtcgtaattgggttctaacgccgatctctgaatggatactagttttctaagttctaatgtgattctctgaaaatgtaaatccaattcctccggcattatagatgtgtatacatcggtaaataaaactatagtatccaacgatcccttctcgcaaattctagtcttaaccaaaaaatcgtatataaccacggagatggcgtatttaagagtggattcttctaccgttttgttcttggatgtcatataggaaactataaagtccgcactactgttaagaatgattactaacgcaactatatagtttaaattaagcattttggaaacataaaataactctgtagacgatacttgactttcgaataagtttgcagacaaacgaagaaagaacagacctctcttaatttcagaagaaaactttttttcgtattcctgacgtctagagtttatatcaataagaaagttaagaattagtcggttaatgttgtatttcattacccaagtttgagatttcataatattatcaaaagacatgataatattaaagataaagcgctgactatgaacgaaatagctatatggttcgctcaagaatatagtcttgttaaacgtggaaacgataactgtatttttaatcacgtcagcggcatctaaattaaatataggtatatttattccacacactctacaatatgccacaccatcttcataataaataaattcgttagcaaaattattaattttagtgaaatagttagcgtcaactttcatagcttccttcaatctaatttgatgctcacacggtgcgaattccactctaacatcccttttccatgcctcaggttcatcgatctctataatatctagttttttgcgtttcacaaacacaggctcgtctctcgcgatgagatctgtatagtaactatgtaaatgataactagatagaaagatgtagctatatagatgacgatcctttaagagaggtataataactttaccccaatcagatagactgttgttatggtcttcggaaaaagaatttttataaatttttccagtattttccaaatatacgtacttaacatctaaaaaatccttaatgataataggaatggataatccgtctattttataaagaaatacatatcgcacattatacttttttttggaaatgggaataccgatgtgtctacataaatatgcaaagtctaaatattttttagagaatcttagttggtccaaattcttttccaagtacggtaatagatttttcatattgaacggtatcttcttaatctctggttctagttccgcattaaatgatgaaactaagtcactatttttataactaacgattacatcacctctaacatcatcatttaccagaatactgatcttcttttgtcgtaaatacatgtctaatgtgttaaaaaaaagatcatacaagttatacgtcatttcatctgtggtattcttgtcattgaaggataaactcgtactaatctcttctttaacagcctgttcaaatttatatcctatatacgaaaaaatagcaaccagtgtttgatcatccgcgtcaatattctgttctatcgtagtgtataacaatcgtatatcttcttctgtgatagtcgatacgttataaaggttgataacgaaaatatttttatttcgtgaaataaagtcatcgtaggattttggacttatattcgcgtctagtagatatgcttttatttttggaatgatctcaattagaatagtctctttagagtccatttaaagttacaaacaactaggaaattggtttatgatgtataatttttttagtttttatagattctttattctatacttaaaaaatgaaaataaatacaaaggttcttgagggttgtgttaaattgaaagcgagaaataatcataaattatttcattatcgcgatatccgttaagtttgtatcgtaatggcgtggtcaattacgaataaagcggatactagtagcttcacaaagatggctgaaatcagagctcatctaaaaaatagcgctgaaaataaagataaaaacgaggatattttcccggaagatgtaataattccatctactaagcccaaaaccaaacgagccactactcctcgtaaaccagcggctactaaaagatcaaccaaaaaggaggaagtggaagaagaagtagttatagaggaatatcatcaaacaactgaaaaaaattctccatctcctggagtcagcgacattgtagaaagcgtggccgctgtagagctcgatgatagcgacggggatgatgaacctatggtacaagttgaagctggtaaagtaaatcatagtgctagaagcgatctctctgacctaaaggtggctaccgacaatatcgttaaagatcttaagaaaattattactagaatctctgcagtatcgacggttctagaggatgttcaagcagctggtatctctagacaatttacttctatgactaaagctattacaacactatctgatctagtcaccgagggaaaatctaaagttgttcgtaaaaaagttaaaacttgtaagaagtaaatgcgtgcacttttttataaagatggtaaactctttaccgataataattttttaaatcctgtatcagacgataatccagcgtatgaggttttgcaacatgttaaaattcctactcatttaacagatgtagtagtatatgaacaaacgtgggaggaggcgttaactagattaatttttgtgggaagtgattcaaaaggacgtagacaatacttttacggaaaaatgcatgtacagaatcgcaacgctaaaagagatcgtatttttgttagagtatataacgttatgaaacgaattaattgttttataaacaaaaatataaagaaatcgtccacagattccaattatcagttggcggtttttatgttaatggaaactatgttttttattagatttggtaaaatgaaatatcttaaggagaatgaaacagtagggttattaacactaaaaaataaacacatagaaataagtcccgatgaaatagttatcaagtttgtaggaaaggacaaagtttcacatgaatttgttgttcataagtctaatagactatataaaccgctattgaaactgacggatgattctagtcccgaagaatttctgttcaacaaactaagtgaacgaaaggtatacgaatgtatcaaacagtttggtattagaatcaaggatctccgaacgtatggagtcaattatacgtttttatataatttttggacaaatgtaaagtccatatctcctcttccgtcaccaaaaaagttaatagcattaactatcaaacaaactgctgaagtggtaggtcatactccatcaatttcaaaaagagcttatatggcaacgactattttagaaatggtaaaggataaaaattttttagatgtagtatctaaaactacgttcgatgaattcctatctatagtcgtagatcacgttaaatcatctacggatggatgatatagatctttacacaaataattacaagaccgataaatggaaatggataagcgtatgaaatctctcgcaatgacagctttcttcggagagctaagcacattagatattatggcattgataatgtctatatttaaacgccatccaaacaataccattttttcagtggataaggatggtcagtttatgattgatttcgaatacgataattataaggcttctcaatatttggatctgaccctcactccgatatctggagatgaatgcaagactcacgcatcgagtatagccgaacaattggcgtgtgcggatattattaaagaggatattagcgaatatatcaaaactactccccgtcttaaacgatttataaaaaaataccgcaatagatcagatactcgtatcagtcgagatacagaaaagcttaaaatagctctagctaaaggcatagattacgaatatataaaagacgcttgttaataagtaaatgaaaaaaaactagtcgtttataataaaacacgatatggatgccaacgtagtatcattttctactattgcgacgtatatagacgctttagcgaagaatgcttcggaattagaacagaggtctaccgcatacgaaataaataatgaattggaactagtatttattaagccgccattgattactttgacaaatgtagtgaatatctctacgattcaggaatcgtttattcgatttaccgttactaataaggaaggtgttaaaattagaactaagattccattatctaaggtacatggtctagatgtaaaaaatgtacagttagtagatgctatagataacatagtttgggaaaagaaatcattagtgacggaaaatcgtcttcacaaagaatgcttgttgagactatcgacagaggaacgtcatatatttttggattacaagaaatatggatcctctatccgactagaattagtcaatcttattcaagcaaaaacaaaaaactttacgatagactttaagctaaaatattttctaggatccggtgcccagtctaaaagttctttgttgcacgctattaatcatccaaagtcaaggcctaatacatctctggaaatagaattcacacctagagacaatgaaacagttccatatgatgaactaataaaggaattgacgactctctcgcgtcatatatttatggcttctccagagaatgtaattctttctccgcctattaacgcgcctataaaaacctttatgttgcctaaacaagatatagtaggtttggatctggaaaatctatatgccgtaactaagactgacggcattcctataactatcagagttacatcaaacgggttgtattgttattttacacatcttggttatattattagatatcctgttaagagaataatagattccgaagtagtagtctttggtgaggcagttaaggataagaactggaccgtatatctcattaagctaatagagcctgtgaatgcaatcaatgatagactagaagaaagtaagtatgttgaatctaaactagtggatatttgtgatcggatagtattcaagtcaaagaaatacgaaggtccgtttactacaactagtgaagtcgtcgatatgttatctacatatttaccaaagcaaccagaaggtgttattctgttctattcaaagggacctaaatctaacattgattttaaaattaaaaaggaaaatactatagaccaaactgcaaatgtagtatttaggtacatgtccagtgaaccaattatctttggagaatcgtctatctttgtagagtataagaaatttagcaacgataaaggctttcctaaagaatatggttctggtaagattgtgttatataacggcgttaattatctaaataatatctattgtttggaatatattaatacacataatgaagtgggtattaagtccgtggttgtacctattaagtttatagcagaattcttagttaatggagaaatacttaaacctagaattgataaaaccatgaaatatattaactcagaagattattatggaaatcaacataatatcatagtcgaacatttaagagatcaaagcatcaaaataggagatatctttaacgaggataaactatcggatgtgggacatcaatacgccaataatgataaatttagattaaatccagaagttagttattttacgaataaacgaactagaggaccgttgggaattttatcaaactacgtcaagactcttcttatttctatgtattgttccaaaacatttttagacgattccaacaaacgaaaggtattggcgattgattttggaaacggtgctgacctggaaaaatacttttatggagagattgcgttattggtagcgacggatccggatgctgatgctatagctagaggaaatgaaagatacaacaaattaaactctggaattaaaaccaagtactacaaatttgactacattcaggaaactattcgatccgatacatttgtctctagtgtcagagaagtattctattttggaaagtttaatatcatcgactggcagtttgctatccattattcttttcatccgagacattatgctaccgtcatgaataacttatccgaactaactgcttctggaggcaaggtattaatcactaccatggacggagacaaattatcaaaattaacagataaaaagacttttataattcataagaatttacctagtagcgaaaactatatgtctgtagaaaaaatagctgatgatagaatagtggtatataatccatcaacaatgtctactccaatgactgaatacattatcaaaaagaacgatatagtcagagtgtttaacgaatacggatttgttcttgtagataacgttgatttcgctacaattatagaacgaagtaaaaagtttattaatggcgcatctacaatggaagatagaccgtctacaaaaaactttttcgaactaaatagaggagccattaaatgtgaaggtttagatgtcgaagacttacttagttactatgttgtttatgtcttttctaagcggtaaataataatatggtatgggttctgatctcccagttctaaatgcattaaataattccaatagagcgatttttgttcctataggaccttccaactgtggatactctgtattgttaatagatatattaatacttttgtcgggtaacagaggttctacgtcttctaaaaataaaagttttataacatctggcctgttcataaataaaaacttggcgattctatatatactcttattatcaaatctagccattgtcttatagatgtgagctactgtaggtgtaccatttgattttctttctaatactatatatttctctcgaagaagttcttgcacatcatctgggaataaaatactactgttgagtaaatcagttattttttttatatcgatattgatggacatttttatagttaaggataataagtatcccaaagtcgataacgacgataacgaagtatttatacttttaggaaatcacaatgactttatcagattaaaattaacaaaattaaaggagcatgtatttttttctgaatatattgtgactccagatacatatggatctttatgcgtcgaattaaatgggtctagttttcagcacggcggtagatatatagaggtggaggaatttatagatgctggaagacaagttagatggtgttctacatccaatcatatatctaaagatatacccgaagatatgcacactgataaatttgtcatttatgatatttatacgtttgattcgttcaagaataaacgattggtattcgtacaggtacctccgtcgttaggagatgatagtcatttgactaatccgttattgtcaccgtattatcgtaattcagtagccagacaaatggtcaatgatatgatttttaatcaagattcatttttaaaatatttattagaacatctgattagaagccactatagagtttctaaacatataacaatagttagatacaaggataccgaagaattaaatctaacgagaatatgttataatagagataagtttaaggcgtttgtattcgcttggtttaacggcgtttcggaaaatgaaaaggtactagatacgtataaaaaggtatctaatttgatataatgaattcagtgactgtatcacacgcgccatatactattacttatcacgatgattgggaaccagtaatgagtcaattggtagagttttataacgaagtagccagttggctgctacgagacgagacgtcgcctattcctgataagttctttatacagttgaaacaaccgcttagaaataaacgagtatgtgtgtgtggtatagatccgtatccgaaagatggaactggtgtaccgttcgaatcaccaaattttacaaaaaaatcaattaaggagatagcttcatctatatctagattaaccggagtaattgattataaaggttataaccttaatataatagacggggttataccctggaattattacttaagttgtaaattaggagaaacaaaaagtcacgcgatttactgggataagatttccaagttactgctgcagcatataactaaacacgttagtgttctttattgtttgggtaaaacagatttctcgaatatacgggccaagttagaatccccggtaactaccatagtcggatatcatccagcggctagagaccgccaattcgagaaagatagatcatttgaaattatcaacgttttactggaattagacaacaaggcacctataaattgggctcaagggtttatttattaatgctttagtgaaattttaacttgtgttctaaatggatgcggctattagaggtaatgatgttatctttgttcttaagactataggtgtcccgtcagcgtgcagacaaaatgaagatccaagatttgtagaagcatttaaatgcgacgagttagaaagatatattgagaataatccagaatgtacactattcgaaagtcttagggatgaggaagcatactctatagtcagaattttcatggatgtagatttagacgcgtgtctagacgaaatagattatttaacggccattcaagattttattatcgaggtgtcaaactgtgtagctagattcgcgtttacagaatgcggcgccattcatgaaaatgtaataaaatccatgagatctaatttttcattgactaagtctacaaatagagataaaacaagttttcatattatctttttagatacgtataccactatggatacattgatagctatgaaacgaacactattagaattaagtagatcatctgaaaatccactaaccagatcgatagacactgccgtatataggagaaaaacaactcttcgggttgtaggtactaggaaaaatccaaattgcgacactattcatgtaatgcaaccaccgcatgataatatagaagattacctattcacttacgtggatatgaacaacaatagttattacttttctctacaacaacgattggaggatttagttcctgataagttatgggaaccagggtttatttcattcgaagacgctataaaaagagtttcaaaaatattcattaattctataataaactttaatgatctcgatgaaaataattttacaacggtaccactggtcatagattacgtaacaccttgtgcattatgtaaaaaacgatcgcataaacatccgcatcaactatcgttggaaaatggtgctattagaatttacaaaactggtaatccacatagttgtaaagttaaaattgttccgttggatggtaataaactgtttaatattgcacaaagaattttagacactaactctgttttattaaccgaacgaggagaccatatagtttggattaataattcatggaaatttaacagcgaagaacccttgataacaaaactaattttgtcaataagacatcaactacctaaggaatattcaagcgaattactctgtccaagaaaacgaaagactgtagaagctaacatacgagacatgttagtagattcagtggagaccgatacctatccggataaacttccgtttaaaaatggtgtattggacctggtagacggaatgttttactctggagatgatgctaaaaaatatacgtgtactgtatcaaccggatttaaatttgacgatacaaagttcgtcgaagacagtccagaaatggaagagttaatgaatatcattaacgatatccaaccattaacggatgaaaataagaaaaatagagagctatatgaaaaaacattatctagttgtttatgcggtgctaccaaaggatgtttaacattcttttttggagaaactgcaactggaaagtcgacaaccaaacgtttgttaaagtctgctatcggtgacctgtttgttgagacgggtcaaacaattttaacagatgtattggataaaggacctaatccatttatcgctaacatgcatttgaaaagatctgtattctgtagcgaactacctgattttgcctgtagtggatcaaagaaaattagatctgacaatattaaaaagttgacagaaccttgtgtcattggaagaccgtgtttctccaataaaattaataatagaaaccatgcgacaatcattatcgatactaattacaaacctgtttttgataggatagataacgcattaatgagaagaattgccgtcgtgcgattcagaacacacttttctcaaccttctggtagagaggctgctgaaaataatgacgcgtacgataaagtcaaactattagacgaggggttagatggtaaaatacaaaataatatatatagatttgcatttctatacttgttggtgaaatggtacaaaaaatatcatgttcctattatgaaactatatcctacacccgaagagattcctgactttgcattctatctcaaaataggtactctgttggtatctagctctgtaaagcatattccattaatgacggacctctccaaaaagggatatatattgtacgataatgtggtcactcttccgttgactactttccaacagaaaatatccaagtattttaattctagactatttggacacgatatagagagcttcatcaatagacataagaaatttgccaatgttagtgatgaatatctgcaatatatattcatagaggatatttcatctccgtaaatatatgctcatatatttatagaagatatcacatatctaaatgaataccggaatcatagatttatttgataatcatgttgatagtataccaactatattacctcatcagttagctactctagattatctagttagaactatcatagatgagaacagaagcgtgttattgttccatattatgggatcaggtaaaacaataatcgctttgttgttcgccttggtagcttccagatttaaaaaggtttacattctagtgccgaacatcaacatcttaaaaattttcaattataatatgggtgtagctatgaacttgtttaatgacgaattcatagctgagaatatctttattcattccacaacaagtttttattctcttaattataacgataacgtcattaattataacggattatctcgctacaataactctatttttatcgttgatgaggcacataatatctttgggaataatactggagaacttatgaccgtgataaaaaataaaaacaagattccttttttactattgtctggatctcccattactaacacacctaatactctgggtcatattatagatttaatgtccgaagagacgatagattttggtgaaattattagtcgtggtaagaaagtaattcagacacttcttaacgaacgcggtgtgaatgtacttaaggatttgcttaaaggaagaatatcatattacgaaatgcctgataaagatctaccaacgataagatatcacggacgtaagtttctagatactagagtagtatattgtcacatgtctaaacttcaagagagagattatatgattactagacgacagctatgttatcatgaaatgtttgataaaaatatgtataacgtgtcaatggcagtattgggacaacttaatctgatgaataatttagatactttatttcaggaacaggataaggaattgtacccaaatctgaaaataaataatggcgtgttatacggagaagaattggtaacgttaaacattagttccaaatttaaatactttattaatcggatacagacactcaacggaaaacattttatatacttttctaattctacatatggcggattggtaattaaatatatcatgctcagtaatggatattctgaatataatggttctcagggaactaatccacatatgataaacggcaaaccaaaaacatttgctatcgttactagtaaaatgaaatcgtctttagaggatctattagatgtgtataattctcctgaaaacgatgatggtagtcaattgatgtttttgttttcatcaaacattatgtccgaatcctatactctaaaagaggtaaggcatatttggtttatgactatcccagatactttttctcaatacaaccaaattcttggacgatctattagaaaattctcttacgccgatatttctgaaccagttaatgtatatcttttagccgccgtatattccgatttcaatgacgaagtgacgtcattaaacgattacacacaggatgaattaattaatgttttaccatttgacatcaaaaagctgttgtatctaaaatttaagacgaaagaaacgaatagaatatactctattcttcaagagatgtctgaaacgtattctcttccaccacatccatcaattgtaaaagttttattgggagaattggtcagacaatttttttataataattctcgtattaagtataacgataccaagttacttaaaatggttacatcagttataaaaaataaagaagacgctaggaattacatagatgatattgtaaacggtcacttctttgtatcgaataaagtatttgataaatctcttttatacaaatacgaaaacgatattattacagtaccgtttagactttcctacgaaccatttgtttggggagttaactttcgtaaagaatataacgtggtatcttctccataaaactgatgagatatataaagaaataaatgtcgagctttgttaccaatggatacctttccgttacattggaaccacacgagctgacgttagacataaaaactaatattaggaatgccgtatataagacgtatctccatagagaaattagtggtaaaatggccaagaaaatagaaattcgtgaagacgtggaattacctctcggcgaaatagttaataattctgtagttataaacgttccgtgtgtaataacctacgcgtattatcacgttggggatatagtcagaggaacattaaacatcgaagatgaatcaaatgtaactattcaatgtggagatttaatctgtaaactaagtagagattcgggtactgtatcatttagcgattcaaagtactgcttttttcgaaatggtaatgcgtatgacaatggcagcgaagtcactgccgttctaatggaggctcaacaaggtatcgaatctagttttgtttttctcgcgaatatcgtcgactcataaaaaagagaatagcggtaagtataaacacgaatactatggcaataattgcgaatgttttattctcttcgatatatttttgataatatgaaaaacatgtctctctcaaatcggacaaccatctcataaaatagttctcgcgcgctggagaggtagttgccgctcgtataatctctccagaataatatacttgcgtgtcgtcgttcaatttatacggatttctatagttctctgttatataatgcggtttgccctcatgattagacgacgacaatagtgttctaaatttagatagttgatcagaatgaatgtttattggcgttggaaaaattatccatacagcgtctgcagagtggttgatagttgttcctagatatgtaaaataatccaacttactaggcagcaaattgtctagataaaatactgaatcaaacggtgcagacgtattggcggatctaatggaatccaattgattaactatcttttgaaaatatacatttttatgatccaatacttgtaagaatatagaaataatgataagtccatcatcgtgtttttttgcctcttcataagaactatattttttcttattccaatgaacaagattaatctctccagagtatttgtacacatctatcaagtgattggatccataatcgtcttcctttccccaatatatatgtagtgatgataacacatattcattggggagaaaccctccacttatatatcctcctttaaaattaatccttactagttttccagtgttctggatagtggttggtttcgactcattataatgtatgtctaacggcttcaatcgcgcgttagaaattgcttttttagtttctatattaataggagatagttgttgcggcatagtaaaaatgaaatgataactgtttaaaaatagctcttagtatgggaattacaatggatgaggaagtgatatttgaaactcctagagaattaatatctattaaacgaataaaagatattccaagatcaaaagacacgcatgtgtttgctgcgtgtataacaagtgacggatatccgttaataggagctagaagaacttcattcgcgttccaggcgatattatctcaacaaaattcagattctatctttagagtatccactaaactattacggtttatgtactacaatgaactaagagaaatctttagacggttgagaaaaggttctatcaacaatatcgatcctcactttgaagagttaatattattgggtggtaaactagataaaaaggaatctattaaagattgtttaagaagagaattaaaagaggaaagtgatgaacgtataacagtaaaagaatttggaaatgtaattctaaaacttacaacacgggataaattatttaataaagtatatataagttattgcatggcgtgttttattaatcaatcgttggaggatttatcgcatactagtatttacaatgtagaaattagaaagattaaatcattaaatgattgtattaacgacgataaatacgaatatctgtcttatatttataatatgctagttaatagtaaatgaacttttacagatctagtataattagtcagattattaagtataatagacgactagctaagtctattatttgcgaggatgactctcaaattattacactcacggcattcgttaaccaatgcctatggtgtcataaacgagtatccgtgtccgctattttattaactactgataacaaaatattagtatgtaacagacgagatagttttctctattctgaaataattagaactagaaacatgtttagaaagaaacgattatttctgaattattccaattatttgaacaaacaggaaagaagtatactatcgtcatttttttctctagatccagctactactgataatgatagaatagacgctatttatccgggtggcatacccaaaaggggtgagaatgttccagagtgtttatccagggaaattaaagaagaagttaatatagacaattcttttgtattcatagacactcggttttttattcatggcatcatagaagataccattattaataaattttttgaggtaatcttctttgtcggaagaatatctctaacgagtgatcaaatcattgatacatttaaaagtaatcatgaaatcaaggatctaatatttttagatccgaattcaggtaatggactccaatacgaaattgcaaaatatgctctagatactgcaaaacttaaatgttacggccatagaggatgttattatgaatcattaaaaaaattaactgaggatgattgattaaaaaatataaattaatttaccatcgtgtatttttataacgggattgtccggcatatcatgtagatagttaccgtctacatcgtatactcgaccatctacgcctttaaatcctctatttattgacattaatctattagaattggaataccaaatattagtaccctcaattagtttattggtaatattttttttagacgatagatcgatggctcttgaaaccaaggttttccaaccggactcattgtcgatcggtgagaagtctttttcattagcatgaatccattctaatgatgtatgtttaaacactctaaacaattggacaaattcttttgatttgctttgaatgatttcaaataggtcttcgtctacagtaggcataccattagataatctagccattataaagtgcacgtttacatatctacgttctggaggagtaagaacgtgactattgagacgaatggctcttcctactatctgacgaagagacgcctcgttccatgtcatatctaaaatgaagatatcattaattgagaaaaaactaataccctcgcctccactagaagagaatacgcatgttttaatgcattctccgttagtgtttgattcttggttaaactcagccaccgccttgattctagtatcttttgttctagatgagaactctatattagagataccaaagactttgaaatatagtaataagatttctattcctgactgattaacaaatggttcaaagactagacatttaccatgggatgctaatattcccaaacatacatctataaatttgacgcttttctcttttaattcagtaaatagagagatatcagccgcactagcatcccctttcaatagttctccctttttaaaggtatctaatgcggatttagaaaactctctatctcttaatgaatttttaaaatcattatatagtgttgctatctcttgcgcgtattcgcccggatcacgattttgtctttcaggaaagctatcgaacgtaaacgtagtagccatacgtctcagaattctaaatgatgatatacctgtttttatttcagcgagtttagccttttgataaatttcttcttgctttttcgacatattaacgtatcgcattaatactgttttcttagcgaatgatgcagacccttctacgtcatcaaaaatagaaaactcgttattaactatatacgaacatagtcctcctagtttggagactaattctttttcatcgactagacgtttattctcaaatagcgattggtgttgtaaggatcctggtcgtagtaagttaaccaacatggtgaattcttgcacactattgacgataggtgtagccgataaacaaatcatcttatggttttttaacgcaatggtcttagataaaaaattatatactgaacgagtaggacggatcttaccatcttctttgattaatgatttagaaatgaagttatgacattcatcaataatgacgcatattctactcttggaattaatagttttgatattagtaaaaaatttatttctaaaattttgatcatcgtaattaataaaaatacaatccttcgttatctctggagcgtatctgagtatagtgttcatccaaggatcttctatcaaagcctttttcaccaataagataatagcccaattcgtataaatatccttaagatgtttgagaatatatacagtagtcattgttttaccgacacccgtttcatggaacaataaaagagaatgcatactgtctaatcctaagaaaactcttgctacaaaatgttgataatccttgaggcgtactacgtccgaccccatcatttcaacgggcatattagtagttctgcgtaaggcataatcgatataggccgcgtgtgatttactcatttatgagtgataagtaataactatgttttaaaaatcacagcagtagtttaactagtcttctctgatgtttgttttcgatactttttgaatcagaagtcatactagaataaagcaacgagtgaacgtaatagagagcttcgtatactctattcgaaaactctaagaacttattaatgaattccgtatccactggattgtttaaaatactaaattgaacactgttcacatccttccaagaagaagacttagtgacggacttaacatgagacataaataaatccaaattttttttacaaacatcactagccaccataatggcgctatctttcaaccagctatcgcttacgcattttagcagtctaacatttttaaagagactacaatatattctcatagtatcgattacacctctaccgaataaagttggaagtttaataatacaatatttttcgtttacaaaatcaaataatggtcgaaacacgtcgaaggttaacatcttataatcgctaatgtatagattgttttcagtgagatgattattagatttaatagcatctcgttcacgtttgaacagtttattgcgtgcgctgaggtcggcaactacggcgtccgctttagtactcctcccataatactttacgctattaatctttaaaatttcatagactttatctagatcgctttctggtaacatgatatcatgtgtaaaaagttttaacatgtcggtcggcattctatttagatcattaactctagaaatctgaagaaagtaattagctccgtattccagactaggtaatgggcttttacctagagacagattaagttctggcaatgtttcataaaatggaagaaggacatgcgttccctcccggatattttttacaatttcatccatttacaactctatagtttgttttcattattattagttattatctcccataatcttggtaatacttaccccttgatcgtaagataccttatacaggtcattacatacaactaccaattgtttttgtacataatagattggatggttgacatccatggtggaataaactactcgaacagatagtttatctttccccctagatacattagccgtaatagttgtcggcctaaagaatatctttggtgtaaagttaaaagttagggttcttgttccattattgctttttgtcagtagttcattataaattctcgagatgggtccgttctctgaatatagaacatcatttccaaatctaacttctagtctagaaataatatcggtcttattcttaaaatctattcccttgatgaagggatcgttaatgaacaaatccttggcctttgattcggctgatctattatctccgttatagacgttacgttgactagtccaaagacttacaggaatagatgtatcgatgatgttgatactatgtgatatgtgagcaaagattgttctcttagtggcatcactatatgttccagtaatggcggaaaactttttagaaatgttatatataaaagaattttttcgtgttccaaacattagcagattagtatgaagataaacactcatattatcaggaacattatcaatttttacatacacatcagcatcttgaatagaaacgataccatcttctggaacctctacgatctcggcagactccggataaccagtcggtgggccatcgctaacaataactagatcatccaacaatctactcacatatgcatctatataatctttttcatcttgtgagtaccctggatacgaaataaatttattatccgtatttccataataaggtttagtataaacagagagagatgttgccgcatgaacttcagttacagtcgccgttggttggtttatttgacctattactctcctaggtttctctataaacgatggtttaatttgtacattcttaaccatatatccaataaagctcaattcaggaacataaacaaattctttgttgaacgtttcaaagtcgaacgaagagtcacgaataacgatatcggatactggattgaaggttaccgttacggtaatttttgaatcggatagtttaagactgctgaatgtatcttccacatcaaacggagttttaatataaacgtatactgtagatggttctttaatagtgtcattaggagttaggccaatagaaatatcattaagttcactagaatatccagagtgtttcaaagcaattgtattattgatacaattattatataattcttcgccctcaatttcccaaataacaccgttacacgaagagatagatacgtgattaatacatttatatccaacatatggtacgtaactgaatcttcccatacctttaacttctggaagttccaaactcagaaccaaatgattaagcgcagtaatatactgatccctaatttcgaagctagcgatagcctgattgtctggaccatcgtttgtcataactccggatagagaaatatattgcggcatatacaaagttggaatttgactatcgactgcgaagacattagaccgtttaatagagtcatccccaccgatcaaagaattaatgatagtattattcattttctatttaaaatggaaaaagcttacaataaactccgtagagaaatatctataatttgtgagttttccttaaagtaacagcttccgtaaacgccgtctttatctcttagtaggtttattgtatttatgaccttttccttatcttcatagaatactaaaggcaacaaagaaatttttggttcttctctaagagctacgtgagacttaaccatagaagccaacgaatccctacatattttagaacagaaataccctacttcaccacccttgtatgtctcaatactaataggtctaaaaaccaaatcttgattacaaaaccaacacttatcaattacactatttgtcttaatagacacatctgccatagatttataatactttggtagtatacaagcgagtgcttcttctttagcgggcttaaagactgctttaggtgctgaaataaccacatctggaaggcttactcgcttagccatttaattacggaactatttttttatacttctaatgagcaagtagaaaacctctcatctacaaaaacgtactcgtgtccataatcctctaccatagttacacgttttttagatctcatatgtgctaaaaagttttcccatactaattggttactattatttttcgtataatttttaacagtttgaggttttagatttttagttacagaagtgatatcgaatattttatccaaaaagaatgaataattaattgtcttagaaggagtgttttcttggcaaaagaataccaagtgcttaaatatttctactacttcattaatcttttctgtactcagattcagtttctcatcttttacttgattgattatttcaaagactaacttataatcctttttatttattctctcgttagccttaagaaaactagatacaaaatttgcatctacatcatccgtggatatttgatttttttccatgatatccaagagttccgagataatttctccagaacattgatgagacaataatctccgcaatacatttctcaaatgaataagtttattagacacgtggaagtttgactttttttgtacctttgtacatttttgaaataccgactcgcaaaaaatacaatattcatatccttgttcagatactataccgttatgtctacaaccgctacataatcgtagattcatgttaacactctacgtatctcgtcgtccaatattttatataaaaacattttatttctagacgttgccagaaaatcctgtaatatttttagttttttgggctgtgaataaagtatcgccctaatattgttaccgtcttccgccaatatagtagttaaattatccgcacatgcagaagaacaccgcttaggcggattcagtacaatgttatatttttcgtaccaactcatttaaatatcataatctaaaatagttctgtaatatgtctagcgctaatatattgatcataatcctgtgcataaattaagatacaacaatgtctcgaaatcatcgacatggcttcttccatagttagaagatcgtcgtcaaagttagcaacgtgattcatcaacatttgctgttttgaggcagcaaatactgaaccgtcgccattcaaccattcataaaaaccatcgtctgaatccattgataatttcttgtactggtttttgagagctcgcatcaatctagcatttctagctcccggattgaaaacagaaagaggatcgtacatccagggtccattttctgtaaatagaatcgtataatgtcccttcaagaagatatcagacgatccacaatcaaagaattggtctccgagtttgtaacaaactgcggactttaacctatacatgataccgtttagcataatttctggtgatacgtcaatcggagtatcatctattagagatctaaagccggtgtaacattctccaccaaacatattcttattctgacgtcgttctacataaaacatcattgctccattaacgataacaggggaatgaacagcactacccatcacattagttcccaatggatcaatgtgtgtaactccagaacatcttccatagcctatgttaggaggagcgaacaccactcttccactattgccatcgaatgccatagaataaatatccttggaattgatagaaatcggactgtcggatgttgtgatcatcttcataggattaacaactatgtatggtgccgcctgaagtttcatatcgtaactgatgccgtttataggtctagccacagaaaccaacgtaggtctaaatccaactatagacaaaatagaagccaatatctgttcctcatctgtcataacttgagagcatccagtatgaataatcttcattagatggggatctaccgcatcatcatcgttacaataaaaaattcccattctaatgttcataattgcttttctaatcatggtatgcatgtttgctctctgaatctctgtggaaattagatctgatacacctgtaatcactatcggattatcctccgtaagacgattaaccaacaacatataattataagactttacttttctaaattcataaagttgctggattaggctataggtgtctccatgtacatacgcgttctcgagcgcaggaagtttaataccgaatagtgccatcagaataggatgaatatagtaattagtttctggttttctataaataaaagacaaatcttgtgaactagacatatcggtaaaatgcatggattggaatcgtgtagtcgacagaagaatatgatgattagatggagagtatattttatctaactctttgagttggtcaccgattctaggactagctcgagaatgaataagtactaaaggatgagtacatttcacagaaacactagcattgttcaatgtgctctttacatgggtaaggagttgaaatagctcgtttctatttgttctgacaatatttagtttattcataatgttaagcatatcctgaatagtaaagttagatgtgtcatacttgttagtagttagatatttagcaattgcattcccatcatttctcaatctcgtactccaatcatgcgtggatgctacttcgtcgatggaaaccatacaatcctttttgataggctgttgagattgatcatttcctgcacgtttaggtttggtacgttgatttctagcccctgcggatataaagtcatcgtctacaatttgggacaatgaattgcatacactacaagacaaagatttatcagaagtgtgaatatgatcttcatctaccaaagaaagagtttgattagtataactagattttagtcctgcgttagatgttaaaaaaacatcgctattgaccacggcttccattatttatattcgtagtttttactcgaaagcgtgattttaatatccaatcttattacttttggaatcgttcaaaacctttgactagttgtagaatttgatctattgccctacgcgtatactcccttgcatcatatacgttcgtcaccagatcgtttgtttcggcctgaagttggtgcatatctctttcaacattcgacatgagatccttaagggccatatcgtctagattttgttgagatgctgctcctggatttggattttgttgtgctgttgtacatactgtaccaccagtaggtgtaggagtacatacagtggccacaataggaggttgagaaagtgtaaccgttggagtagtacaagaaatacttccatccgattgttgtgtacatgtagttgttggtaacgtctgagaaggttgggtagatggcggcgtcgtcgttttttgatctttattaaatttagagataatatcctgaacagcattgctcggcgtcaacgctggaaggagtgaactcgccggcgcatcagtatcttcagacagccaatcaaaaagattagacatatcagatgatgtattagtttgttgtcgtggttttggtgtaggagcagtactactaggtagaagaataggagccgatgtagctgttggaaccggctgtggagttatatgaatagttggttgtagcggttggataggctgtctgctggcggccatcatattatctctagctagttgttctcgcaactgtctttgataatacgactcttgagactttagtcctatttcaatcgcttcatcctttttcgtatccggatccttttcttcagaataatagattgacgactttggtgtagaggattctgccagcctctgtgagaacttgttaaagaagtccatttaaggctttaaaattgaattgcgattataagattaaatggcagacacagacgatattatcgactatgaatccgatgatctcaccgaatacgaggatgatgaagaagaggaagaagatggagagtcactagaaactagtgatatagatcccaaatcttcttataagattgtagaatcagcatccactcatatagaagatgcgcattccaatcttaaacatatagggaatcatatatctgctcttaaacgacgctatactagacgtataagtctatttgaaatagcgggtataatagcagaaagctataacttgcttcaacgaggaagattacctctagtttcagaattttctgacgaaacgatgaagcaaaatatgctacatgtaattatacaagagatagaggagggttcttgtcctatagtcatcgaaaagaacggagaattgttgtcggtaaacgattttgacaaagatggtctaaaattccatctagactatattatcaaaatttggaaacttcaaaaacgatattagaatttatacgaatatcgttctctaaatgtcacaatcaagtctcgcatgttcagcaatttattgtcgtactttatatcgtgttcattaacgatatcttgcaaaatagtaatgattctatcttccttcgatagatattcttcagagattattgtcttatattctttcttgttatcagatatgaatttgataagactttgaacattattgatacccgtctgtttaattttttctacagatattttagttttggcagattctatcgtatctgtcaatagacatccaacatcgacattcgacgtcaattgtctataaatcaacgtataaattttagaaataacattagcgaattgttgtgcgttgatgtcgttattctgaaacagtatgattttaggtagcattttcttaacaaagagaacgtatttattgttactcagttgaacagatgatatatccagattactaacgcatctgattccgtataccaaactttcagaagaaatggtatacaattgtttgtattcattcaatgtctctttttcagaaattagtttagagtcgaatactgcaataattttcaagagatagttttcatcagataagattttatttagtgtagatatgataaaactattgttttgttggagaacttgatacgccgcgttctctgtagtcgacgctctcaaatgggaaacaatctccattatttttttggaatcggatactatatcttcggtatcttgacgcagtctagtatacatagagttaagagagattagagtttgtacattaagcaacatgtctctaaatgtggctacaaacttttcctttttcacatcatctagtttattatataccgatttcacaacggcaccagatttaaggaaccagaatgaaaaactctgataactacaatatttcatcatagttacgattttatcatcttctatagttggtgtaatagcgcatacctttttctccaagactggaaccaacgtcataaaaatgtttaaatcaaaatccatatcaacatctgatgcgctaagaccagtctcgcgttcaagattatctttactaatggtgacgaactcatcgtataaaactctaagtttgtccattatttatttacagatttagttgtttaatttatttgtgctcttccagagttgggatagtatttttctaacgtcggtattatattattaggatctacgttcatatgtatcataatattaatcatccacgttttgataaatctatctttagcttctgaaataacgtatttaaacaaaggagaaaaatatttagctacggcatcagacgcaataacattttttgtaaatgtaacgtatttagacgacagatcttcgttaaaaagttttccatctatgtagaatccatcggttgttaacaccattcccgcgtcagattgaataggagtttgaatagtttgttttggaaatagatccttcaataacttatagttgggtgggaaaaaatcgattttatcactagactctttcttttttactatcattacctcatgaactatttcttgaatgagtatatgtattttctttcctatatcggacgcgttcattggaaaatataccatgtcgttaactataagaatatttttatcctcgtttacaaactgaataatatcagatgtagttcgtaaacgaactatatcatcaccagcacaacatctaactatatgatatccactagtttcctttagccgtttattatcttgttccatattagcagtcattccatcatttaagaaggcgtcaaaaataatagggagaaatgacattttggattctgttacaactttaccaaaattaaggatatacggacttactatctttttctcaacgtcaatttgatgaacacacgatgaaaatgtgcttctatgagattgatcatgtagaaaacaacaagggatacaatatttccgcatatcatgaaatatattaagaaatcccaccttattatatttccccaaaggatccatgcacgtaaacattatgccgttatcattaataaagacttctttctcatcggatctgtaaaagttgttactgatttttttcattccaggatctagataattaataatgatgggttttctattcttattctttgtattttggcatatcctagaccagtaaacagtttccactttggtaaaatcagcagacttttgaacgctattaaacatggcattaatggcaataactaaaaatgtaaaatatttttctatgttaggaatatggtttttcactttaatagatatatggtttttggccaaaatgatagatatttttttatccgaggatagtaaaatattattagtcgccgtctctataaaaatgaagctagtctcgatatccaattttattctagaattgataggagtcgccaaatgtaccttatacgttatatctcccttgatgcgttccatttgtgtatctatatcggacacaagatctgtaaatagttttacgttattaatcatcacggtatcgccgtcgctagataacgctaatgtaccatccaagtcccaaatggagagatttaactgttcatcgtttagaataaaatgattaccggtcatattaataaagtgttcatcgtatctagataacaacgacttataattaatgtccaagtcttgaactcgctgaatgatcttttttaacccagttagttttagattggtacgaaatatattgttaaactttgattctacagtaatgtccaaatctagttgtggaaatacttccatcaacattgtttcaaacttgataatattattatctacatcttcgtacgatccaaattccggaatagatgtatcgcacgctctggccacccagataaccaaaaagtcacacgctccaggatatacattgtataaaaagctatcgttttttagtagggtttttttctgcgtgtatacgaagggattaaaaatagtattatcaacgtaactatattccaaattattcttatgagaatagataataatatcgtccttaatatctaacaaatttcctaaatatccctttaattgagtcattcgaagcgtcaatagaatatgtctcttaactatttccggctgttgtatatttaaatgacttcgtaaaaaataatatatgggcgacttctcatctatgtaatcatatggagtgagatatagggctcgttctacctcctgccccttacccacctgtaataccaattgcggacttactatatatcgcatatttatatcgtggggtaaagtgaaaatctactaccgatgatgtaagtcttacaatgttcgaaccagtaccagatcttaatttggaggcctccgtagaactaggggaggtaaatatagatcaaacaacacctatgataaaggagaatagcggttttatatcccgcagtagacgtctattcgcccatagatctaaggatgatgagagaaaactagcactacgattctttttacaaagactttattttttagatcatagagagattcattatttgttcagatgcgttgacgctgtaaaagacgtcactattaccaaaaaaaataacattatcgtggcgccttatatagcacttttaactatcgcatcaaaaggatgcaaacttacagaaacaatgattgaagcattctttccagaactatataatgaacatagtaagaaatttaaattcaactctcaagtatccatcatccaagaaaaactcggataccagtttggaaactatcacgtttatgattttgaaccgtattactctacagtagctctggctattcgagatgaacattcatctggcatttttaatatccgtcaagagagttatctggtaagttcattatctgaaataacatatagattttatctaattaatctaaaatctgatcttgttcaatggagtgctagtacgggcgctgtaattaatcaaatggtaaatactgtattgattacagtgtatgaaaagttacaactggtcatagaaaatgattcacaatttacatgttcattggctgtggaatcaaaacttccaataaaattacttaaagatagaaatgaattatttacaaaattcattaacgagttaaaaaagaccagttcattcaagataagcaaacgcgataaggatacgctactaaaatattttacttaggactggagttagaatttatagacgactcatttcgtttatcattgttactattattactattactatcattattagtgttggcattattagtattcttcttgtcatcttgttcagaaatatacagcaatgctatacctaatactaaatacattatcatgctcgcaatggctctaacaacaacgaaccaaaatgaatttggtcgtagcttttgttcacaaaaatacataaagaaatgtctacataaatctatggcgccattggctacttgaaatagcgccagtcctcctacagattttaatatagctgtataacatgacatttattcatcatcaaaagagacagagtcaccatctgtcatatttagattttttttcatgtgttcaaagtatcctctactcatttcattataatagtttatcatacttagaattttaggacggatcaatgagtaagacttgactagatcgtcagtagtaatttgtgcatcgtctattctgcatccgcttcgtcgaataatgtatagcatcgctttgagattctccatagctatcaagtctttatacaatgacatggaaatatctgtgaatactttatacttctccaacatcgatgccttaacatcatcgcctactttagcattgaaaatacgttctattgtgtagatggatgtagcaagatttttaaacaacaatgccatcttacacgatgattgcctcaagtctccaatcgtttgtttagaacgattagctacagagtccaatgcttggctgactagcatattattatctttagaaattgtattcttcaatgaggcgtttatcatatctgtgatttcgttagtcatattacagtctgactgggttgtaatgttatccaacatatcacctatggatacggtacacgtaccagcatttgtaataatcctatctaagatgttgtatggcattgcgcagaaaatatcttctcctgtaatatctccactctcgataaatctactcagattattcttaaatgccttattctctggagaaaagatatcagtgtccatcatttcattaatagtatacgcagaaaagataccacgagtatcaattctatccaagatacttatcggttccgagtcacagataatggtttcctctccttcgggagatcctgcatagaaatatctaggacaatagtttctatactgtctgtaactctgataatctctaaagtcactaactgataccatgaaattgagaagatcaaacgctgaagtaattaatttttctgcctcgtttttactacaactagttttcatcaatgtagtgacgatgtattgtttagttacttttggtctaatactgatgatagagatattattgcttcccataatggatcttctagtagtcaccttaaagcccattgatgcgaatagcagatagataaagtcttggtatgactcctttctaatatagtacggactacctttgtcacccaactttatacccacataagccataacaacctctttaatagccgtttcatgaggtttatcagccatgagcctgagtagttggaagaatctcatgaatcccgtctcagaaagtcctatatgcatgatagatttatctttcctgggaaactctcgtatagtcatagatgaaatactctttaaagtttctgaaataagattagtaacagtcttacctccgactactctaggtaacaaacaaactctaataggtgttttctctgcggagataatatcagaaaggatagagcaataagtagtattattgtgattataaagaccgaatacataacaggtagaatttataaacatcatgtcctgaaggtttttagacttgtattcctcgtaatccataccgtcccaaaacatggatttggtaactttgatagccgtagatctttgttccttcgccaacaggttaaagaaattaataaagaatttgttgtttctatttatgtccacaaattgcacgtttggaagcgccacggttacattcactgcagcattttgaggatcgcgagtatgaagtacgatgttattgtttactggtatatctggaaagaaatctaccagtctaggaataagagattgatatcgcatagaaatagtaaagtttataatctcatcatcgaagagcattttgttaccattgtaataaatatccactctgtcatatgtataaatgaagtactgttcaaacatgatgagatgtttatatgttggcatagtagtgagatcgacgtttggtaatggcaatgtattaagattaactccataatgtctagcagcatctgcgatgttataagcgtcgtcaaagcggggtcgatcttgtattgttatatattgtctaacacctataagattatcaaaatcttgtctgcttaatacaccgttaacaatttttgccttgaattcttttattggtgcattaataacatccttatagaggatgttaaacaaataagtgttatcaaagttaagatctggatatttcttttctgctagaacatccattgagtcggagccatctggtttaatataaccaccgataaatctagctctgtattctgtatccgtcaatctaatattaagaaggtgttgagtgaaaggtggaagatcgtaaaagctgtgagtattaatgataggattagtttccgaactaatgttaattggggtattaataatatctatatttccagcgttaagtgtaacattaaacagttttaattcacgtgacgtggtatcaattaaataattaatgcccaatttggatatagcagcctgaagctcatcttgtttagttacggatcctaatgagttattaagcaatatatcgaacggatgaacgaaggttgttttaagttggtcacatactttgtaatctagacatagatgcggaagaacggtagaaactatacgaaataaatattcagagtcctctaattgatcaagagtaactattgacttaataggcatcatttatttagtattaaatgacgaccgtaccagtgacggatatacaaaacgatttaattacagagttttcagaagataattatccatctaacaaaaattatgaaataactcttcgtcaaatgtctattctaactcacgttaacaacgtggtagatagagaacataatgccgccgtagtgtcatctccagaggaaatatcctcacaacttaatgaagatctatttccagatgatgattcaccggccactattatcgaacgagtacaacctcatactactattattgacgatactccacctcctacgtttcgtagagagttattaatatcggaacaacgtcaacaacgagaaaaaagatttaatattacagtatcgaaaaatgctgaagcaataatggaatctagatctatgataacttctatgccaacacaaacaccatccttgggagtagtttatgataaagataaaagaattcagatgttagaggatgaagtggttaatcttagaaatcaacgatctaatacaaaatcatctgataatttagataattttaccaaaatactatttggtaagactccgtacaaatcaacagaagttaataagcgtatagccatcgttaattatgcaaatttgaacgggtcccccttatcagtcgaggacttggatgtttgttcggaggatgaaatagatagaatctataaaacgattaaacaatatcacgaaagtagaaaacgaaaaattatcgtcactaacgtgattattattgtcataaacattatcgagcaggcattgctaaaactcggatttgaagaaatcaaaggactgagtaccgatatcacttcagaaattatcgatgtggagatcggagatgactgcgatgctgtagcatctaaactaggaatcggtaacagtccggttcttaatattgtattgtttatactcaagatattcgttaaacgaattaaaattatttaatttaatacattcccatatccagacaacaatcgtctggattaatctgttcctgtcgtctcataccggacgacatattaatctttttattagtgggcatctttttagatggtttctttttcccagcattaactgagtcgatacctagaagatcgtgattgatctctccgaccattccacgaacttctaattggccgtctctgacggtaccataaactattttaccagcattagtaacagcttggacaatctgaccatccatcgcattgtacgatgtagtagtaactgttgttctacgtctaggagcaccagaagtatttttggagcccttggatgttgatgtagaagaagacgaggattttgattttggtttacatgtaatacattttgaactctttgattttgtatcacatgcgccggcagtcacatctgtttgagaattaagattattgttgcctcctttgacggctgcatctccaccgatttgcgctagtagatttttaagctgtggtgtaatcttattaactgtttcgatataatcatcgtaactgcttctaacggctaaattttttttatccgccatttagaagctaaaaatatttttatttatgcagaagatttaactagattatacaatgaactaatatgatccttttccagattatttacaaacttggtattttttggttctggaggaggcgaatttaaattcggacttggattcggattttgtaagttcttgatcttattatacatcgagtataggatggcgacagtaactgctacacaaataccgatcaaaagaagaataccaatcatttattgacaataacttcactattgatcaagtatgcaatatatcatcttttcactaaataagtagtaataatgattcaacaatgtcgagatatatggacgataataatttagttcatggaaatatcgctatgattggtgtgaatgactccgctaactctgtggggtgcgcagtgctttccccacatagaataaattagcattccgactgtgataataataccaagtataaacgccataatactcaatactttccatgtacgagtgggactggtagacttactaaagtcaataaaggcgaagatacacgaaagaatcaaaagaatgattccagcgattagcacgccggaaaaataatttccaatcataagcatcatgtccatttaactaataaaaattttaaatcgccgaatgaacaaagtggaatataaaccatataaaaacaatagtttgtactgcaaaaataatatctatttttgttttcgaagatatggtaaaattaaatagtagtacacagcatgttataactaacagcagcaacggctcgtaattacttatcatttactagacgaaaaggtggtgggatattttcttgctcaaataatacgaatatatcacccatccattttatgcgatgtttatatactctaatctttaatagatctatagacgacgggtttaccaacaatatagattttatcgattcatctaatttaaacccttccttaaacgtgaatgatctattatctggcataacgatgaccctacctgatgaatcggacaatgtactgggccatgtagaataaattatcaacgaattatcgtctacgaacatttatatcatttgttttaattttaggacgcgaataaatggatataaaatagaaaataacagatattacaaccagtgttatggccgcgcccaaccaggtaggcagttttattttatcttttactacaggttctcctggatgtacgtcaccaacggcggacgtagttctagtacaattagacgtaagttccgcttgggaattttttaacgctaaagagttaacgttaatcgtgcacccaacgtatttacatctagttcgttgaacatcttgattataatataaccattttctatctctagattcgtcagtgcactcatgtaaccaacataccctaggtcctaaatatttatctccggaattagattttggataattcgcgcaccaacaatttctatttcctttatgatcgttacaaaagacgtataatgccgtatccccaaaagtaaaataatcaggacgaataattctaataaactcagaacaatatctcgcatccatatgtttggagcaaatatcggaataagtagacatagccggtttccgttttgcacgtaaccattctaaacaattggggtttccaggatcgtttctacaaaatccagtcatgaaatcgtcacaatgttctgtcttgtaattattattaaatatttttggacagtgtttggtatttgtcttagaacaacattttgccacgctatcactatcgcccaggagataatccttttttataaaatgacatcgttgcccggatgctatataatcagtagcgtgttttaaatccttaatatattcaggagttacctcgttctgataatagattaatgatccaggacgaaatttgaaagaactacatggttctccatgaattaatacatattgtttagcaaattcaggaactataaaactactacaatgatctatcgacataccatctatcaaacaaaacttgggtttaatttctcccggagatgtttcataatagtacgtataactttcttctgcaaacttaacagctctattatattcaggataattaaaacctaattccatatatttgtctcgtatatctgctattcctggtgctattttgattctattaagagtaacagctgcccccattcttaataatcgtcagtatttaaactgttaaatgttggtatatcaacatctaccttatttcccgcagtataaggtttgttgcaggtatactgttcaggaatggttacatttatacttcttctatagtcctgtctttcgatgttcatcacatatgcaaagaacagaataaacaaaataatgtaagaaataatattaaatatctgtgaattcgtaaatacattgattgccataataattacagcagctacaatacacacaatagacattcccacagtgttgccattacctccacgatacatttgagttactaagcaataggtaataactaagctagtaagaggcaatagaaaagatgagataaatatcatcaatatagagattagaggagggctatatagagccaagacgaacaaaatcaaaccgagtaacgttctaacatcattatttttgaagattcccaaataatcattcattcctccataatcgttttgcatcatacctccatctttaggcataaacgattgctgctgttcctctgtaaataaatctttatcaagcactccagcacccgcagagaagtcgtcaagcatattgtaatatcttaaataactcatttatatattaaaaaatgtcactattaaagatggagtataatctttatgccgaactaaaaaaaatgacttgtggtcaacccctaagtctttttaacgaagacggggatttcgtagaagttgaaccgggatcatcctttaagtttctgatacctaagggattttacgcctctccttccgtaaagacgagtctagtattcgagacattaacaacgaccgataataaaatcactagtatcaatccaacaaatgcgccaaagttatatcctcttcaacgcaaagtcgtatctgaagtagtttctaatatgaggaaaatgatcgaatcaaaacgtcctctatacatcactcttcacttggcgtgtggatttggtaagactattaccacgtgttatcttatggctacacacggtagaaaaaccgtcatttgcgtacccaataaaatgttaatacatcaatggaagacacaggtagaggcagtcggattggaacataagatatccatagatggagtaagtagtctattaaaggaactaaagactcaaagtccggatgtattaatagtagtcagtagacatctgacaaacgatgccttttgtaaatatatcaataagcattatgatttgttcatcttggatgaatcacatacgtataatctgatgaacaatacagcagttacaagatttttagcgtattatcctccgatgatgtgttattttttaactgctacacctagaccatctaaccgaatttattgtaacagtattattaatattgccaagttatccaatctaaaaaaaactatctatgcagtagatagtttttttgagccatattccacagataatattagacatatggtaaaacgactagatggaccatctaataaatatcatatatataccgagaagttattatctgtagacgagcctagaaatcaacttattcttgataccctggtagaagaattcaagtcaggaactattaatcgcattttagttattactaaactacgtgaacatatggtattattctacaaacgattattagattttttcggaccagaggttgtatttataggagacgcccaaaatagacgtactccagatatggtcaaatcaatcaaggaactaaatagatttatattcgtatccaccttattttattccggtactggtttagatattcctagtttggattcgttgttcatttgctcggcagtaatcaacaatatgcaaatagagcaattactagggagggtatgtcgagaaacagaactattagataggacggtatatgtatttcctaacacatccatcaaagaaataaagtacatgataggaaatttcatgcaacgaattattagtctgtctgtagataaactaggatttaaacaaaaaagttatcggaaacatcaagaatccgatcccacttctgcatgtacaacatcatccagagaagaacgtgtattaaatagaatatttaactcgcaaaatcgttaagaagtttaagcgacgatccgcatgctgcgcaggccagtgtattacccctcatagtattaatataatccaatgatacttttgtgatgtcggaaatcttaaccaatttagactgacaggcagaacacgtcatgcaatcatcatcgtcatcgataactgtagtcttgggcttctttttgcgactcttcattccggaacgcacattggtgctatccatttaggtagtaaaaaataagtcagaatatgccctataacacgatcgtgcaaaacctggtatatcgtctctatctttatcacaatatagtgtatcgacatttttattattattgacctcgtttatcttggaacatggaatgggaacatttttgttatcaacggccatctttgccttaattccagatgttgtaaaattataactaaacagtctatcatcgacacaaatgaaattcttgtttagacgtttgtagtttacgtatgcggctcgttcgcgtctcattttttcagatattgcaggtactataatattaaaaataagaatgaaataacataggattaaaaataaagttatcatgacttctagcgctgatttaactaacttaaaagaattacttagtctgtacaaaagtttgagattttcagattctgcggctatagaaaagtataattctttggtagaatggggaacatctacttactggaaaataggcgtgcaaaaggtagctaatgtcgagacgtcaatatctgattattatgatgaggtaaaaaataaaccgtttaatattgatccgggctattacattttcttaccggtatattttgggagcgtctttatttattcgaagggtaaaaatatggtagaacttggatctggaaactcttttcaaataccagatgatatgcgaagtgcgtgtaacaaagtattagacagcgataacggaatagactttctgagatttgttttgttaaacaatagatggataatggaagatgctatatcaaaatatcagtctccagttaatatatttaaactagctagtgagtacggattaaacatacccaaatatttagaaattgaaatagaggaagacacattatttgacgacgagttatactctattatagaacgctctttcgatgataaatttccaaaaatatccatatcgtatattaagttgggagaacttagacggcaagttgtagactttttcaaattctcattcatgtatattgagtccatcaaggtagatcgtataggagataatatttttattcctagcgttataacaaaatcaggaaaaaagatattagtaaaagatgtagaccatttaatacgatccaaggttagagaacatacatttgtaaaagtaaaaaagaaaaacacattttccattttatacgactatgatggaaacggaacagaaactagaggagaagtaataaaacgaattatagacactataggacgagactattatgttaacggaaagtatttctctaaggttggtagtgcaggcttaaagcaattgactaataaattagatattaatgagtgcgcaactgtcgatgagttagttgatgagattaataaatccggaactgtaaaacgaaaaataaaaaaccaatcagcatttgatttaagcagagaatgtttgggatatccagaagcggattttataacgttagttaataacatgcggttcaaaatagaaaattgtaaggttgtaaatttcaatattgaaaatactaattgtttaaataacccgagtattgaaactatatatggaaactttaaccagttcgtctcaatctttaatgtcgtcaccgatgtcaaaaaaagattattcgagtgaaataatatgcgcctttgatataggtgcaaaaaatcctgccagaactgttttagaagtcaaggataactccgttagggtattggatatatcaaaattagactggagttctgattgggaaaggcgcatagctaaagatttgtcacaatatgaatacactacagttcttctagaacgtcagcctagaaggtcgccgtatgttaaatttatctattttattaaaggctttttatatcatacatcggctgccaaagttatttgcgtctcgcctgtcatgtctggtaattcatatagagatcgaaaaaagagatcggtcgaagcatttcttgattggatggacacattcggattgcgagactccgttccggatagacgcaaattagacgatgtagcggatagtttcaatttggctatgagatacgtattagataaatggaatactaattatacaccttataataggtgtaaatctagaaattacataaaaaaaatgtaataacgttagtaacgccattatggataatctatttacctttctacatgaaatagaagatagatatgccagaactatttttaactttcatctaataagttgcgatgaaataggagatatatatggtcttatgaaagaacgcatttcctcagaggatatgtttgataatatagtgtataataaagatatacatcctgccattaagaaactagtgtattgcgacatccaacttactaaacacattattaatcagaatacgtatccggtatttaacgattcttcacaagtgaaatgttgtcattatttcgacataaactcagataatagcaatattagctctcgtacagtagagatatttgagagggaaaagtcatctcttgtatcatatattaaaactaccaataagaagagaaaggtcaattacggcgaaataaagaaaactgttcatggaggcactaatgcaaattacttttccggtaaaaagtctgacgagtatctgagtactacagttagatccaacattaatcaaccttggatcaaaaccatctctaagaggatgagagttgatatcattaatcactctatagtaacgcgtggaaaaagctctatattacaaactatagaaattatttttactaatagaacatgtgtgaaaatattcaaggattctactatgcacattattctatccaaggacaaggatgaaaaggggtgtatacacatgattgacaaattattctatgtctattataatttatttctgttgttcgaagatatcatccaaaacgagtactttaaagaagtagctaatgttgtaaaccacgtactcacggctacggcattagatgagaaattattcctaattaagaaaatggctgaacacgatgtttatggagttagcaatttcaaaatagggatgtttaacctgacatttattaagtcgttggatcataccgttttcccctctctgttagatgaggatagcaaaataaagttttttaaggggaaaaagctcaatattgtagcattacgatctctggaggattgtataaattacgtgactaaatccgagaatatgatagaaatgatgaaggaaagatcgactattttaaatagcatagatatagaaacggaatcggtagatcgtctaaaagaattgcttctaaaatgaaaaaaaacactaattcagaaatggatcaacgactagggtataagtttttggtgcctgatcctaaagccggagttttttatagaccgttacatttccaatatgtatcgtattctaattttatattgcatcgattgcatgaaatcttgaccgtcaagcggccactcttatcgtttaagaataatacagaacgaattatgatagaaattagcaatgttaaagtgactcctccagattactcacctataatcgcgagtattaaaggtaagagttatgacgcattagccacgttcactgtaaatatctttaaagaggtaatgaccaaagagggtatatccatcactaaaataagtagttatgagggaaaagattctcatttgataaaaattccgctactaataggatacgggaataaaaatccacttgatacagccaagtatcttgttcctaatgtcataggtggagtctttatcaataaacaatctgtcgaaaaagtaggaattaatctagtagaaaagattacaacatggccaaaatttagggttgttaagccaaactcattcactttctcgttttcctccgtatcccctcctaatgtattaccgacaagatatcgccattacaagatatctctggatatatcacaattggaagcgttgaatatatcatcgacaaagacatttataacggtcaatattgttttgctgtctcaatatttatctagagtgagtctagaattcattagacgtagtttatcatacgatatgcctccagaagttgtctatctagtaaacgcgataatagatagtgctaaacgaattactgaatctattactgactttaatattgatacatacattaatgacctggtggaagctgaacacattaaacaaaaatctcagttaacgatcaacgagttcaaatatgaaatgctgcataactttttacctcatatgaactatacacccgatcaactaaagggattttatatgatatctttactaagaaagtttctctactgtatcttccacacttctagatatccagatagagattcgatggtttgtcatcgcatcctaacgtacggcaaatattttgagacgttggcacatgatgaattagagaattacataggcaacatccgaaacgatatcatgaacaatcacaagaacagaggcacttacgcggtaaacattcatgtactaacaactcccggacttaatcacgcgttttctagcttattgagtggaaagttcaaaaagtcagacggtagttatcgaacacatcctcactattcatggatgcagaatatttctattcctaggagtgttggattttatccggatcaagtaaagatttcaaagatgttttctgtcagaaaataccatccaagtcaatatctttacttttgttcatcagacgttccggaaagaggtcctcaggtaggtttagtatctcaattgtctgtcttgagttccattacaaatatactaacgtctgagtatttggatttggaaaagaaaatttgtgagtatatcagatcatattataaagatgatataagttactttgaaacaggatttccaatcactatagaaaatgctctagtcgcatctcttaatccaaatatgatatgtgattttgtaactgactttagacgtagaaaacggatgggattcttcggtaacttggaggtaggtattactttagttagggatcacatgaatgaaattcgcattaatattggagcgggaagattagtcagaccattcttggttgtggataacggagagctcatgatggatgtgtgtccggagttagaaagcagattagacgacatgacattctctgacattcagaaagagtttccgcatgtcatcgaaatggtagatatagaacaatttacttttagtaacgtatgtgaatcggttcaaaaatttagaatgatgtcaaaggatgaaagaaagcaatacgatttatgtgactttcctgccgaatttagagatggatatgtagcatcttcattagtgggaatcaatcacaattctggacccagagctattcttggatgtgctcaagctaaacaagctatctcttgtctgagctcggatatacgaaataaaatagacaatggaattcatttgatgtatccagagaggccaatcgtgattagtaaggctttagaaacttcaaagattgcggctaattgcttcggccaacatgttactatagcattaatgtcgtacaaaggtatcaatcaagaggatggaattatcatcaaaaaacaatttattcagagaggcggtctcgatattgttacagccaagaaacatcaagtagaaattccattggaaaactttaataacaaagaaagagataggtctaacgcctattcaaaattagaaagtaatggattagttagactgaatgctttcttggaatccggagacgctatggcacgaaatatctcatcaagaactcttgaagatgattttgctagagataatcagattagcttcgatgtttccgagaaatataccgatatgtacaaatctcgcgttgaacgagtacaagtagaacttactgacaaagttaaggtacgagtattaaccatgaaagaaagaagacccattctaggagacaaatttaccactagaacgagtcaaaagggaacagtcgcgtatgtcgcggatgaaacggaacttccatacgacgaaaatggtatcacaccagatgtcattattaattctacatccatcttctctagaaaaactatatctatgttgatagaagttattttaacagccgcatattctgctaagccgtacaacaataagggagaaaaccgacctgtctgttttcctagtagtaacgaaacatccatcgatacatatatgcaattcgctaaacaatgttatgagcattcaaatccgaaattgtccgatgaagaattatcggataaaatcttttgtgaaaagattctctatgatcctgaaacggataagccttatgcatccaaagtattttttggaccaatttattacttgcgtctgaggcatttaactcaggacaaggcaaccgttagatgtagaggtaaaaagacgaagctcattagacaggcgaatgagggacgaaaacgtggaggaggtatcaagttcggagaaatggagagagactgtttaatagcgcatggtgcagccaatactattacagaagttttgaaagattcggaagaagattatcaagatgtgtatgtttgtgaaaattgtggagacatagcagcacaaatcaagggtattaatacatgtcttagatgttcaaaacttaatctctctcctctcttaacaaaaattgataccacgcacgtatctaaagtatttcttactcaaatgaacgccagaggcgtaaaagtcaaattagatttcgaacgaaggcctccttcgttttataaaccattagataaagttgatctcaagccgtcttttctggtgtaatattctagtttggtagtagatacatatcaatatcatcaaattcgagatccgaattataaaatgggcgtggattgttaactatagaatcggacgtctgatattcgaaaatctgtggagtttcaggttttggtggaggtgtaactgctacttgggatactgaagtctgatattcagaaagctgtggatgttctggttcggcatccaccgatggtgtcacatcactaatcggttcggtaacgtctgtggatggaggtgctacttctacagaacctgtagcctcagttgtcaacggagatacatttttaatgcgagaaaatgtataatttggtaatggtttcttatgtggatctgaagaagaggtaagatatctactagaaagataccgatcacgttctagttctcttttgtagaacttaactttttctttctccgcatctagttgatattccaacctcttcacgttactacgttcagattccaattcacgttcgcatgggttacctccgcagtttttacgagcgatttcacgttcagccttcatgcgtctctccctctctctatcgagtttatcagagcagtctttctgaaggcgatcgaactccataaatttctccaacgctttgattgtttccatagatttccgaagttcagcttttaggactgtgattctttttctttcgaattcacagctggatgtacaaccgtttccattaccgccatctctaagtttcttttctagatcggcaacatttcatccccatgccttttacattcctcgagtctactgtcgtcgaaatatcgttccagctccttttcgacatcaataactttagcacgttgtctctcaagctctcttttgtagttatctgattccctggcacgtttaagatcttcatgcaattgagtcagctcttaacttcctctcttgcttcttcgtcatagtacgcgcaatcactgtgagatccattgttaccacgtctacactcggcgagctcgcgtttaagagattcaatttcccgtttgtattggtccatgtttccattgctaccaccattagatttacaggctgctagttgtcgttcgagatcagaaatacgggttttcttggaattgatttcgtcgatgtacttggcatcgaaacacttattaagttctttttccaattctacgattttatttctttcgcgagtcaattccctcctgtagtaactatctgttttgtcagattcacgctctctacgtagactttcttgcaagttactaatttgttccctagcacgtccgagtttagttttatatgctgaatagagttctgattcatcctttgagcagatctctagcgatcgtttaagattcctaattctagtctttagcctatttacctcctcagaagatgttccgttaccgttgcgtttacactcgttaagctgtctatcaagatccatgattctatctctaagacgttgcatctctctttccatatcagcattgctttcattattacgtctgcagtcactcaactgtctttcaatatctgagattctatctctaagacgtcgcatctctctctgtttcggcattggtttcattattacgtttacagtcgttcaactgtctttcaagatctgatattctagattggagtctgctaatctctgtagcattttcacggcattcactcagttgtctttcaagatctgaaattttagattggagtctgctaatctctgtaagatttcctcctccgctctcgatgcagtcggtcaacttattctctagttctctaatacgcgaacgcagtgcatcaacttcttgcgtgtcttcctggttgcgtgtacattcatcgagatctctaacgcgtcgtcgttcttcctcaagttctctgcgtactacagaaagcgtgtccctatcttgttgatatttagcaatttctgattctagagtactgattttgcttacgtagttactaatagttgtcttggccttatcaagatcctccttgtatttgtcgcattccttgatatccctacgaagtctggacagttcccattcgacattacgacgtttatcgatttcagctcggagatcgtcatcgcgttgttttagccacatacgactgagttcaagttctcgttgacaagatccatctacttttccattcctaatagtatccagttccttttctagttctgaacgcatttctcgttccctatcaagcgattctctcaattctcggatagtcttcttatcaatttctaataaatctgaaccatcatctgtcccattttgaatatccctgtgttctttgatctcttttgtaagtcggtcgattctttcggttttataaacagaatccctttccaaagtcctaatcttactgagtttatcactaagttctgcattcaattcggtgagttttctcttggcttcttccaactctgttttaaactctccactatttccgcattcttcctcgcatttatctaaccattcaattagtttattaataactagttggtaatcagcgattcctatagccgttcttgtaattgtgggaacataattaggatcttctaatggattgtatggcttgatagcatcatctttatcattattagggggatggacaaccttaattggttggtcctcatctcctccagtagcgtgtggttcttcaataccagtgttagtaataggcttaggcaaatgcttgtcgtacgcgggcacttcctcatccatcaagtatttataatcgggttctacttcagaatattcttttctaagagacgcgacttcgggagttagtagaagaactctgtttctgtatctatcaacgctggaatcaatactcaagttaaggatagcgaatacctcatcgtcatcatccgtatcttctgaaacaccatcatatgacatttcatgaagtctaacgtattgataaatagaatcagatttagtattaaacagatccttaacctttttagtaaacgcatatgtatattttagatctccagatttcataatatgatcacatgccttaaatgtcagtgcttccatgatataatctggaacactaatgggtgacgaaaaagatacagcaccatatgctacgttgataaataaatctgaaccactaagtagataatgattaatgttaagaaagaggaaatattcagtgtataggtatgtcttggcgtcatatcttgtactaaacacgctaaacagtttgttaatgtgatcaatttccaatagattaattagagcagcgggaataccaacaaacatattaccacatccgtattttctatgaatatcacatatcatgttaaaaaatcttgatagaagagcgaatatctcgtctgacttaatgagtcgtagttcagcagcaacataagtcataactgtaaatagaacatactttcctgtagtgttgattctagactccacatcaacaccattattaaaaatagttttatatacatctttaatctgctctccgttaatcgtcgaacgttctagtatacggaaacactttgatttcttatctgtagttaatgacttagtgatatcacgaagaatattacgaattacatttcttgtttttcttgagagacctgattcagaactcaactcatcgttccatagtttttctacctcagtggcgaaatctttggagtgcttggtacatttttcaataaggttcgtgacctccatttattataaaaaatttattcaaaacttaactacaatcgggtaattataagatcgtagatctcccatgtggcggaatactaccatctatcgcatgtggatggacagtaggtaatggccatgggaacagtaatgtttgcatatttatctttcttgctagtattactgcatattgtcccaatgtttcgatgtgatgttctaacctatcaactgccgctgtatcacaacaatagtgtccgatgaaattaagattatgatccaatgtgtttaatatatgattatcaagtcttatacgatccgcgtcttttttgacaggatcaggttcttctacaggaagaagtttcggcctcttatgatattcatgtctgggaaacggtggtctagggtgaggctccggtatcggagtgggttttggattataatcatcatcgtctatgacatcatcttcgacttcgatatttattttgctatcttgatgatgtcctgtatcagttgcattttcagcactcgactgaatattagcgcattcattgtctattattaccatatttctaaacccaaaatgtatgtgttgaacatcagtactatcgttgatgagtcttatagcatgaattcgcttatcgttatcgggtttatcttctgtcaccttagcaattccttttttattaaactctacataatcatatccatttctattgtttgttctaatataaacgagtatagcatcattgctaaatttttcaatagtatcaaaaacagaatatcctaaaccatataatatatattcaggaacactcaaactaaatgtccaggattctcctaaatacgtaaactttaatagtgcgaaatcattcaaaaatctaccacttatagatagatagtacataaatgcgtatagtagtctacctatctctttattatgaaaaccggcattacgatcatatatgtcgtgatatacctgtgatccgtttacgttaaaccataaatacatgggtgatcctataaacatgaatttatttctaattctcagagctatagttaattgaccgtgtaatatttgcttacatgcatacttgatacgcttattaataagatttttatcattgctcgttatttcagaatcgtatatataaggagtaccatcgtgattcttaccagatattatacaaaatactatatataaaatatattgacccacgttagtaatcatataaatgtttaacgttttaaattttgtattcaatgatccattatcatacgctatcatggtcttgtaatattcattctttaaaatataatattgtgttagccattgcattggagctcctaatggagattttctattctcatccattttaggataggctttcataaagtccctaataacttcgtgaataatgtttctatgttttctactgatgcatgtatttgcttcgatttttttatcccatgtttcatctatcatagatttaaacgcagtaatgctcgcaacattaacatcttgaaccgttggtacaattccgttccataaatttataatgttcgccatttatataactcattttttgaatatacttttaattaacaaaagagttaagttactcatatggacgccgtccagtctgaacatcaatctttttagccagagatatcatagccgctcttagagtttcagcgtgattttccaacctaaatagaacttcatcgttgcgtttacaacacttttctatttgttcaaactttgttgttacattagtaatctttttttccaaattagttagccgttgtttgagagtttcctcattgtcgtcttcatcggctttaacaattgcttcgcgtttagcctctggctttttagcagcctttgtagaaaaaaattcagttgctggaattgcaagatcgtcatctccggggaaaagagttccgtccatttaaagtacagattttagaaactgacactctgcgttatttatatttggtacaacacatggattataaatattgatgttaataacatcagaaaatgtaaagtctatacattgttgcatcgtgttaaattttctaatggatctagtattattgggtccaacttctgcctgaaatccaaatatggaagcggatacaaaaccgtttcctggataaaccacacatctccacttttgctttacatcagaaattgtgtcgttgacatcttgaactctcctatctaatgccggtgttccacctatagattttgaatattcgaatgctgcatgagtagcattaaattccttaatattgccataattttcatatattgagtaaccctggataaaaagtaaacacaccgcagccgtcgctaccacaataaaaaaaattgatagagagttcatttataatctattagaagctgacaaaatttttttacacgcatcagacaatgctttaataaatagttcaacatctacttttgtcatatcgaaccgatggtatgattctaacctagaattacatccgaaaaagttgactatgttcatagtcattaagtcattaacaaacaacattccagactctggattataagacgatactgtttcgtcacaattacctaccttaatcatgtgattatgaatattggctattagagcaccttctaagaaatctataatatctttgaaacacgatttaaaatcaaaccacgaatatacttctacgaagaaagttagtttacccataggagaaataactataaatggagatctaaatacaaaatccggatctatgatagttttaacattattatattctctattaaatacctccacatctaaaaatgttaattttgaaactatgtcttcgtttattaccgtacctgaactaaacgctataagctctattgtttgagaactctttaaacgatattcttgaaatacatgtaacaaagtttcctttaactcggtcggtttatctaccatagttacagaatttgtatccttatctataatataataatcaaaatcgtataaagttatataattatcgcgttcagattgtgatcttttcaaatagactaaaaaccccatttctctagtaagtatcttatgtatatgtttgtaaaatatcttcatggtgggaatatgctctaccgcagttagccattcctcattgacagcggtagatgtattagacaaaactattccaatgtttaacaagggccattttacgagattattaaatccttgtttgataaatgtagccaatgagggttcgagttcaacgacgattgaattctcttcccgcggatgctgcatgatgaacgacgggatgttgttcgattgatttggaattctttttcgactttttgtttatattaaatattttaaaatttatagcggatagcaattcatgtaccacggataatgtagacgcgtattgcgcatcgatatctttattattagataaatttatcaataaatgtgagaagtttgcctcgttaaggtcttccatttaaatattatataaacatttgtgtttgtatcttattcgtcttttatggaatagttttttactagtaaagctgcaattacacactttgtccgtaaaacataaatataaacaccagcttttatcaatcgttccaaaaagtcgacggcggacatttttaacatggcatctattttaaatacacttaggtttttggaaaaaacatcattttataattgtaacgattcaataactaaagaaaagattaagattaaacataagggaatgtcatttgtattttataagccaaagcattctaccgttgttaaatacttgtctggaggaggtatatatcatgatgatttggttgtattggggaaggtaacaattaataatctaaagatgatgctattttacatggatttatcatatcatggagtgacaagtagtggagcaatttacaaattgggatcgtctatcgatagactttctctaaataggactattgttacaaaagttaataattatgatgatacattttttgacgacgatgattgatcgctattgcacaattttgtttttgtactttctaatatagtgtttaggttctttttcatatgagaatattgatttactaaaatatctatgtttaacttttgttctatgacgtccttatcggcggtatcggtacatatacgtaattcaccttcacaaaatacggagtcttcgataataatagccaatcgattattggatctagctgtctgtatcatattcaacatgtttaatatatcctttcgtttcccctttacaggcatcgatcgtagcatattttccgcgtctgatatggaaatgttaaaactacaaaaatgcgtaatgttagcccgtcctaatattggtacgtgtctataagtttggcatagtagaataatagacgtgtttaaatgccttccaaagtttaagaattctattagagtattgcattttgatagtttatcgcctacatcatcaaaaataagtaaaaagtgtgctgattttttatgattttgtgcgacagcaatacatttttctatgttacttttagttcgtatcagattatattctagagattcctgactactaacgaaattaatatgatttggccaaatgtatccatcataatctgggttataaacgggtgtaaacaagaatatatgtttatattttttaactagtgtagaaaacagagatagtaaatagatagtttttccagatccagatcctcctgttaaaaccattctaaacggcatttttaataaattttctcttgaaaattgtttttcttggaaacaattcataattatatttacagttactaaattaatttgataataaatcaaaatatggaaaactaaggttgttagtagggaggagaacaaagaaggcacatcgtgatataaataacatttattatcatgatgacaccagaaaacgacgaagagcagacatctgtgttctccgctactgtttacggagacaaaattcagggaaagaataaacgcaaacgcgtgattggtctatgtattagaatatctatggttatttcactactatctatgattaccatgtccgcgtttctcatagtgcgcctaaatcaatgcatgtctgctaacgaggctgctattactgacgccgctgttgccgttgctgctgcatcatctactcatagaaaggttgcgtctagcactacacaatatgatcacaaagaaagctgtaatggtttatattaccagggttcttgttatatattacattcagactaccagttattctcggatgctaaagcaaattgcactgcggaatcatcaacactacccaataaatccgatgtcttgactacctggctcattgattatgttgaggatacatggggatctgatggtaatccaattacaaaaactacatccgattatcaagattctgatgtatcacaagaagttagaaagtatttttgtgttaaaacaatgaactaatatttatttttgtacattaataaatgaaatcgcttaatagacaaactgtaagtaggtttaagaagttgtcggtgccggccgctataatgatgatactctcaaccattattagtggcataggaacatttctgcattacaaagaagaactgatgcctagtgcttgcgccaatggatggatacaatacgataaacattgttatttagatactaacattaaaatgtctacagataatgcggtttatcagtgtcgtaaattacgagctagattgcctagacctgatactagacatctgagagtattgtttagtattttttataaagattattgggtaagtttaaaaaagaccaatgataaatggttagatattaataatgataaagatatagatattagtaaattaacaaattttaaacaactaaacagtacgacggatgctgaagcgtgttatatatacaagtctggaaaactggttaaaacagtatgtaaaagtactcaatctgtactatgtgttaaaaaattctacaagtgacaacaaaaaatgaattaataataagtcgttaacgtacgccgccatggacgccgcgtttgttattactccaatgggtgtgttgactataacagatacattgtatgatgatctcgatatctcaatcatggactttataggaccatacattataggtaacataaaaactgtccaaatagatgtacgggatataaaatattccgacatgcaaaaatgctactttagctataagggtaaaatagttcctcaggattctaatgatttggctagattcaacatttatagcatttgtgccgcatacagatcaaaaaataccatcatcatagcatgcgactatgatatcatgttagatatagaagataaacatcagccattttatctattcccatctattgatgtttttaacgctacaatcatagaagcgtataacctgtatacagctggagattatcatctaatcatcaatccttcagataatctgaaaatgaaattgtcgtttaattcttcattctgcatatcagacggcaatggatggatcataattgatgggaaatgcaatagtaattttttatcataaaagttgtaaagtaaataataaaacaataaatattgaactagtagtacgtatattgagcaatcagaaatgatgctggtacctcttatcacggtgaccgtagttgcgggaacaatattagtatgttatatattatatatttgtaggaaaaagatacgtactgtctataatgacaataaaattatcatgacaaaattaaaaaagataaagagttctaattccagcaaatctagtaaatcaactgatagcgaatcagactgggaggatcactgtagtgctatggaacaaaacaatgacgtagataatatttctaggaatgagatattggacgatgatagcttcgctggtagtttaatatgggataacgaatccaatgttatggcgcctagcacagaacacatttacgatagtgttgctggaagcacgctgctaataaataatgatcgtaatgaacagactatttatcagaacactacagtagtaattaatgaaacggagactgttgaagtacttaatgaagataccaaacagaatcctaactattcatccaatcctttcgtaaattataataaaaccagtatttgtagcaagtcaaatccgtttattacagaacttaacaataaatttagtgagaataatccgtttagacgagcacatagcgatgattatcttaataagcaagaacaagatcatgaacacgatgatatagaatcatcggtcgtatcattggtgtgattagtttcctttttataaaattgaagtaatatttagtattattgctgccgtcacgttgtacaaatggagatattccctgtattcggcatttctaaaattagcaattttattgctaataatgactgtagatattatatagatacagaacatcaaaaaattatatctgatgagatcaatagacagatggatgaaacggtacttcttaccaacatcttaagcgtagaagttgtaaatgacaatgagatgtaccatcttattcctcatagattatcgacgattatactctgtattagttctgtcggaggatgtgttatctctatagataatgacatcaatggcaaaaatattctaacctttcccattgatcatgctgtaatcatatccccactgagtaaatgtgtcgtagttagcaagggtcctacaaccatattggttgttaaagcggatatacctagcaaacgattggtaacatcgtttacaaacgacatactatatgtaaacaatctgtcactgattaattatttgccgttgtctgtattcattattagacgagtcaccgactatttggatagacacatatgcgatcagatatttgctaataataagtggtattcccttataaccatcgacgataagcaatatcctattccatcaaactgtataggtatgtcctctgccaagtacataaattctagcatcgagcaagatactttaatccatgtttgtaacctcgagcatccgttcgactcagtatacaaaaaaatgcagtcgtacaattctctacctatcaaggaacaaatattgtacggtagaattgataatataaatatgagcattagtatttctgtggattaatagatttctagtatggggatcattaatcatctctaatctctaaatacctcataaaacgaaaaaaaagctattatcaaatactgtacggaatggattcattctcttctctttttatgaaactctgttgtatatctactgataaaactggaagcaaaaaatctgatagaaagaataagaataagatcaaggattatatggaacacgattattataaaataacaatagttcctggttcctcttccacgtctactagctcgtggtattatacacatgcctagtaatagtctctttgcgttgacggaaagcagactagaaataacaggctaaaatgttcagacaccataatagttcccaacccagataataacagagttccatcaacacattcctttaaactcaatcccaaacccaaaaccgttaaaatgtatccggccaattgatagtagataatgaggtgtacagcgcatgataatttacacagtaaccaaaatgaaaatactttagtaattataagaaatatagacggtaatgtcatcatcaacaatccgataatatgcctgagagtaaacattgacggataaaacaaaaatgctccgcataactctatcatggcaataacacaaccaaatacttgtaagattcctaaattagtagaaaatacaacgaatatcgatgtataagtgatctcgagaaataataagaataaagtaatgcccgtaaagataaacatcaacattgtttggtaatcattaaaccaattagtatgaagttgaactaatttcacagtagattttattccagtgttatcctcgcatgtataagtacctggtaagatatctttatattccataatcaatgagacatcactatctgataacgaatgaagtctagcactagtatgccatttacttaatattgtcgtcttggaagttttattataagttaaaatatcatggttatccaatttccatctaatatactttgtcggattatctatagtacacggaataatgatggtatcattacatgctgtatactctatggtctttgtagttgttataacaaccaacgtatagaggtatatcaacgatattctaactcttgacattttttatttatttaaaatgatacctttgttatttattttattctattttgctaacggtattgaatggcataagtttgaaacgagtgaagaaataatttctacttacttattagacgacgtattatacacgggtgttaatggggcggtatacacattttcaaataataaactaaacaaaactggtttaactaataataattatataacaacatctataaaagtagaggatgcggataaggatacattagtatgcggaaccaataacggaaatcccaaatgttggaaaatagacggttcagacgacccaaaacatagaggtagaggatacgctccttatcaaaatagcaaagtaacgataatcagtcacaacggatgtgtactatctgacataaacatatcaaaagaaggaattaaacgatggagaagatttgacggaccatgtggttatgatttattcacggcggataacgtaattccaaaagatggtttacgaggagcattcgtcgataaagacggtacttatgacaaagtttacattcttttcactgatactatcggctcaaagagaattgtcaaaattccgtatatagcacaaatgtgcctaaacgacgaaggtggtccatcatcattgtctagtcatagatggtcgacgtttctcaaagtcgaattagaatgtgatatcgacggaagaagttatagacaaattattcattctagaactataaaaacagataatgatacgatactatatgtattcttcgatagtccttattccaagtccgcattatgtacctattctatgaataccattaaacaatctttttctacgtcaaaattggaaggatatacaaagcaattgccgtctccagctcctggtatatgtttaccagctggaaaagttgttccacataccacgtttgaagtcatagaacaatataatgtactagatgatattataaagcctttatctaaccaacctatcttcgaaggaccgtctggtgttaaatggttcgatataaaggagaaggaaaatgaacatcgggaatatagaatatacttcataaaagaaaattctatatattcgttcgatacaaaatctaaacaaactcgtagctcgcaagtcgatgcgcgactattttcagtaatggtaactgcgaaaccgttatttatagcagatatagggataggagtaggaatgccacaaatgaaaaaaatacttaaaatgtaatcttaatcgagtacaccacacgacaatgaacaaacataagacagattatgctggttatgcttgctgcgtaatatgcggtctaattgtcggaattatttttacagcgacactattaaaagttgtagaacgtaaattagttcatacaccattaatagataaaacgataaaagatgcatatattagagaagattgtcctactgactggataagctataataataaatgtatccatttatctactgatcgaaaaacctgggaggaaggacgtaatgcatgcaaagctctaaattcaaattcggatctaattaagatagagactccaaacgagttaagttttttaagaagccttagacgaggctattgggtaggagaatccgaaatattaaaccagacaaccccatataattttatagctaagaatgccacgaagaatggaactaaaaaacggaaatatatttgtagcacaacgaatactcccaaactgcattcgtgttacactatataacaattacactacatttttatcataccactacttcggttagatgttttagaaaaaaataaatatcgccgtaccgttcttgtttttataaaaataacaattaacaattatcaaattttttctttaatattttacgtggttgaccattcttggtggtaaaataatctcttagtgttggaatggaatgctgtttaatgtttccacactcatcgtatattttgacgtatgtagtcacatcgtttacgcaatagtcagactgtagttctatcatgcttcctacatcagaaggaggaacagttttaaagtctcttggttttaatctattaccgttagttttcatgaaatcctttgttttatccacttcacattttaaataaatgtccactatacattcttttgttaattttactagatcgtcatgggtcatagaatttataggttccgtagtccatggatccaaactagcaaacttcgcgtatacggtatcgcgattagtgtatacaccaactgtatgaaaattaagaaaacagtttaataaatcaacagaaatatttaatcctccgtttgatacagatgcgccatatttatggatttcggattcacacgttgtttgtctgaggtgttcgtctagtgttgcttctacgtaaacttcgattcccatatattctttattgtcagaatcgcataccgatttatcatcatacactgtttgaaaactaaatggtatacacatcaaaataataaataataacgagtacattctgcaatattgttatcgtaattggaaaaatagtgttcgagtgagttggattatgtgagtattggattgtatattttattttatattttgtaataagaataaaatgctaatgtcaagtttattccaatagatgtcttattaaaaacatatataataaataacaatggctgaatggcataaaattatcgaggatatctcaaaaaataataagttcgaggatgccgccatcgttgattacaagactacaaagaatgttctagctgctattcctaacagaacatttgccaagattaatccgggtgaaattattcctctcatcactaatcgtaatattctaaaacctcttattggtcagaaatattgtattgtatatactaactctctaatggatgagaacacgtatgctatggagttgcttactgggtacgcccctgtatctccgatcgttatagcgagaactcataccgcacttatatttttgatgggtaagccaacaacatccagacgtgacgtgtatagaacgtgtagagatcacgctacccgtgtacgtgcaactggtaattaaaataaaaagtaatattcatatgtagtgtcaattttaaatgatgatgatgaaatggataatatccatattgacgatgtcaataatgccggtattggcatacagttcatcgatttttagatttcattcagaggatgtggaattatgttatgggcatttgtattttgataggatctataatgtagtaaatataaaatataatccgcatattccatatagatataattttattaatcgcacgttaaccgtagatgaactagacgataatgtcttttttacacatggttattttttaaaacacaaatatggttcacttaatcctagtttgattgtctcattatcaggaaacttaaaatataatgatatacaatgctcagtaaatgtatcgtgtctcattaaaaatttggcaacgagtacatctactatattaacatctaaacataagacttattctctacatcggtccacgtgtattactataataggatacgattctattatatggtataaagatataaatgacaagtataatgacatctatgattttactgcaatatgtatgctaatagcgtctacattgatagtgaccatatacgtgtttaaaaaaataaaaatgaactcttaattatgctatgctattagaaatggataaaatcaaaattacggttgattcaaaaattggtaatgttgttaccatatcgtataacttggaaaagataactattgatgtcacacctaaaaagaaaaaagaaaaggatgtattattagcgcaatcagttgctgtcgaagaggcaaaagatgtcaaggtagaagaaaaaaatattatcgatattgaagatgacgatgatatggatgtagaaagcgcgtaatacgatctataaaaataagtatataaatactttttatttactgtactcttactgtgtagtggtgataccctactcgattatttttttaaaaaaaaaatacttattctgattcttctagccatttccgtgttcgtttgaatgccacatcgacgtcaaagataggggagtagttgaaatctagttctgcattgttggtacgcacctcaaatgtagtgttggatatcttcaacgtatagttgttgagtagtgatggttttctaaatagaattctcttcatatcattcttgcacgcgtacatttttagcatccatcttggaatcctagatccttgttctattcccaatggtttcatcaatagaagattaaacatatcgtacgaacacgatggagagtaatcgtagcaaaagtaagcatttcctttaatcttagatcccggatactggatatattttgcagccaacacgtgcatccatgcagcatttcctacatatacccggctatgcaccgcgtcatcatcgactgtacgatacataatgttaccgtgttgcttacattgctcgtaaaagactttcatcaatttgtctccttctccgtaaattccagtgggtcttaggcaacaagtatacaattttgctccattcatgattacggaattattggctttcataaccagttgctcggccatacgtttactttttgcgtatacatgtcctggtgatatatcataaagggtatgctcatggccgatgaatggatcaccgtgtttattgggtcctattgcttccatgctactagtatagatcaaatacttgattcctaggtccacacaagctgccaaaatagtctgtgttccataatagtttactttcatgatttcattatcggtgtattttccaaatacatccactagagcagccgtatgaataatcagatttaccccatctagcgcttctctcaccttatcaaagtcgtttatatcacattgtatatagtttataaccttaactttcgaggttattggttgtggatcttctacaatatctatgactctgatttcttgaacatcatctgcactaattaacagttttactatatacctgcctagaaatccggcaccaccagtaaccgcgtacacggccattgctgccactcataatatcagactacttattctattttactaaataatggctgtttgtataatagaccacgataatatcagaggagttatttactttgaaccagtccatggaaaagataaagttttaggatcagttattggattaaaatccggaacgtatagtttgataattcatcgttacggagatattagtcaaggatgtgattccataggcagtccagaaatatttatcggtaacatctttgtaaacagatatggtgtagcatatgtttatttagatacagatgtaaatatatttacaattattggaaaggcgttatctatttcaaaaaatgatcagagattagcgtgtggagttattggtatttcttacataaatgaaaagataatacattttcttacaattaacgagaatggcgtttgatatatcagttaatgcgtctaaaacaataaatgcattagtttacttttctactcagcaaaataaattagtcatacgtaatgaagttaatgatacacactacactgtcgaatttgatagggacaaagtagttgacacgtttatttcatataatagacataatgacaccatagagataagaggggtgcttccagaggaaactaatattggttgcgcggttagtatgacttacttgtataataagtatagttttaaactgattttagcagaatatataagacacagaaatactatatccggcaatatttattcggcattgatgacactagatgatttggctattaaacagtatggagacattgatctattatttaatgagaaacttaaagtagactccgattcgggactatttgactttgtcaactttgtaaaggatatgatatgttgtgattctagaatagtagtagctctatctagtctagtatctaaacattgggaattgacaaataaaaaatataggtgtatggcattagccgaacatatatctgatagtattccaatatctgagctatctagactacgatacaatctatgtaagtatctacgcggacacactgagagcatagaggataaatttgattattttgaagacgatgattcgtctacatgttctgccgtaaccgacagggaaacggatgtataattttttttatagcgtgaaggatatgataaaaaatataattgttgtatttatcccattccaatcaccttatatgattctgtaacacaataaaggagtcttatagatgtatagaggtcagatactggtttgataaactgtttattccacataagtatgtttgactttatggttagacccgcatactttaacaaatcactgaaaattggagttaggtattgacctctcagaatcagttgccgttctggaacattaaatgtattttttatgatatactccaacgcatttatgtgggcatacaacaagtcattactaatggaatattccaagagttttagttgtctagtatttaacaagagaagagatttcaacagactgtttatgaactcgaatgccgcctcattgtcgcttatattgatgatgtcgaattctcccaatatcatcaccgatgagtagctcatcttgttatcgggatccaagttttctaaagatgtcattaaaccctcgatcatgaatggatttatcatcatcgtttttatgttggacatgagcttagtccgtttgtccacatctatagaagatgatttctgaattatttcatatatctctctctttaactccaggaacttgtcaggatggtctactttaatatgttctcgtctaagagatgaaaatctttggatggttgcacgcgacttttctctaaaggatgacgttgcccaagatcctctcttaaatgaatccatcttatccttggacaagatggacagtctattttccttagatggtttaatatttttgttacccatgatctataaaggtagacctaatcgtctcggatgaccatatatttattttcagttttattatacgcataaattgtaaaaaatatgttaggtttacgaaaatgtctcgtggggcattaatcgtttttgaaggattggacaaatctggaaaaacaacacaatgtatgaacatcatggaatcaataccttcaaacacaataaaataccttaactttcctcagagatccactgtcactggaaagatgatagatgactatctaactcgtaaaaaaacctataatgatcatatagttaatctattattttgtgcaaatagatgggagtttgcatcttttatacaagaacaactagaacagggaattactttaatagttgatagatacgcattttctggagtagcgtatgccgccgctaaaggcgcgtcaatgactctcagtaagagttatgaatctggattgcctaaacccgacttagttatattcttggaatctggtagcaaagaaattaatagaaacgtcggtgaggaaatttatgaagatgttacattccaacaaaaggtattacaagaatataaaaaaatgattgaagaaggagatattcattggcaaattatttcttctgaattcgaggaagatgtaaagaaggagttgattaagaatatagttatagaggctatacacacggttactggaccagtggggcaactgtggatgtaatagtgaaattacattttttataaatagatgttagtacagtgttataaatggatgaagcatattactctggcaacttggaatcagtactcggatacgtgtccgatatgcataccgaactcgcatcaatatctcaattagttattgccaagatagaaactatagataatgatatattaaacaaggacattgtaaattttatcatgtgtagatcaaacttggataatccatttatctctttcctagatactgtatatactattatagatcaagagaactatcagactgagttgattaattcattagacgacaatgaaattatcgattgtatagttaataagtttatgagcttttataaggataacctagaaaatatagtagatgctatcattactctaaaatatataatgaataatccagattttaaaactacgtatgccgaagtactcggttccagaatagccgatatagatattaaacaagtgatacgtaagaatatactacaattgtctaataatatccgcgaacgatatttgtgaaaatattaaaaaaaaatactttttttattaaatgacgtcttttcgtgaatttagaaaattatgctgtgctatatatcacgcatcaggatataaagaaaaatctaaattaattagagactttataacagatagggatgataaatatttgatcattaagctattgcttcccggattagacgatagaatttataacatgaacgataaacaaattataaaattatatagtataatatttaaacaatctcaggaagatatgctacaagatttaggatacggatatataggagacactattaggactttcttcaaagagaacacagaaatccgtccacgagataaaagcattttaactttagaagaagtggatagttttttaactacgttatcatccgtaactaaagaatcgcatcaaataaaattattgactgatgtagcatctgtttgtacatgtaatgatttaaaatgtgtagtcatgcttattgataaagatctaaaaattaaagcgggtcctcggtacgtacttaacgctattagtcctaatgcctatgatgtgtttagaaaatctaataacttgaaagagataatagaaaattcatctaaacaaaatctagactctatatctatttctgttatgactccaattaatcccatgttagcggaatcgtgtgattctgtcaataaggcgtttaaaaaatttccatcaggaatgtttgcggaagtcaaatacgatggtgaaagagtacaagttcataaaaataataacgagtttgccttctttagtagaaacatgaaaccagtactctctcataaagtggattatctcaaagaatacataccgaaagcatttaaaaaagctacgtctatcgtattggattctgaaattgttcttgtagacgaacataatgtaccgctcccgtttggaagtttaggtatacacaaaaagaaagaatataaaaactctaacatgtgtttgttcgtgtttgactgtttgtactttgatggattcgatatgacggacattccattgtacgaacgaagatcttttctcaaagatgttatggttgaaatacccaatagaatagtattctcagagttgacgaatattagtaacgagtctcagttaactgacgtattggatgatgcactaacgagaaaattagaaggattggtcttaaaagatattaatggagtatacgaaccgggaaagagaagatggttaaaaataaagcgagactatttgaacgagggttccatggcagattctgccgatttagtagtactaggtgcctactatggtaaaggagcaaagggtggtatcatggcagtctttctaatgggttgttacgacgatgaatccggtaaatggaagacggttaccaagtgttcaggacacgatgataatacgttaagggagttgcaagaccaattaaagatgattaaaattaacaaggatcccaaaaaaattccagagtggttagtagttaataaaatctatattcccgattttgtagtagaggatccgaaacaatctcagatatgggaaatttcaggagcagagtttacatcttccaagtcccataccgcaaatggaatatccattagatttcctagatttactaggataagagaggataaaacgtggaaagaatctactcatctaaacgatttagtaaacttgactaaatcttaatagttacatacaaactgaaaattaaaataacactatttagttggtggtcgccatggatggtgttattgtatactgtctaaacgcgctagtaaaacatggcgaggaaataaatcatataaaaaatgatttcatgattaaaccatgttgtgaaagagtttgtgaaaaagtcaagaacgttcacattggcggacaatctaaaaacaatacagtgattgcagatttgccatatatggataatgcggtatccgatgtatgcaattcactgtataaaaagaatgtatcaagaatatccagatttgctaatttgataaagatagatgacgatgacaagactcctactggtgtatataattattttaaacctaaagatgccattcctgttatcatatctataggaaaggataaagatgtctgtgaactattaatctcatcagacatatcgtgtgcatgcgtggagttaaattcatatcacgtagccattcttcccatggatgtttccttttttaccaaaggaaatgcatcattgattattctcctgtttgatttctctatcgatgcggcacctctcttaagaagtgtaaccgataataatgttattatatctagacaccagcgtctacatgacgagcttccgagttccaattggttcaagttttacataagtataaagtccgactattgttctatattatatatggttgttgatggatctgtgatgcatgcgatagctgataatagaactcacgcaattattagcaaaaatatattagacaatactacgattaacgatgagtgtagatgctgttattttgaaccacagattaggattcttgatagagatgagatgctcaatggatcatcgtgtgatatgaacagacattgtattatgatgaatttacctgatgtaggcgaatttggatctagtatgttggggaaatatgaacctgacatgattaagattgctctttcggtggctggtaatttaataagaaatcgagactacattcccgggagacgaggatatagctactacgtttacggtatagcctctagataatttttttaagcacgaaataaaaaacataattttaaaccaatctatttcatactattttgtgtgatcaccatggacataaagatagatattagtatttctggtgataaatttacggtgactactaggagggaaaatgaagaaagaaaaaaatatctacctctccaaaaagaaaaaactactgatgttatcaaacctgattatcttgagtacgatgacttgttagatagagatgagatgtttactattctagaggaatattttatgtacagaggtctattaggcctcagaataaaatatggacgactctttaacgaaattaaaaaattcgacaatgatgcggaagaacaattcggtactatagaagaactcaagcagaaacttagattaaattctgaagagggagcagataactttatagattatataaaggtacaaaaacaggatatcgtcaaacttactgtatacgattgcatatctatgataggattgtgtgcatgcgtggtagatgtttggagaaatgagaaactgttttctagatggaaatattgtttacgagcgattaaactgtttattgatgatcacatgcttgataagataaaatctatactgcagaatagactagtatatgtggaaatgtcatagaaagttaaaagttaatgagagcaaaaatatataaggttgtattccatatttgttatttttttctgtaatagttagaaaaatacattcgatggtctatctatcagattattatgtgttataaggtactttttctcataataaactagagtatgagtaagatagtgtttttcaaaacatataaatctaaaattgatggatgagatatacagctattaatttcgaaaatatattttaatctgataactttaaacatggatttttaatggtggtttaacgttttaaaaaaagattttgttattgtagtatatgataatattaaaagatggatataaagaatttgctgactgcatgtactattttttacattactacattggctacggcagatatacctacttcgtcactgccacacgctccggtaaacggggcatgtgacgagggagaatatcttgataagaggcataatcaatgttgtaatcagtgtccacctggagaatttgccaaggttagatgtaatggtaacgataacacaaaatgtgaacgctgcccacctcatacatataccgcaatccccaattactctaatggatgtcatcaatgtagaaaatgcccaacaggatcatttgataaggtaaagtgtaccggaacacagaacagtaaatgttcgtgtcttcctggttggtattgcgctactgattcttcacagactgaagattgtcgagattgtataccaaaaaggagatgtccatgcggatactttggtggaatagatgaacaaggaaatcctatttgtaaatcgtgttgtgttggtgaatattgcgactacctacgtaattatagacttgatccatttcctccatgcaaactatctaaatgtaattaattatgattttgatgataatgttaccatacattatatcgctacttggttagtgtattattcagtatgaagacctattaataattacttatcttttgacgatcttgttataattataatataaaaatacttatggcatagtaactcataattgctgacgcgataaattcgtaataatctgttttgttcaaatttttataaggaatctacaggcataaaaataaaaatataatttataatatactcttacagcgcgccatcatgaataacagcagtgaattgattgctgttattaatggatttagaaatagtggacgattttgtgatattaatatagttattaatgatgaaaggataaacgctcacagactcatcctatctggagcctccgaatatttttccattctgttttccaataattttatcgattctaatgaatacgaagttaatctaagtcatttagattatcaaagtgttaacgatttgatcgattacatttatgggatacctttgagcctaactaacgataacgtgaaatatattctttcaaccgctgattttttacaaattggatctgctattacggagtgtgaaaattacatacttaaaaatctttgttctagaaactgtatcgatttctacatatacgctgataaatataataacaagaaaatagaatcagcgtcgtttaacacaatattacaaaatattttgagactcatcaacgatgaaaactttaaatacttaacagaggaatcaatgataaaaattttaagcgatgatatgttaaatataaaaaatgaggatttcgccccactaattctcattaaatggttagagagtactcaacaaccatgcaccgtcgagttacttaaatgcctcagaatatcattgctttccccacaagttataaaatcactttatagtcatcgactggttagttcaatctacgaatgtataacattcttaaacaatatagcattcttggatgaatcatttcctagataccatagcatcgagttgatatctatcggtataagtaattcgcatgataagatttccataaactgctacaatcataaaaaaaatacatgggaaatgatatcttcacgtagatataggtgtagtttcgcagtggccgtcctggataatattatctatatgatgggtggatatgatcagtccccgtatagaagttcaaaggttatagcgtacaatacatgtacaaattcttggatatatgatataccagagctaaaatatcctcgttctaattgtgggggactggctgatgacgaatacatttattgtataggcggcatacgcgatcaggattcatcgttgacatctagtattgatagatggaagccatcaaaaccatattggcagaagtatgctaaaatgcgcgaaccaaaatgtgatatgggggttgcgatgttaaacggattaatatatgttataggtggaatcgttaaaggtgacacgtgtaccgacgcactagagagtttatcagaagatggatggatgaagcatcaacgtcttccaataaaaatgtccaatatgtcgacgattgttcatgatggcaagatttatatatctggaggttacaacaatagtagtgtagttaatgtaatatcgaatctagtccttagctataattcgatatatgatgaatggaccaaattatcatcattaaacattcctagaattaatcccgctctatggtcagcgcataataaattatatgtaggaggaggaatatctgatgatgttcgaactaatacatctgagacatacgacaaagaaaaagattgttggacattggataatggtcacgtgttaccacgcaattatataatgtataaatgcgaaccgattaaacataaatatccattggaaaaaacacagtacacgaatgattttctaaagtatttggaaagttttataggtagttgatagaacaaaatacataattttgtaaaaataaatcactttttatactaatatgacacgattaccaatacttttgttactaatatcattagtatacgctacaccttttcctcagacatctaaaaaaataggtgatgatgcaactctatcatgtaatcgaaataatacaaatgactacgttgttatgagtgcttggtataaggagcccaattccattattcttttagctgctaaaagcgacgtcttgtattttgataattataccaaggataaaatatcttacgactctccatacgatgatctagttacaactatcacaattaaatcattgactgctagagatgccggtacttatgtatgtgcattctttatgacatcaactacaaatgacactgataaagtagattatgaagaatactccacagagttgattgtaaatacagatagtgaatcgactatagacataatactatctggatctacacattcaccggaaactagttctgagaaacctgattatatagataattctaattgctcgtcggtattcgaaatctaagcttaaaaattgaaattttattttttttttttggaatataaataagctcgaagtcgaccaccatggtgggtgaggatagcgtgctgatcaccgagaacatgcacatgaaactgtacatggagggcaccgtgaacgaccaccacttcaagtgcacatccgagggcgaaggcaagccctacgagggcacccagaccatgaagatcaaggtggtcgagggcggccctctccccttcgccttcgacatcctggctaccagcttcatgtacggcagcaaaacctttatcaaccacacccagggcatccccgacttctttaagcagtccttccctgagggcttcacatgggagaggatcaccacatacgaagacgggggcgtgctgaccgctacccaggacaccagcctccagaacggctgcctcatctacaacgtcaagatcaacggggtgaacttcccatccaacggccctgtgatgcagaagaaaacactcggctgggaggccagcaccgagatgctgtaccccgctgacagcggcctgagaggccatagccagatggccctgaagctcgtgggcgggggctacctgcactgctccctcaagaccacatacagatccaagaaacccgctaagaacctcaagatgcccggcttctacttcgtggacaggagactggaaagaatcaaggaggccgacaaagagacctacgtcgagcagcacgagatggctgtggccaggtactgcgacctgcctagcaaactggggcacagctgattaattaatttttatcgatctaattcaacaatgtctggagagctcggtaccaagcttcgcaggatcccgactccggaaccaattactgataaagaagatcatacagttacagacactgtctcatacactacagtaagtacatcatctggaattgtcactactaaatcaaccaccgatgatgcggatctttatgatacgtacaatgataatgatacagtaccaccaactactgtaggcggtagtacaacctctattagcaattataaaaccaaggactttgtagaaatatttggtattaccgcattaattatattgtcggccgtggcaattttctgtattacatattatatatataataaacgttcacgtaaatacaaaacagagaacaaagtctagatttttgacttacataaatgtctgggatagtaaaatctatcatattgagcggaccatctggtttaggaaagacagccatagccaaaagactatgggaatatatttggatttgtggtgtcccataccactagatttcctcgtcctatggaacgagaaggtgttgattaccattacgttaacagagaggccatctggaagggaatagccgccggaaactttctagaacatactgagtttttaggaaatatttacggaacttctaaaacagctgtgaatacagcggctattaataatcgtatttgtgtgatggatctaaacatcgacggtgttagaagtcttaaaaatacgtacctaatgccttactcggtgtatataagacctacctctcttaaaatggttgagaccaagcttcgtcgtagaaacactgaagctaacgatgagattcatcgtcgtgtgatgttggcaaaaactgacatggatgaggcaggtgaagccggtctattcgacactattatcattgaagatgatgtgaatttagcatatagtaagttaattcagatactacaggaccgtattagaatgtattttaacactaattagagacttaagacttaaaacttgataattaataatataactcgtttttatatgtgtctatttcaacgtctaatgtattagttaaatattaaaacttaccacgtaaaacttaaaatttaaaatgatatttcattgacagatagatcacacattatgaactttcaaggacttgtgttaactgacaattgcaaaaatcaatgggtcgttggaccattaataggaaaaggtggattcggtagtatttatactactaatgacaataattatgtagtaaaaatagagcccaaagctaacggatcattatttaccgaacaggcattttatactagagtacttaaaccatccgttatcgaagaatggaaaaaatctcacaatataaagcacgtaggtcttatcacgtgcaaggcatttggtctatacaaatccattaatgtggaatatcgattcttggtaattaatagattaggtgcagatctagatgcggtgatcagagccaataataatagactaccaaaaaggtcggtgatgttgatcggaatcgaaatcttaaataccatacaatttatgcacgagcaaggatattctcacggagatattaaagcgagtaatatagtcttagatcaaatagataagaataaattatatctagtggattacggattggtttctaaattcatgtctaatggcgaacatgttccatttataagaaatccaaataaaatggataacggtactctagaatttacacctatagattcgcataaaggatacgttgtatctagacgtggagatctagaaacacttggatattgtatgattagatggttgggaggtatcttaccatggactaagatatctgaaacaaagaattgtgcattagtaagtgccacaaaacagaaatatgttaacaatactgcgactttgttaatgaccagtttgcaatatgcacctagagaattgctgcaatatattaccatggtaaactctttgacatattttgaggaacccaattacgacaagtttcggcacatattaatgcagggtgtatattattaagtgtggtgtttggtcgataaaaattaaaaaataacttaatttattattgatctcgtgtgtacaaccgaaatcatggcgatgttttacgcacacgctctcggtgggtacgacgagaatcttcatgcctttcctggaatatcatcgactgttgccaatgatgtcaggaaatattctgttgtgtcagtttataataacaagtatgacattgtaaaagacaaatatatgtggtgttacagtcaggtgaacaagagatatattggagcactgctgcctatgtttgagtgcaatgaatatctacaaattggaaatccgatccatgatcaagaaggaaatcaaatctctatcatcacatatcgccacaaaaactactatgctctaagcggaatcgggtacgagagtctagacttgtgtttggaaggagtagggattcatcatcacgtacttgaaacaggaaacgctgtatatggaaaagttcaacatgattattctactatcaaagagaaggccaaagaaatgagtgcacttagtccaggacctatcatcgattaccacgtctggataggagattgtatctgtcaagttactgctgtggacgtacatggaaaggaaattatgaaaatgagattcaaaaagggtgcggtgcttccgatcccaaatctggtaaaagttaaacttggggagaatgatacagaaaatctttcttctactatatcggcggcaccatcgaggtaaccacctctctggaagacagcgtgaatcatgtactcatgaaacgtttggaaactatacgccatatgtggtctgttgtatatgatcattttgatattgtgaatggtaaagaatgctgttatgtgcatacgcattcatctaatcaaaatcctataccgagtactgtaaaaacaaatttgtacatgaagactatgggatcatgcattcaaatggattccatggaagctctagagtatcttagcgaactgaaggaatcaggtggatggagtcccagaccagaaatgcaggaatttgaatatccagatggagtggaagacactgaatcaattgagagattggcagaggagttcttcaatagatcagaacttcaggctggtgaatcagtcaaatttggtaattctattaattgttaaacatacatctgtttcagctaagcaactaagaacacgtatacggcagcagcttccttctatactctcatcttttaccaacacaaagggtggatatttgttcattggagttgataataatacacacaaagtatttggattcacggtgggttacgactacctcagactgatagagaatgatatagaaaagcatatcaaaagacttcgtgttgtgcatttctgtgagaagaaagaggacatcaagtacgcgtgtcgattcatcaaggtatataaacctggggatgagactacctcgacatacgtgtgcgctatcaaagtggaaagatgctgttgtgctgtgtttgcagattggccagaatcatggtatatggatactaatggtatcaagaagtattctccagatgaatgggtgtcacatataaaattttaattaatgtaactatagagaacaaataataaggttgtaatatcatatagacaataactaacaattaattagtaactgttatctcttttttaactaaccaactaactatatacctattaatacatcgtaattatagttcttaacatctattaatcattaattcgcttctttaattttttataaactaacattgttaattgaaaagggataacatgttacagaatataaattatatatggatttttttaaaaaggaaatacttgactggagtatatatttatctcttcattatatagcacgcgtgttttccaatttttccacatcccatataatacaggattataatctcgttcgaacatacgagaaagtggataaaacaatagttgattttttatctaggttgccaaatttattccatattttagaatatggggaaaatattctacatatttattctatggatgatgctaatacgaatattataattttttttctagatagagtattaaatattaataagaacgggtcatttatacacaatctcgggttatcatcatccattaatataaaagaatatgtatatcaattagttaataatgatcatccagataataggataagactaatgcttgaaaatggacgtagaacaagacattttttgtcctatatatcagatacagttaatatctatatatgtattttaataaatcatggattttatatagatgccgaagacagttacggttgtacattattacatagatgtatatatcactataagaaatcagaatcagaatcatacaatgaattaattaagatattgttaaataatggatcagatgtagataaaaaagatacgtacggaaacacaccttttatcctattatgtaaacacgatatcaacaacgtggaattgtttgagatatgtttagagaatgctaatatagactctgtagactttaatagatatacacctcttcattatgtctcatgtcgtaataaatatgattttgtaaagttattaatttctaaaggagcaaatgttaatgcgcgtaataaattcggaactactccattttattgtggaattatacacggtatctcgcttataaaactatatttggaatcagacacagagttagaaatagataatgaacatatagttcgtcatttaataatttttgatgctgttgaatctttagattatctattatccagaggagttattgatattaactatcgtactatatacaacgaaacatctatttacgacgctgtcagttataatgcgtataatacgttggtctatctattaaacaaaaatggtgattttgagacgattactactagtggatgtacatgtatttcggaagcagtcgcaaacaacaacaaaataataatggaagtactattgtctaaacgaccatctttgaaaattatgatacagtctatgatagcaattactaaacataaacagcataatgcagatttattgaaaatgtgtataaaatatactgcgtgtatgaccgattatgatactcttatagatgtacagtcgctacagcaatataaatggtatattttaagatgtttcgatgaaatagatatcatgaagagatgttatataaaaaataaaactgtattccaattagttttttgtatcaaagacattaatactttaatgagatacggtaaacatccttctttcgtgaaatgcactagtctcgacgtatacggaagtcgtgtacgtaatatcatagcatctattagatatcgtcagagattaattagtctattatccaagaagctggatcctggagataaatggtcgtgttttcctaacgaaataaaatataaaatattggaaaactttaacgataacgaactatccacatatctaaaaatcttataaacattattaaaatataaaatctaagtaggataaaatcacactacatcattgtttccttttagtgctcgacagtgtatactatttttaacgctcataaataaaaatgaaaacgatttccgttgttacgttgttatgcgtactacctgctgttgtttattcaacatgtactgtacccactatgaataacgctaaattaacgtctaccgaaacatcgtttaatgataaccagaaagttacgtttacatgtgatcagggatatcattctttggatccaaatgctgtctgtgaaacagataaatggaaatacgaaaatccatgcaaaaaaatgtgcacagtttctgattatgtctctgaactatataataaaccgctatacgaagtgaattccaccatgacactaagttgcaacggcgaaacaaaatattttcgttgcgaagaaaaaaatggaaatacttcttggaatgatactgttacgtgtcctaatgcggaatgtcaacctcttcaattagaacacggatcgtgtcaaccagttaaagaaaaatactcatttggggaatatatgactatcaactgtgatgttggatatgaggttattggtgcttcgtacataagttgtacagctaattcttggaatgttattccatcatgtcaacaaaaatgtgatatgccgtctctatctaacggattaatttccggatctacattttctatcggtggcgttatacatcttagttgtaaaagtggttttacactaacggggtctccatcatccacatgtatcgacggtaaatggaatcccatactcccaatatgtgtacgaactaacgaaaaatttgatccagtggatgatggtcccgacgatgagacagatttgagcaaactctcgaaagacgttgtacaatatgaacaagaaatagaatcgttagaagcaacttatcatataatcatagtggcgttgacaattatgggcgtcatatttttaatctccgttatagtattagtttgttcctgtgacaaaaataatgaccaatataagttccataaattgctaccgtaaatataaatccgttaaaataattaataatttaataacaaacaagtatcaaaagattaaagacttatagctagaatcaattgagatgtcttcttcagtggatgttgatatctacgatgccgttagagcatttttactcaggcactattataacaagagatttattgtgtatggaagaagtaacgccatattacataatatatacaggctatttacaagatgcgccgttataccgttcgatgatatagtacgtactatgccaaatgaatcacgtgttaaacaatgggtgatggatacacttaatggtataatgatgaatgaacgcgatgtttctgtaagcgttggcaccggaatactattcatggaaatgtttttcgattacaataaaaatagtatcaacaatcaactaatgtatgatataattaatagcgtatctataattctagctaatgagagatatagaagcgcttttaacgacgatggtatatacatccgtagaaatatgattaacaagttgtacggatacgcatctctaactactattggcacgatcgctggaggtgtttgttattatctgttgatgcatctagttagtttgtataaataattatttcaatatactagttaaaattttaagattttaaatgtataaaaaactaataacgtttttatttgtaataggtgcattagcatcctattcgaataatgagtacactccgtttaataaactgagtgtaaaactctatatagatggagtagataatatagaaaattcatatactgatgataataatgaattggtgttaaattttaaagagtacacaatttctattattacagagtcatgcgacgtcggatttgattccatagatatagatgttataaacgactataaaattattgatatgtataccattgactcgtctactattcaacgcagaggtcacacgtgtagaatatctaccaaattatcatgccattatgataagtacccttatattcacaaatatgatggtgatgagcgacaatattctattactgcagagggaaaatgctataaaggaataaaatatgaaataagtatgatcaacgatgatactctattgagaaaacatactcttaaaattggatctacttatatatttgatcgtcatggacatagtaatacatattattcaaaatatgatttttaaaaatttaaaatatattatcacttcagtgacagtagtcaaataacaaacaacaccatgagatatattataattctcgcagttttgttcattaatagtatacatgctaaaataactagttataagtttgaatccgtcaattttgattccaaaattgaatggactggggatggtctatacaatatatcccttaaaaattatggcatcaagacgtggcaaacaatgtatacaaatgtaccagaaggaacatacgacatatccgcatttccaaagaatgatttcgtatctttctgggttaaatttgaacaaggcgattataaagtggaagagtattgtacgggactatgcgtcgaagtaaaaattggaccaccgactgtaacattgactgaatacgacgaccatatcaatttgtacatcgagcatccgtatgctactagaggtagcaaaaagattcctatttacaaacgcggtgacatgtgtgatatctacttgttgtatacggctaacttcacattcggagattctaaagaaccagtaccatatgatatcgatgactacgattgcacgtctacaggttgcagcatagactttgtcacaacagaaaaagtgtgcgtgacagcacagggagccacagaagggtttctcgaaaaaattactccatggagttcgaaagtatgtctgacacctaaaaagagtgtatatacatgcgcaattagatccaaagaagatgttcccaatttcaaggacaaaatggccagagttatcaagagaaaatttaatacacagtctcaatcttatttaactaaatttctcggtagcacatcaaatgatgttaccacttttcttagcatgcttaacttgactaaatattcataactaatttttattaatgatacaaaaacgaaataaaactgcatattatacactggttaacgcccttataggctctaaccattttcaagatgaggtccctgattatagtccttctgttcccctctatcatctactccatgtctattagacgatgtgagaagactgaagaggaaacatggggattgaaaatagggttgtgtataattgccaaagatttctatcccgaaagaactgattgcagtgttcatctcccaactgcaagtgaaggattgataactgaaggcaatggattcagggatatacgaaacaccgataaattataaaaaaagcaatgtgtccgctgtttccgttaataatactattttcgtaactggcggattattcataaataactctaatagcacgatcgtggttaacaatatggaaaaacttgacatttataaagacaaacaatggtcgattatagaaatgcctatggctagggtatatcacggcattgactcgacatttggaatgttatattttgccggaggtctatccgttaccgaacaatatggtaatttagagaaaaacaacgagatatcttgttacaatcctagaacgaataagtggtttgatatttcatatactatttataagatatccatatcatcattgtgtaaactaaataacgtcttctatgtatttagtaaggacattggatatgtggaaaagtatgatggtgcatggaagttagtacatgatcgtctccccgctataaaggcattatcaacttctccttattgattgaaaatgaaaatataaatagtttttatgtatagcagtattaccctatagttttattgcttactactaacatggatacagatgttacaaatgtagaagatatcataaatgaaatagatagagagaaagaagaaatactaaaaaatgtagaaattgaaaataataaaaacattaacaagaatcatcccaatgaatatattagagaagcactcgttattaataccagtagtaatagtgattccattgataaagaagttatagaatgtatcagtcacgatgtaggaatatagatcatatctactaatttttataatcgatacaaaacataaaaaacaactcgttattacatagcaggcatggaatccttcaagtattgttttgataacgatggcaagaaatggattatcggaaatactttatattctggtaattcaatactctataaggtcagaaaaaatttcactagttcgttctacaattacgtaatgaagatagatcacaaatcacacaagccattgttgtctgaaatacgattctatatatctgtattggatcctttgactatcgacaactggacacgggaacgtggtataaagtatttggctattccagatctgtatggaattggagaaaccgatgattatatgttcttcgttataaagaattcgggaagagtattcgccccaaaggatactgaatcagtcttcgaagcatgcgtcactatgataaacacgttagagtttatacactctcgaggatttacccatggaaaaatagaaccgaggaatatactgattagaaataaacgtctttcactaattgactattctagaactaacaaactatacaagagtggaaactcacatatagattacaacgaggacatgataacttcaggaaatatcaattatatgtgtgtagacaatcatcttggagcaacagtttcaagacgaggagatttagaaatgttgggatattgcatgatagaatggttcggtggcaaacttccatggaaaaacgaaagtagtataaaagtaataaaacaaaaaaaagaatataaaaaatttatagctactttctttgaggactgttttcctgaaggaaatgaacctctggaattagttagatatatagaattagtatacacgttagattattctcaaactcctaattatgacagactacgtaaactgtttatacaagattgaaattatattcttttttttatagagtgtggtagtgttacggatatctaatattaatattagactatctctatcgcgctacacgaccaatatcgattactatggatatcttctatgaaaggagagaatgtatttatttctccagcgtcaatctcgtcagtattgacaatactgtattatggagctaatggatccactgctgaacagctatcaaaatatgtagaaacggaggagaacacggataaggttagcgctcagaatatctcattcaaatccatgaataaagtatatgggcgatattctgccgtgtttaaagattcctttttgagaaaaattggcgataagtttcaaactgttgacttcactgattgtcgcactatagatgcaatcaacaagtgtgtagatatctttactgaggggaaaatcaatccactattggatgaaccattgtctcctagcaattagtgccgtatactttaaagcaaaatggttgacgccattcgaaaaggaatttaccagtgattatcccttttacgtatctccgacggaaatggtagacgtaagtatgatgtctatgtacggcaaggcatttaatcacgcatctgtaaaagaatcattcggcaacttttcaatcatagaactgccatatgttggagatactagtatgatggtcattcttccagacaagattgatggattagaatccatagaacaaaatctaacagatacaaattttaagaaatggtgtgactttatggatgctatgtttatagatgttcacattcccaagtttaaggtaacaggctcgtataatctggtggatactctagtaaagtcaggactgacagaggtgttcggttcaactggagattatagcaatatgtgtaatttagatgtgagtgtcgacgctatgatccacaaaacgtatatagatgtcaatgaagagtatacagaagcagctgcagcaacttctgtactagtggcagactgtgcatcaacaattacaaatgagttctgtgcagatcatccgttcatctatgtgattaggcatgttgatggaaaaattcttttcgttggtagatattgctctccgacaactaattgttaaccattttttttaaaaaaaatagaaaaaacatgtggtattagtgcaggtcgttgttcttccaattgcaattggtaagatgacggccaactttagtacccacgtcttttcaccacagcactgtggatgtgacagactgaccagtattgatgacgtcaaacaatgtttgactgaatatatttattggtcgtcctatgcataccgcaacaggcaatgcgctggacaattgtattccacactcctctcttttagagatgatgcggaattagtgttcatcgacattcgcgagctggtaaaaaatatgccgtgggatgatgtcaaagattgtacagaaatcatccgttgttatataccggatgagcaaaaaaccatcagagagatttcggccatcatcggactttgtgcatatgctgctacttactggggaggtgaagaccatcccactagtaacagtctgaacgcattgtttgtgatgcttgagatgctaaattacgtggattataacatcatattccggcgtatgaattgatgagttgtacatcttgacattttctttcttctcttctccctttcttctcttctcccttcctccctcttctccctttcccagaaacaaacttttttacccactataaaataaaatgagtatactacctattatatttcttcctatatttttttattcttcattcgttcagacttttaacgcgtctgaatgtatcgacaaagggcaatattttgcatcattcatggagttagaaaacgagccagtaatcttaccatgtcctcaaataaatacgctatcatccggatataatatattagatattttatgggaaaaacgaggagcggataatgatagaattataccgatagataatggtagcaatatgctaattctgaacccgacacaatcagactctggtatttatatatgcattaccacgaacgaaacctactgtgacatgatgtcgttaaatttgacaatcgtgtctgtctcagaatcaaatatagatcttatctcgtatccacaaatagtaaatgagagatctactggcgaaatggtatgtcccaatattaatgcatttattgctagtaacgtaaacgcagatattatatggagcggacatcgacgccttagaaataagagacttaaacaacggacacctggaattattaccatagaagatgttagaaaaaatgatgctggttattatacatgtgttttagaatatatatacggtggcaaaacatataacgtaaccagaattgtaaaattagaggtacgggatagaataataccttctactatgcaattaccagatggcattgtaacttcaataggtagtaatttgactattgcatgcagagtatcgttgagacctcccacaacggacaccgacgtcttttggataagtaatggtatgtattacgaagaagatgatggggacggaaacggtagaataagtgtagcaaataaaatctatatgaccgataagagacgtgttattacatcccggttaaacattaatcctgtcaaggaagaagatgctacaacgtttacgtgtatggcgtttactattcctagcatcagcaaaacagttactgttagtataacgtgaatgtatgttgttacatttccatgtcaattgagtttataagaatttttatacattatcttccaacaaacaattgacgaacgtattgctatgattaactcccacgatactatgcatattattaatcattaacttgcagactatacctagtgctattttgacatactcgtgttcttgtgtaattgcggtatctatattattaaagtacgtaaatctagctatagttttattatttaattttagataatataccgtctccttatttttaaaaattgccacatcctttattaaatcatgaatgggaatttctatgtcatcgttagtatattgtgaacaacaagagcagatatctataggaaagggtggaatgcgatacattgatctatgtagttttaaaacacacgcgaactttgaagaatttatataaatcattccatcgatacatccttctatgttgacatgtatatatccaggaattcttttattaatgtcaggaaatgtataaactaaaacattgcccgaaagcggtgcctctatctgcgttatatccgttcttaacttacaaaatgtaaccaatacctttgcatgacttgttttgttcggcaacgttagtttaaacttgacgaatggattaattacaatagcatgatccgcgcatctattaagtttttttactttaacgcccttgtatgtttttacagagactttatctaaatttctagtgcttgtatgtgttataaatataacgggatatagaaccgaatcacctaccttagatacccaattacattttatcagatccagataataaacaaattttgtcgccctaactaattctatattgttatatattttacaattggttatgatatcatgtaataacttggagtctaacgcgcatcgtcgtacgtttatacaattgtgatttagtgtagtatatctacacatgtatttttccgcactatagtattctggactagtgataaaactatcgttatatctgtcttcaatgaactcatcgagatattgctctctgtcatattcatacacctgcataaactttctagacatcttacaatccgtgttattttaggatcatatttacatatttacgggtatatcaaagatgttagattagttaatgggaatcgtctataataatgaatattaaacaattatatgaggacttttaccacaaagcatcataaaaatgagtcgtcgtctgatttatgttttaaatatcaaccgcaaatcaactcataaaatacaagagaatgaaatatatacatattttagtcattgcaatatagaccatacttctacagaacttgattttgtagttaaaaactatgatctaaacagacgacaacctgtaactgggtatactgcactacactgctatttgtataataattactttacaaacgatgtactgaagatattattaaatcatgacgtaaatgtaacgatgaaaaccagtagcggacgtatgcctgtttatatattgcttactagatgttgtaatatttcacatgatgtagtgatagatatgatagacaaagataaaaaccacttattacatagagactattccaacctattactagagtatataaaatctcgttacatgttattgaaggaagaggatatcgatgagaacatagtatccactttattagataagggaatcgatcctaactttaaacaagacggatatacagcgttacattattattatttgtgtctcgcacacgtttataaactaggtgagtgtagaaaaccgataacgataaaaaaggccaagcgaattatttctttgtttatacaacatggagctaatctaaacgcgttagataattgtggtaatacaccattccatttgtatcttagtattgaaatgtgtaataatattcatatgactaaaatgctgttgacttttaatccgaatttcaaaatatgtaataatcatggattaacgcctatactatgttatataacttccgactacatacaacacgatattcttgttatgttaatacatcactatgaaacaaatgttggagaaatgccgatagatgagcgtcgtatgatcgtattcgagtttatcaaaacatattctacacgtccggcagattcgataacttatttgatgaataggtttaaaaatataaatatttatacccgctatgaaggaaagacattattacacgtagcatgtgaatataataatacacaagtaatagattatcttatacgtatcaacggagatataaatgcgttaaccgacaataacaaacacgctacacaactcattatagataacaaagaaaattccccatataccattaattgtttactgtatatacttagatatattgtagataagaatgtgataagatcgttggtggatcaacttccatctctacctatcttcgatataaaatcatttgagaaattcatatcctactgtatacttttagatgacacattttacgataggcacgttaagaatcgcgattctaaaacgtatcgatacgcattttcaaaatacatgtcgtttgataaatacgatggtataataactaaatgtcacgacgaaacaatgttactcaaactgtccactgttctagacactacactatatgcagttttaagatgtcataattcgagaaagttaagaagatacctcaacgagttaaaaaaatataataacgataagtcctttaaaatatattctaatattatgaatgagagataccttaatgtatattataaagatatgtacgtgtcaaaggtatatgataaactatttcctgttttcacagataaaaattgtctactaacattactaccttcagaaattatatacgaaatattatacatgctgacaattaacgatctttataatatatcgtatccacctaccaaagtatagttgtatttttctcatgcgatgtgtgtaaaaaaactgatattatataaatattttagtgccgtataataaagatgacgatgaaaatgatggtacatatatatttcgtatcattattgttattgctattccacagttacgccatagacatcgaaaatgaaatcacagaattcttcaataaaatgagagatactctaccagctaaagactctaaatggttgaatccagcatgtatgttcggaggcacaatgaatgatatagccgctctaggagagccattcagcgcaaagtgtcctcctattgaagacagtcttttatcgcacagatataaagactatgtggttaaatgggagaggctagaaaagaatagacggcgacaggtttctaataaacgtgttaaacatggtgatttatggatagccaactatacatctaaattcagtaaccgtaggtatttgtgcaccgtaactacaaagaatggtgactgtgttcagggtatagttagatctcatattaaaaaacctccttcatgcattccaaaaacatatgaactaggtactcatgataagtatggcatagacttatactgtggaattctttacgcaaaacattataataatataacttggtataaagataataaggaaattaatatcgacgacattaagtattcacaaacgggaaaggaattaattattcataatccagagttagaagatagcggaagatacgactgttacgttcattacgacgacgttagaatcaagaatgatatcgtagtatcaagatgtaaaatacttacggttataccgtcacaagaccacaggtttaaactaatactagatccgaaaatcaacgtaacgataggagaacctgccaatataacatgcactgctgtgtcaacgtcattattgatcgacgatgtactgattgaatgggaaaatccatccggatggcttataggattcgattttgatgtatactctgttttaactagtagaggcggtatcaccgaggcgaccttgtactttgaaaatgttactgaagaatatataggtaatacatataaatgtcgtggacacaactattattttgaaaaaacccttacaactacagtagtattggagtaaatatacaatgcatttttatatacattactgaattattattactgaattattattactgaattattattaattatatcgtatttgtgctatagaatggatgaagatacgcgactatctaggtatttgtatctcaccgatagagaacatataaatgtagactctattaaacagttgtgtaaaatatcagatcctaatgcatgttatagatgtggatgtacggctttacatgagtacttttataattatagatcagtcaacggaaaatacaagtatagatacaacggttactatcaatattattcatctagcgattatgaaaattataatgaatattattatgatagaactggtatgaacagtgagagtgataatatatcaatcaaaacagaatatgaattctatgatgaaacacaagatcaaagtacacaactagtaggttacgacattaaactcaaaaccaatgaggatgattttatggctatgatagatcagtgggtgtccatgattatatagatgaatcaattaataaagtagtatatggaagagagtctcacgtaagatggcgggatatatggcaagaacataatgatggcgtatacagtataggaaaggagtgcatagataatatatacgaagacaaccataccgtagacgaattctacaagatagacagcgtatcagatgtagatgacgcggaacacatatctccgataactaaaaaaccatagaatcagttgatgataatacctacatttctaatcttccgtataccatcaaatacaaaatattcgagcaacaataagtattttttatacctttaaaactgataaataaattttttctagtgatattttggcaagatgagaatcctatttctcatcgctttcatgtatgggtgtgttcactcatatgttaacgcggttgaaaccaaatgtccaaatctagacattgtaacatcttctggagaatttcattgttcaggatgtgtggaacatatgcctgagtttagctatatgtattggttggcaaaggatatgaaatcggacgaggataccaagtttatagaacatctgggtgatggcatcaaagaagatgaaaccgttcgtaccacagatagtggaatcgtcactctacgtaaagtccttcatgtgactgatactaataaatttgataattataggttcacttgtgtcctcgctacgctagatggcatttataaaaagaatgtttgctgaagtagttgtgtgctactatttttatttatgatataatctaatggaattaatttgaattgatatttatccaatactaaagattatattagaatcaaattaatcttttatacgagaaaaaataacgacatacgtcgtcaacaaattaaactttttatttattagttaactagcttatagaacttgctcattgttatgtttctaaaacgggtacggcatataggacaattatccgacgcaccggtttctcttcgtgttctatgccatatattgatgcatgttatgcaaaatatatgagtacacgaatccaataaaccaaagtatctatcgttttgagtaaacaacttcatagcaaattccacattctttttctttacttactctatacacgtcctcgtatttatttagtattttgatgatatccaactcagaaatggttgttgtattattgggtgtatttggagtataggtattattagctatgtaccaatttaccaaccctcttaatattgattgataatcacatcggttatccaattaataactaaattgtagtgtatatatagaccatatatgtttctatttttttgacagttacgtatagtttcagtaagttttgattgttgtattcctgtatctctagataagttagtcatatagtcccttccggcgatacgttttttccaagcccgaaattgattagccaaatgtgtatttatttttgtgatattgatataatatttcggataatgcatactgttagtcttatatcatttggttcatctatgtattgtaatattgttacatgatctatagatgatgtattgattttggcaggatcgaattccatatccgcgactaaacagtgaaaaaaatgtaaatactttttaaattttaaattagtaaaacttttttttattttttatgattccaaaaatactgaatacaaagtcctaaattataaatatggagatcatactaccacaacttattattatgtatacaaggccggtgtaatagatagatatatataattctattacaccggcagacaattaccgaccggtatttgtcgttaccaacataccgtataatatgtaatatacaattccataacccattgacagttgttatacatcaaaattgcaattcttttgattacgatgttataagaatgtagttaattgatgtatgatgttaatgtgtcctctttcctcttataacatcgtaatcaaaaacttttttataatatatacctaataatgtgtcttaatagttctcgtgattcgtcaaacaatcattcttataaaatataataaagcaacgtaaaaacacataaaaataagcgtaactaataagacaatggatatttacgacgataaaggtctacagactattaaactgtttaataatgaatttgattgtataaggaatgacatcagagaattatttaaacatgtaactgattccgatagtatacaacttccgatggaagacaattctgatattatagaaaatatcagaaaaatactatatagacgattaaaaaatgtagaatgtgttgacatcgataacacaataacttttatgaaatacgatccaaatgatgataataagcgtacgtgttctaattgggtacccttaactaataactatatggaatattgtctagtaatatatttggaaacaccgatatgtggaggcaaaataaaattataccaccctacaggaaatataaagtcggataaggatattatgtttgcaaagactctagactttaaatcaacgaaagtgttaactggacgtaaaacaattgccgttctagacatatccgtttcatataatagatcaatgactactattcactacaacgacgacgttgatatagatatacatactgataaaaatggaaaagagttatgttattgttatataacaatagatgatcattacttggttgatgtggaaactataggagttatagtcaatagatctggaaaatgtctgttagtaaataaccatctaggtataggtatcgttaaagataaacgtataagcgatagttttggagatgtatgtatggatacaatatttgacttttctgaagcacgagagttattttcattaactaatgatgataacaggaatatagcatgggacactgataaactagacgatgatacagatatatggactcccgtcacagaagatgattacaaatttctttctagactagtattgtatgcaaaatctcaatcggatactgtatttgactattatgttcttactggtgatacggaaccacccactgtattcattttcaaggtaactagattttactttaatatgccgaaataaaaaatttttgtataatatctagaggtagaggtattgtttagataaatacaaataacatagatacatcgcatacttagcatttttataaatatacataagacatacactttatacatttttgtaaaaatactcataaaaaaatttataaaaattatggcacaaccatatcttgtataggtagtttagttcgtcgagtgaacctataaacagataatagacaacacataataatgcctactaatacaagcataataccgggagatgggatatatgacgttgtagtgtttgggttttctgaacgttgatagtctactaatactacatgctgacatctaatgcctgtataaccatgagagcatctacaatacataccgtcaatatctctagcgtggatacagtcaccgtgtaaacaatatccatctccctctggaccgcataatctgatagctggaatatctgttgtagcgtttgtaatttctggcaatgtcgtttcgatagcgttaccactatcggcgaatgatctgattatcatagcagcgaacaacaacatcagataatttatcaacatttttgatggattctgtgtttatgctgtttctcagtgtgtgtttatgacaagattgggaattttatattattaattcagtaatataaactaataatatattgttaattgtgtaaataatataaaaataacaatacaatattgaatgtgttgctgttaaaaatgtatgtgttaatataatagaataaaataaatgagtatgatcattttagataacgattgattttatcattaccgcttcattcttatattctttgcttacggaacctatatttagaaacatctactaacaattttttatgcttgcattattaatggtatgtaatatgattgattgtgtacgcaataccaatttgttaagtatgaatacggggtacaaacataaattgaaatttaacattatttatttatgatatatatcgttatcgttaggtctataccatggatatctttaaagaactaatcttaaaacaccctgatgaaaatgttttgatttctccagtttccattttatctactttatctattctaaatcatggagcagctggttctacagctgaacaactatcaaaatatatagagaatatgaatgagaatacacccgatgacaataatgatgacatggaggtagatattccgtattgtgcgacactagctaccgcaaataaaatatacggtagcgatagtatcgagttccacgcctccttcctacaaaaaataaaagacgattttcaaactgtaaactttaataatgctaaccaaacaaaggaactaatcaacgaatgggttaagacaatgacaaatggtaaaattaattccttattgactagtccgctatccattaatactcgtatgacagttgttagcgccgtccattttaaagcaatgtggaaatatccattttctaaacatcttacatatacagacaagttttatatttctaagaatatagttaccagcgttgatatgatggtgggtaccgagaataacttgcaatatgtacatattaatgaattattcggaggattctctattatcgatattccatacgagggaaactctagtatggtaattatactaccggacgacatagaaggtatatataacatagaaaaaaatataacagatgaaaaatttaaaaaatggtgtggtatgttatctactaaaagtatagacttgtatatgccaaagtttaaagtggaaatgacagaaccgtataatctggtaccgattttagaaaatttaggacttactaatatattcggatattatgcagattttagcaagatgtgtaatgaaactatcactgtagaaaaatttctacatacgacgtttatagatgttaatgaggagtatacagaagcatcggccgttacaggagtatttacgattaacttttcgatggtatatcgtacgaaggtctacataaaccatccattcatgtacatgattaaagacaccacaggacgtatactttttatagggaaatactgctatccgcaataaatataaacaaatagacttttataaagagtcttcaacgataagtatatcgacatactacttatgctgcgaaagattctgaacgagaacgactatctcaccctcttggatcatatccgcactgctaaatactaaatctccactacactttttatcatcttatgaggaatgattgccttcgtgaaataggaataattagcaccagaatagctatggattattgtggtagagagtgcactattctatgtcgtctactggatgaagatgtgacgtacaaaaaaataaaactagaaattgaaacgtgtcacaacttatcaaaacatatagatagacgaggaaacaatgcgctacattgttacgtctccaataaatgcgatacagacattaagattgttctctcgcggagtcgagagactttgtagaaacaacgaaggattaactccgctaggagtatacagtaagcatagatacgtaaaatctcagattgtgcatctactgatatccagctattcaaattcctctaacgaactcaagtcgaatataaatgatttcgatctgtattcggataatatcgacttacgtctgctaaaatacctaattgtggataaacggatacgtccgtccaagaatacgaattatgcaatcaatggtctcggattggtggatatatacgtaacgacgcctaatccgagaccagaagtattgctatggcttcttaaatcagaatgttacagcaccggttacgtatttcgtacctgtatgtacgacagtgatatgtgtaagaactctcttcattactatatatcgtctcatagagaatctcaatctctatccaaggatgtaattaaatgtttgatcgataacaatgtttccatccatggcagagacgaaggaggatctttacccatccaatactactggtctttctcaaccatagatatagagattgttaaattattattaataaaggatgtggacacgtgtagagtatacgacgtcagccctatattagaggcgtattatctaaacaagcgatttagagtaaccccatataatgtagacatggaaatcgttaatcttcttattgagagacgtcatactcttgtcgacgtaatgcgtagtattacttcgtacgattccagagaatataaccactacatcatcgataacattctaaagagatttagacaacaggatgaatccatcgtacaagccatactgataaactacttacattacggcgatatggtcgttcgatgcatgttagataacggacaacaactatcctctacacgactactttgttaataataatctcgtcgatgtaaacgtcgtaaggtttatcgtggaaaatatggacacgcggctgtaaatcacgtatcgaacaatggccgtctatgtatgtacggtctgatattatcgagatttaataattgcgggtatcactgttatgaaaccatactgatagatgtatttgatatactaagcaagtacatggatgatatagatatgatcgataactctactatattacgcggtcgatgtcaataatatacaatttgcaaagcggttattggaatatggagcgagtatcacgctcgataatcaatacggccatccagaaaagcagttacagaagagaaaacaaaacgaaatcgttgttctacaagatgtctctccctacgacgattactacgtaaaaaagatactagcctactgcctattaagggacgagtcattcgcggaactacatagtaaattctgtttaaacgaggactataaaagtgtatttatgaaaaatatatcattcgataagatagattccatcatcgtgacataagtcgcctcaaagagattcgaatctccgacaccgacctgtatacggtatcacagctatcttaaagccatacattcagacagtcacatttcatttcccatgtacgacgatctcatagaacagtgccatctatcgatggagcgtaaaagtaaactcgtcgacaaagcactcaataaattagagtctaccatcggtcaatctagactatcgtatttgcctccggaaattatgcgcaatatcatctaaacagtatgttgtacggaaagaaccattacaaatattatccatgatagaaagaaaatatctatatgattggagaagtaggaaacaggaacaagacaacgattactacattattaaatcatgaagtccgtattatactcgtatatattgtttctctcatgtataataataaacggaagagatatagcaccgcatgcaccatccgatggaaagtgtaaagacaacgaatacaaacgccataatttgtgtccgggaacatacgcttccagattatgcgatagcaagactaacacacgatgtacgccgtgtggttcgggtaccttcacatctcgcaataatcatttacccgcttgtctaagttgtaacggaagacgcgatcgtgtaacacgactcacaatagaatctgtgaatgctctcccggatattattgtcttctcaaaggatcatccggatgcaaggcatgtgtttcccaaacaaaatgtggaataggatacggagtatccggagacgtcatctgttctccgtgtggtctcggaacatattctcacaccgtctcttccgcagataaatgcgaacccgtacccagaaatacgtttaactatatcgatgtggaaattaacctgtatccagttaacgacacgtcgtgtactcggacgaccactaccggtctcagcgaatccatctcaacgtcggaactaactattactatgaatcataaagactgtaatcccgtatttcgtgatggatacttctccgttcttaataaggtagcgacttcaggtttctttacaggagaaaggtgtgcactctgaatttcgagattaaatgcaataacaaagattcttcctccaaacagttaacgaaagcaaagaatgatactatcatgccgcattcggagacagtaactctagtgggcgacatctatatactatatagtaataccaatactcaagactacgaaactgatacaatctcttatcatgtgggtaatgttctcgatgtcgatagccatatgcccggtagttgcgatatacataaactgatcactaattccaaacccacccactttttatagtaagtttttcacccataaataataaatacaataattaatttctcgtaaaagtagaaaatatattctaatttattgcacggtaaggaagtagaatcataaagaacagtactcaatcaatagcaattatgaaacaatatatcgtcctggcatgcatgtgcctggcggcagctgctatgcctgccagtcttcagcaatcatcctcatcctcctcctcgtgtacggaagaagaaaacaaacatcatatgggaatcgatgttattatcaaagtcacaaagcaagaccaaacaccgaccaatgataagatttgccaatccgtaacggaaattacagagtccgagtcagatccagatcccgaggtggaatcagaagatgattccacatcagtcgaggatgtagatcctcctaccacttattactccatcatcggtggaggtctgagaatgaactttggattcaccaaatgtcctcagattaaatccatctcagaatccgctgatggaaacacagtgaatgctagattgtccagcgtgtccccaggacaaggtaaggactctcccgcgatcactcatgaagaagctcttgctatgatcaaagactgtgaagtgtctatcgacatcagatgtagcgaagaagagaaagacagcgacatcaagacccatccagtactcgggtctaacatctctcataagaaagtgagttacgaagatatcatcggttcaacgatcgtcgatacaaaatgcgtcaagaatctagagtttagcgttcgtatcggagacatgtgcaaggaatcatctgaacttgaggtcaaggatggattcaagtatgtcgacggatcggcatctgaaggtgcaaccgatgatacttcactcatcgattcaacaaaactcaaagcgtgtgtctgaatcgataactctattcatctgaaattggatgagtagggttaatcgaacgattcaggcacaccacgaattaaaaaagtgtaccggacactatattccggtttgcaaaacaaaaatgttcttaactacattcacaaaaagttacctctcgcgacttcttctttttctgtctcaatagtgtgatacgattatgacactattcctattcctattcctatttcctttcagagtatcacaaaaatattaaacctctttctgatggtctcataaaaaaagttttacaaaaatatttttattctctttctctctttgatggtctcataaaaaaagttttacaaaaatatttttattctctttctctctttgatggtctcataaaaaaagttttacaaaaatatttttattctctttctctctttgatggtctcataaaaaaagttttacaaaaatatttttattctctttctctctttgatggtctcataaaaaaagttttacaaaaatatttttattctctttctctctttgatggtctcataaaaaaagttttacaaaaatatttttattctctttctctctttgatggtctcataaaaaaagttttacaaaaatatttttattctctttctctctttgatggtctcataaaaaaagttttacaaaaatatttttattctctttctctctttgatggtctcataaaaaaagttttacaaaaatatttttattctctttctctctttgatggtctcataaaaaaagttttacaaaaatatttttattctctttctctctttgatggtctcataaaaaaagttttacaaaaatatttttattctctttctctctttgatggtctcataaaaaaagttttacaaaaatatttttattctctttctctctttgatggtctcataaaaaagttttacaaaaatatttttattctctttctctctttgatggtctcataaaaaagttttacaaaaatatttttattctctttctctctttgatggtctcataaaaaaagttttacaaaaatatttttattctctttctctctttgatggtctcataa

SEQ ID NO: 5 - DNA, 201444 bp, Artificial Sequence
  GLV-1h190 genome
ttatgagaccatcaaagagagaaagagaataaaaatatttttgtaaaactttttttatgagaccatcaaagagagaaagagaataaaaatatttttgtaaaacttttttatgagaccatcaaagagagaaagagaataaaaatatttttgtaaaacttttttatgagaccatcaaagagagaaagagaataaaaatatttttgtaaaactttttttatgagaccatcaaagagagaaagagaataaaaatatttttgtaaaactttttttatgagaccatcaaagagagaaagagaataaaaatatttttgtaaaactttttttatgagaccatcaaagagagaaagagaataaaaatatttttgtaaaactttttttatgagaccatcaaagagagaaagagaataaaaatatttttgtaaaactttttttatgagaccatcaaagagagaaagagaataaaaatatttttgtaaaactttttttatgagaccatcaaagagagaaagagaataaaaatatttttgtaaaactttttttatgagaccatcaaagagagaaagagaataaaaatatttttgtaaaactttttttatgagaccatcaaagagagaaagagaataaaaatatttttgtaaaactttttttatgagaccatcaaagagagaaagagaataaaaatatttttgtaaaactttttttatgagaccatcaaagagagaaagagaataaaaatatttttgtaaaactttttttatgagaccatcaaagagagaaagagaataaaaatatttttgtaaaactttttttatgagaccatcagaaagaggtttaatatttttgtgatactctgaaaggaaataggaataggaataggaatagtgtcataatcgtatcacactattgagacagaaaaagaagaagtcgcgagaggtaactttttgtgaatgtagttaagaacatttttgttttgcaaaccggaatatagtgtccggtacacttttttaattcgtggtgtgcctgaatcgttcgattaaccctactcatccaatttcagatgaatagagttatcgattcagacacacgctttgagttttgttgaatcgatgagtgaagtatcatcggttgcaccttcagatgccgatccgtcgacatacttgaatccatccttgacctcaagttcagatgattccttgcacatgtctccgatacgaacgctaaactctagattcttgacgcattttgtatcgacgatcgttgaaccgatgatatcttcgtaactcactttcttatgagagatgttagacccgagtactggatgggtcttgatgtcgctgtctttctcttcttcgctacatctgatgtcgatagacacttcacagtctttgatcatagcaagagcttcttcatgagtgatcgcgggagagtccttaccttgtcctggggacacgctggacaatctagcattcactgtgtttccatcagcggattctgagatggatttaatctgaggacatttggtgaatccaaagttcattctcagacctccaccgatgatggagtaataagtggtaggaggatctacatcctcgactgatgtggaatcatcttctgattccacctcgggatctggatctgactcggactctgtaatttccgttacggattggcaaatcttatcattggtcggtgtttggtcttgctttgtgactttgataataacatcgattcccatatgatgtttgttttcttcttccgtacacgaggaggaggatgaggatgattgctgaagactggcaggcatagcagctgccgccaggcacatgcatgccaggacgatatattgtttcataattgctattgattgagtactgttctttatgattctacttccttaccgtgcaataaattagaatatattttctacttttacgagaaattaattattgtatttattatttatgggtgaaaaacttactataaaaagtgggtgggtttggaattagtgatcagtttatgtatatcgcaactaccgggcatatggctatcgacatcgagaacattacccacatgataagagattgtatcagtttcgtagtcttgagtattggtattactatatagtatatagatgtcgcccactagagttactgtctccgaatgcggcatgatagtatcattctttgctttcgttaactgtttggaggaagaatctttgttattgcatttaatctcgaaattcagagtgcacacctttctcctgtaaagaaacctgaagtcgctaccttattaagaacggagaagtatccatcacgaaatacgggattacagtctttatgattcatagtaatagttagttccgacgttgagatggattcgctgagaccggtagtggtcgtccgagtacacgacgtgtcgttaactggatacaggttaatttccacatcgatatagttaaacgtatttctgggtacgggttcgcatttatctgcggaagagacggtgtgagaatatgttccgagaccacacggagaacagatgacgtctccggatactccgtatcctattccacattttgtttgggaaacacatgccttgcatccggatgatcctttgagaagacaataatatccgggagagcattcacagattctattgtgagtcgtgttacacgatcgcgtcttccgttacaacttagacaagcgggtaaatgattattgcgagatgtgaaggtacccgaaccacacggcgtacatcgtgtgttagtcttgctatcgcataatctggaagcgtatgttcccggacacaaattatggcgtttgtattcgttgtctttacactttccatcggatggtgcatgcggtgctatatctcttccgtttattattatacatgagagaaacaatatatacgagtataatacggacttcatgatttaataatgtagtaatcgttgtcttgttcctgtttcctacttctccaatcatatagatattttctttctatcatggataatatttgtaatggttctttccgtacaacatactgtttagatgatattgcgcataatttccggaggcaaatacgatagtctagattgaccgatggtagactctaatttattgagtgctttgtcgacgagtttacttttacgctccatcgatagatggcactgttctatgagatcgtcgtacatgggaaatgaaatgtgactgtctgaatgtatggctttaagatagctgtgataccgtatacaggtcggtgtcggagattcgaatctctttgaggcgacttatgtcacgatgatggaatctatcttatcgaatgatatatttttcataaatacacttttatagtcctcgtttaaacagaatttactatgtagttccgcgaatgactcgtcccttaataggcagtaggctagtatcttttttacgtagtaatcgtcgtagggagagacatcttgtagaacaacgatttcgttttgttttctcttctgtaactgcttttctggatggccgtattgattatcgagcgtgatactcgctccatattccaataaccgctttgcaaattgtatattattgacatcgaccgcgtaatatagtagagttatcgatcatatctatatcatccatgtacttgcttagtatatcaaatacatctatcagtatggtttcataacagtgatacccgcaattattaaatctcgataatatcagaccgtacatacatagacggccattgttcgatacgtgatttacagccgcgtgtccatattttccacgataaaccttacgacgtttacatcgacgagattattattaacaaagtagtcgtgtagaggatagttgttgtccgttatctaacatgcatcgaacgaccatatcgccgtaatgtaagtagtttatcagtatggcttgtacgatggattcatcctgttgtctaaatctctttagaatgttatcgatgatgtagtggttatattctctggaatcgtacgaagtaatactacgcattacgtcgacaagagtatgacgtctctcaataagaagattaacgatttccatgtctacattatatggggttactctaaatcgcttgtttagataatacgcctctaatatagggctgacgtcgtatactctacacgtgtccacatcctttattaataataatttaacaatctctatatctatggttgagaaagaccagtagtattggatgggtaaagatcctccttcgtctctgccatggatggaaacattgttatcgatcaaacatttaattacatccttggatagagattgagattctctatgagacgatatatagtaatgaagagagttcttacacatatcactgtcgtacatacaggtacgaaatacgtaaccggtgctgtaacattctgatttaagaagccatagcaatacttctggtctcggattaggcgtcgttacgtatatatccaccaatccgagaccattgattgcataattcgtattcttggacggacgtatccgtttatccacaattaggtattttagcagacgtaagtcgatattatccgaatacagatcgaaatcatttatattcgacttgagttcgttagaggaatttgaatagctggatatcagtagatgcacaatctgagattttacgtatctatgcttactgtatactcctagcggagttaatccttcgttgtttctacaaagtctctcgactccgcgagagaacaatcttaatgtctgtatcgcatttattggagacgtaacaatgtagcgcattgtttcctcgtctatctatatgttttgataagttgtgacacgtttcaatttctagttttatttttttgtacgtcacatcttcatccagtagacgacatagaatagtgcactctctaccacaataatccatagctattctggtgctaattattcctatttcacgaaggcaatcattcctcataagatgataaaaagtgtagtggagatttagtatttagcagtgcggatatgatccaagagggtgagatagtcgttctcgttcagaatctttcgcagcataagtagtatgtcgatatacttatcgttgaagactctttataaaagtctatttgtttatatttattgcggatagcagtatttccctataaaaagtatacgtcctgtggtgtctttaatcatgtacatgaatggatggtttatgtagaccttcgtacgatataccatcgaaaagttaatcgtaaatactcctgtaacggccgatgcttctgtatactcctcattaacatctataaacgtcgtatgtagaaatttttctacagtgatagtttcattacacatcttgctaaaatctgcataatatccgaatatattagtaagtcctaaattttctaaaatcggtaccagattatacggttctgtcatttccactttaaactttggcatatacaagtctatacttttagtagataacataccacaccattttttaaatttttcatctgttatatttttttctatgttatatataccttctatgtcgtccggtagtataattaccatactagagtttccctcgtatggaatatcgataatagagaatcctccgaataattcattaatatgtacatattgcaagttattctcggtacccaccatcatatcaacgctggtaactatattcttagaaatataaaacttgtctgtatatgtaagatgtttagaaaatggatatttccacattgctttaaaatggacggcgctaacaactgtcatacgagtattaatggatagcggactagtcaataaggaattaattttaccatttgtcattgtcttaacccattcgttgattagttcctttgtttggttagcattattaaagtttacagtttgaaaatcgtcttttattttttgtaggaaggaggcgtggaactcgatactatcgctaccgtatattttatttgcggtagctagtgtcgcacaatacggaatatctacctccatgtcatcattattgtcatcgggtgtattctcattcatattctctatatattttgatagttgttcagctgtagaaccagctgctccatgatttagaatagataaagtagataaaatggaaactggagaaatcaaaacattttcatcagggtgttttaagattagttctttaaagatatccatggtatagacctaacgataacgatatatatcataaataaataatgttaaatttcaatttatgtttgtaccccgtattcatacttaacaaattggtattgcgtacacaatcaatcatattacataccattaataatgcaagcataaaaaattgttagtagatgtttctaaatataggttccgtaagcaaagaatataagaatgaagcggtaatgataaaatcaatcgttatctaaaatgatcatactcatttattttattctattatattaacacatacatttttaacagcaacacattcaatattgtattgttatttttatattatttacacaattaacaatatattattagtttatattactgaattaataatataaaattcccaatcttgtcataaacacacactgagaaacagcataaacacagaatccatcaaaaatgttgataaattatctgatgttgttgttcgctgctatgataatcagatcattcgccgatagtggtaacgctatcgaaacgacattgccagaaattacaaacgctacaacagatattccagctatcagattatgcggtccagagggagatggatattgtttacacggtgactgtatccacgctagagatattgacggtatgtattgtagatgctctcatggttatacaggcattagatgtcagcatgtagtattagtagactatcaacgttcagaaaacccaaacactacaacgtcatatatcccatctcccggtattatgcttgtattagtaggcattattatgtgttgtctattatctgtttataggttcactcgacgaactaaactacctatacaagatatggttgtgccataatttttataaatttttttatgagtatttttacaaaaatgtataaagtgtatgtcttatgtatatttataaaaatgctaagtatgcgatgtatctatgttatttgtatttatctaaacaatacctctacctctagatattatacaaaaattttttatttcggcatattaaagtaaaatctagttaccttgaaaatgaatacagtgggtggttccgtatcaccagtaagaacataatagtcaaatacagtatccgattgagattttgcatacaatactagtctagaaagaaatttgtaatcatcttctgtgacgggagtccatatatctgtatcatcgtctagtttatcagtgtcccatgctatattcctgttatcatcattagttaatgaaaataactctcgtgcttcagaaaagtcaaatattgtatccatacatacatctccaaaactatcgcttatacgtttatctttaacgatacctatacctagatggttatttactaacagacattttccagatctattgactataactcctatagtttccacatcaaccaagtaatgatcatctattgttatataacaataacataactcttttccatttttatcagtatgtatatctatatcaacgtcgtcgttgtagtgaatagtagtcattgatctattatatgaaacggatatgtctagaacggcaattgttttacgtccagttaacactttcgttgatttaaagtctagagtctttgcaaacataatatccttatccgactttatatttcctgtagggtggtataattttattttgcctccacatatcggtgtttccaaatatattactagacaatattccatatagttattagttaagggtacccaattagaacacgtacgcttattatcatcatttggatcgtatttcataaaagttattgtgttatcgatgtcaacacattctacattttttaatcgtctatatagtatttttctgatattttctataatatcagaattgtcttccatcggaagttgtatactatcggaatcagttacatgtttaaataattctctgatgtcattccttatacaatcaaattcattattaaacagtttaatagtctgtagacctttatcgtcgtaaatatccattgtcttattagttacgcttatttttatgtgtttttacgttgctttattatattttataagaatgattgtttgacgaatcacgagaactattaagacacattattaggtatatattataaaaaagtttttgattacgatgttataagaggaaagaggacacattaacatcatacatcaattaactacattcttataacatcgtaatcaaaagaattgcaattttgatgtataacaactgtcaatgggttatggaattgtatattacatattatacggtatgttggtaacgacaaataccggtcggtaattgtctgccggtgtaatagaattatatatatctatctattacaccggccttgtatacataataataagttgtggtagtatgatctccatatttataatttaggactttgtattcagtatttttggaatcataaaaaataaaaaaaagttttactaatttaaaatttaaaaagtatttacatttttttcactgtttagtcgcggatatggaattcgatcctgccaaaatcaatacatcatctatagatcatgtaacaatattacaatacatagatgaaccaaatgatataagactaacagtatgcattatccgaaatattatatcaatatcacaaaaataaatacacatttggctaatcaatttcgggcttggaaaaaacgtatcgccggaagggactatatgactaacttatctagagatacaggaatacaacaatcaaaacttactgaaactatacgtaactgtcaaaaaaatagaaacatatatggtctatatatacactacaatttagttattaattggataaccgatgtgattatcaatcaatattaagagggttggtaaattggtacatagctaataatacctatactccaaatacacccaataatacaacaaccatttctgagttggatatcatcaaaatactaaataaatacgaggacgtgtatagagtaagtaaagaaaaagaatgtggaatttgctatgaagttgtttactcaaaacgatagatactttggtttattggattcgtgtactcatatattttgcataacatgcatcaatatatggcatagaacacgaagagaaaccggtgcgtcggataattgtcctatatgccgtacccgttttagaaacataacaatgagcaagttctataagctagttaactaataaataaaaagtttaatttgttgacgacgtatgtcgttattttttctcgtataaaagattaatttgattctaatataatctttagtattggataaatatcaattcaaattaattccattagattatatcataaataaaaatagtagcacacaactacttcagcaaacattctttttataaatgccatctagcgtagcgaggacacaagtgaacctataattatcaaatttattagtatcagtcacatgaaggactttacgtagagtgacgattccactatctgtggtacgaacggtttcatcttctttgatgccatcacccagatgttctataaacttggtatcctcgtccgatttcatatcctttgccaaccaatacatatagctaaactcaggcatatgttccacacatcctgaacaatgaaattctccagaagatgttacaatgtctagatttggacatttggtttcaaccgcgttaacatatgagtgaacacacccatacatgaaagcgatgagaaataggattctcatcttgccaaaatatcactagaaaaaatttatttatcagttttaaaggtataaaaaatacttattgttgctcgaatattttgtatttgatggtatacggaagattagaaatgtaggtattatcatcaactgattctatggttttatgtattctatcatgtttcactattgcgttggaaataatatcatatgcttccacatatattttattttgttttaactcataatactcacgtaattctggattattggcatatctatgaataattttagctccatgatcagtaaatattaatgagaacatagtattaccacctaccattatttttttcatctcattcaattcttaattgcaaagatctatataatcattatagcgttgacttatggactctggaatcttagacgatgtacagtcatctataatcatggcatatttaatacattgttttatagcatagtcgttatctacgatgttagatatttctctcaatgaatcaatcacacaatctaatgtaggtttatgacataatagcattttcagcagttcaatgtttttagattcgttgatggcaatggctatacatgtatatccgttatttgatctaatgttgacatctgaaccggattctagcagtaaagatactagagattgtttattatatctaacagccttgtgaagaagtgtttctcctcgtttgtcaatcatgttaatgtctttaagataaggtaggcaaatgtttatagtactaagaattgggcaagcataagacatgtcacaaagacccttttttgtatgtataagtgtaaaaattataacatccatagttggatttacataggtgtccaatcgggatctctccatcatcgagataattgatggcatctcccttccttttttagtagatatttcatcgtgtaagaatcaatattaatatttctaaagtatccgtgtatagcctctttatttaccacagctccatattccactagagggatatcgccgaatgtcatatactcaattagtatatgttggaggacatccgagttcattgttttcaatatcaaagagatggtttccttatcatttctccatagtggtacaatactacacattattccgtgcggctttccattttccaaaaacaatttgaccaaatctaaatctacatctttattgtatctataatcactatttagataatcagccataattcctcgagtgcaacatgttagatcgtctatatatgaataagcagtgttatctattcctttcattaacaatttaacgatgtctatatctatatgagatgacttaatataatattgaagagctgtacaatagtttttatctataaaagacggcttgattccgtgattaattagacatttaacaacttccggacgcacatatgctctcgtatccgactctgaatacagatgagagatgatatacagatgcaatacggtaccgcaatttcgtagttgataatcatcatacgcgtatcagtactcgtcctcataaagaacactgcagccattttctatgaacaaatcaataattttagaaacaggatcattgtcattacataattttctataactgaacgatggttttcacatttaacactcaagtcaaatccatgttctaccaacacctttatcaagtcaacgtctacatttttggatttcatatagctgaatatattaaagttatttatgttgctaaatccagtggcttctagtagagccatcgctatatccttattaactttaacatgtctactatttgtgtattcttctaatggggtaagctgtctccaatttttgcgtaatggattagtgccactgtctagtagtagtttgacgacctcgacattattacaatgctcattaaaaaggtatgcgtgtaaagcattattcttgaattggttcctggtatcattaggatctctgtctttcaacatctgtttaagttcatcaagagccacctcctcattttccaaatagtcaaacattttgactgaatgagctactgtgaactctatacacccacacaactaatgtcattaaatatcatgtcaaaaacttgtacaattattaataaaaataatttagtgtttaaattttaccagttccagattttacacctccgttaatacctccattaaccccactggacgatcctcctccccacattccaccgccaccagatgtataagttttagatcctttattactaccatcatgtccatggataaagacactccacatgccgccactaccccctttagaagacatattaataagacttaaggacaagtttaacaataaaattaatcacgagtaccctactaccaacctacactattatatgattatagtttctatttttacagtaccttgactaaagtttctagtcacaagagcaatactaccaacctacactattatatgattatagtttctatttttataggaacgcgtacgagaaaatcaaatgtctaatttctaacggtagtgttgataaacgattgttatccgcggatacctcctctatcatgtcgtctattttcttactttgttctattaacttattagcattatatattatttgattataaaacttatattgcttattagcccaatctgtaaatatcggattattaacatatcgtttctttgtaggtttatttaacatgtacatcactgtaagcatgtccttaccatttattttaatttgacgcatatccgcaatttctttttcgcagtcggttataaattctatatatgatggatacatgctacatgtgtacttataatcgactaatatgaagtacttgatacatattttcagtaacgatttattattaccacctatgaataagtacctgtgatcgtctaggtaatcaactgttttcttaatacattcgatggttggtaatttactcagaataatttccaatatcttaatatataattctgctatttctgggatatatttatctgccagtataacacaaatagtaatacatgtaaacccatattttgttattatattaatgtctgcgccattatctattaaccattctactaggctgacactatgcgactcaatacaatgataaagtatactacatccatgtttatctattttgtttatatcatcaatatacggcttacaaagttttagtatcgataacacatccaactcacgcatagagaaggtagggaataatggcataatatttattaggttatcatcattgtcattatctacaactaagtttccattttttaaaatatactcgacaactttaggatctctattgccaaatttttgaaaatatttatttatatgcttaaatctatataatgtagctccttcatcaatcatacatttaataacattgatgtatactgtatgataagatacatattctaacaatagatcttgtatagaatctgtatatcttttaagaattgtggatattaggatattattacataaactattacacaattctaaaatataaaacgtatcacggtcgaataatagttgatcaactatataattatcgattttgtgatttttcttcctaaactgtttacgtaaatagttagatagaatattcattagttcatgaccactatagttactatcgaataacgcgtcaaatatttcccgtttaatatcgcatttgtcaagataataatagagtgtggtatgttcacgataagtataataacgcatctctttttcgtgtgaaattaaatagtttattacgtccaaagatgtagcataaccatcttgtgacctagtaataatataataatagagaactgttttacccattctatcatcataatcagtggtgtagtcgtaatcgtaatcgtctaattcatcatcccaattataatattcaccagcacgtctaatctgttctattttgatcttgtatccatactgtatgttgctacatgtaggtattcctttatccaataatagtttaaacacatctacattgggatttgatgttgtagcgtatttttctacaatattaataccatttttgatactatttatttctatacctttcgaaattagtaatttcaataagtctatattgatgttatcagaacatagatattcgaatatatcaaaatcattgatatttttatagtcgactgacgacaataacaaaatcacaacatcgtttttgatattattatttttcttggtaacgtatgcctttaatggagtttcaccatcatactcatataatggatttgcaccactttctatcaatgattgtgcactgctggcatcgatgttaaatgttttacaactatcatagagtatcttatcgttaaccatgattggttgttgatgctatcgcattttttggtttctttcatttcagttatgtatggatttagcacgtttgggaagcatgagctcatatgatttcagtactgtagtgtcagtactattagtttcaataagatcaatctctagatctatagaatcaaaacacgataggtcagaagataatgaatatctgtaggcttcttgttgtactgtaacttctggttttgttagatggttgcatcgtgctttaacgtcaatggtacaaattttatcctcgctttgtgtatcatattcgtccctactataaaattgtatattcagattatcatgcgatgtgtatacgctaacggtatcaataaacggagcacaccatttagtcataaccgtaatccaaaaatttttaaagtatatcttaacgaaagaagttgtgtcattgtctacggtgtatggtactagatcctcataagtgtatatatctagagtaatgtttaatttattaaatggttgataatatggatcctcgtgacaatttccgaagatggaaataagacataaacacgcaataaatctaattgcggacatggttactccttaaaaaaatacgaataatcaccttggctatttagtaagtgtcatttaacactatactcatattaatccatggactcataatctctatacgggattaacggatgttctatatacggggatgagtagttctcttctttaactttatactttttactaatcatatttagactgatgtatgggtaatagtgtttgaagagctcgttctcatcatcagaataaatcaatatctctgtttttttgttatacagatgtattacagcctcatatattacgtaatagaacgtgtcatctaccttattaactttcaccgcatagttgtttgcaaatacggttaatcctttgacctcgtcgatttccgaccaatctgggcgtataatgaatctaaactttaattgcttgtaatcattcgaaataatttttagtttgcatccgtagttatcccctttatgtaactgtaaatttctcaacgcgatatctccattaataatgatgtcgaattcgtgctgtatacccatactgaatggatgaacgaataccgacggcgttaatagtaatttactttttcatctttacatattgggtactagttttactatcataagtttataaattccacaagctactatggaataagccaaccatcttagtataccacacatgtcttaaagtttattaattaattacatgttgttttatatatatcgctacgaatttaaagagaaattagtttaggaagaaaaattatctatctacatcatcacgtctctgtattctacgatagagtgctactttaagatgcgacagatccgtgtcatcaaatatatactccattaaaatgattattccggcagcgaacttgatattggatatatcacaacctttgttaatatctacgacaatagacagcagtcccatggttccataaacagtgagtttatctttctttgaagagatattttgtagagatcttataaaactgtcgaatgacatcgcatttatatctttagctaaatcgtatatgttaccatcgtaatatctaaccgcgtctatcttaaacgtttccatcgctttaaagacgtttccgatagatggtctcatttcatcagtcatactgagccaacaaatataatcgtgtataacatctttgatagaatcagactctaaagaaaacgaatcggctttattatacgcattcatgataaacttaatgaaaaatgtttttcgttgtttaagttggatgaatagtatgtcttaataattgttattatttcattaattaatatttagtaacgagtacactctataaaaacgagaatgacataactaatcataactagttatcaaagtgtctaggacgcgtaattttcatatggtatagatcctgtaagcattgtctgtattctggagctattttctctatcgcattagtgagttcagaatatgttataaatttaaatcgaataacgaacataactttagtaaagtcgtctatattaactcttttattttctagccatcgtaataccatgtttaagatagtatattctctagttactacgatctcatcgttgtctagaatatcacatactgaatctacatccaattttagaaattggtctgtgttacatatctcttctatattattgttgatgtattgtcgtagaaaactattacgtagaccattttctttataaaacgaatatatagtactccaattatctttaccgatatatttgcacacataatccattctctcaatcactacatctttaagattttcgttgttaagatatttggctaaactatataattctattagatcatcaacagaatcagtatatatttttctagatccaaagacgaactctttggcgtcctctataatattcccagaaaagatattttcgtgttttagtttatcgagatctgatctgttcatatacgccatgattgtacggtacgttatgataaccgcataaaataaaaatccattttcatttttaaccaatactattcataattgagattgatgtaatactttgttactttgaacgtaaagacagtacacggatccgtatctccaacaagcacgtagtaatcaaatttggtgttgttaaacttcgcaatattcatcaatttagatagaaacttatactcatcatctgttttaggaatccatgtattattaccactttccaacttatcattatcccaggctatgtttcgtccatcatcgttgcgcagagtgaataattcttttgtattcggtagttcaaatatatgatccatgcatagatcggcaaagctattgtagatgtgatttttcctaaatctaatataaaactcgtttactagcaaacactttcctgatttatcgaccaagacacatatggtttctaaatctatcaagtggtggggatccatagttatgacgcagtaacatatattattacattcttgactgtcgctaatatctaaatatttattgttatcgtattggattctgcatatagatggcttgtatgtcaaagatatagaacacataaccaatttatagtcgcgctttacattctcgaatctaaagttaagagatttagaaaacattatatcctcggatgatgttatcactgtttctggagtaggatatattaaagtctttacagatttcgtccgattcaaataaatcactaaataatatcccacattatcatctgttagagtagtatcattaaatctattatattttatgaaagatatatcactgctcacctctatatttcgtacatttttaaactgtttgtataatatctctctgatacaatcagatatatctattgtgtcggtagacgataccgttacatttgaattaatggtgttccattttacaacttttaacaagttgaccaattcatttctaatagtatcaaactctccatgattaaatattttaatagtatccattttatatcactacggacacaaagtagctgacataaaccattgtataatttttatgttttatgtttattagcgtacacattttggaagttccggcttccatgtatttcctggagagcaagtagatgatgaggaaccagatagtttatatccgtacttgcacttaaagtctacattgtcgttgtatgagtatgatcttttaaacccgctagacaagtatccgtttgatattgtaggatgtggacatttaacaatctgacacgtgggtggatcggaccattctcctcctgaacacaggacactagagttaccaatcaacgaatatccactattgcaactataagttacaacgctcccatcggtataaaaatcctcgtatccgttatgtcttccgttggatatagatggaggggattggcatttaacagattcacaaataggtgcctcgggattccataccatagatccagtagatcctaattcacaatacgatttagattcaccgatcaactgatatccgctattacaagagtacgttatactagagccaaagtctactccaccaatatcaagttggccattatcgatatctcgaggcgatgggcatctccgtttaatacattgattaaagagtgtccatccagtacctgtacatttagcatatataggtcccattttttgctttctgtatccaggtagacatagatattctatagtgtctcctatgttgtaattagcattagcatcagtctccacactattcttaaatttcatattaatgggtcgtgacggaatagtacagcatgatagaacgcatcctattcccaacaatgtcaggaacgtcacgctctccaccttcatatttatttatccgtaaaaatgttatcctggacatcgtacaaataataaaaagcccatatatgttcgctattgtagaaattgtttttcacagttgctcaaaaacgatggcagtgacttatgagttacgttacactttggagtctcatctttagtaaacatatcataatattcgatattacgagttgacatatcgaacaaattccaagtatttgattttggataatattcgtattttgcatctgctataattaagatataatcaccgcaagaacacacgaacatctttcctacatggttaaagtacatgtacaattctatccatttgtcttccttaactatatatttgtatagataattacgagtctcgtgagtaattccagtaattacatagatgtcgccgtcgtactctacagcataaactatactatgatgtctaggcatgggagacttttttatccaacgatttttagtgaaacattccacatcgtttaatactacatatttctcatacgtggtataaactccacccattacatatatatcatcgtttacgaataccgacgcgcctgaatatctaggagtaattaagtttggaagtcttatccatttcgaagtgccgtgtttcaaatattctgccacacccgttgaaatagaaaattctaatcctcctattacatataactttccatcgttaacacaagtactaacttctgattttaacgacgacatattagtaaccgttttccattttttcgttttaagatctacccgcgatacggaataaacatgtctattgttaatcatgccgccaataatgtatagacaattatgtaaaacatttgcattatagaattgtctatctgtattaccgactatcgtccaatattctgttctaggagagtaatgggttattgtggatatataatcagagtttttaatgactactatattatgttttataccatttcgtgtcactggctttgtagatttggatatagttaatcccaacaatgatatagcattgcgcatagtattagtcataaacttgggatgtaaaatgttgatgatatctacatcgtttggatttttatgtatccactttaataatatcatagctgtaacatcctcatgatttacgttaacgtcttcgtgggataagatagttgtcagttcatcctttgataattttccaaattctggatcggatgtcaccgcagtaatattgttgattatttctgacatcgacgcattatatagttttttaattccatatcttttagaaaagttaaacatccttatacaatttgtgaaattaatattatgaatcatagtttttacacatagatctactacaggcggaacatcaattattatggcagcaactagtatcatttctacattgtttatggtgatgtttatcttcttccagcgcatatagtctaatagcgattcaaacgcgtgatagtttataccattcaatataatcgcttcatcctttagatggtgatcctgaatgcgtttaaaaaaattatacggagacgccgtaataatttccttattcacttgtataatttccccattgatagaaaatattacgctttccattcttaaagtactataagtaattatagtataatgtaaacgtttatatattcaatatttttataaaaatcattttgacattaattcctttttaaatttccgtctatcatctatagaaacgtattctatgaatttataaaatgcttttacgtgtcctatcgtaggcgatagaaccgctaaaaagcctatcgaatttctacaaaagaatctgttatatggtatagggagagtataaaacattaaatgtccgtacttattaaagtattcagtagccaatcctaactctttcgaatacttattaatggctcttgttctgtacgaatctatttttttgaacaacggacctagtggtatatcttgttctatgtatctaaaataatgtctgactagatccgttagtttaatatccgcagtcatcttgtctagaatggcaaatctaactgcgggtttaggctttagtttagtttctatatctacatctatgtctttatctaacaccaaaaatataatagctaatattttattacaatcatccggatattcttctacgatctcactaactaatgtttctttggttatactagtatagtcactatcggacaaataaagaaaatcagatgatcgatgaataatacatttaaattcatcatctgtaagatttttgagatgtctcattagaatattattagggttagtactcattatcattcggcagctattacttattttattatttttcaccatatagatcaatcattagatcatcaaaatatgtttcaatcatcctaaagagtatggtgaatgactcttcccatctaatttctgaacgttcaccaatgtctctagccactttggcactaatagcgatcattcgcttagcgtcttctatattattaactggttgatttaatctatctagcaatggaccgtcggacagcgtcattctcatgttcttaatcaatgtacatacatcgccgtcatctaccaattcatccaacaacataagctttttaaaatcatcattataataggtttgatcgttgtcatttctccaaagaatatatctaataagtagagtcctcatgcttagttaacaactattttttatgttaaatcaattagtacaccgctatgtttaatacttattcatattttagtttttaggattgagaatcaatacaaaaattaatgcatcattaattttagaaatacttagtttccacgtagtcaatgaaacatttgaactcatcgtacaggacgttctcgtacaggacgtaactataaaccggtttatatttgttcaagatagatacaaatccgataactttttttacgaattctacgggatccactttaaaagtgtcataccgggttctttttatttttttaaacagatcaatggtgtgatgttgattaggtcttttacgaatttgatatagaatagcgtttacatattctccataatggtcaatcgccatttgttcgtatgtcataaattctttaattatatgacactgtgtattatttagttcatccttgttcattgttaggaatctatccaaaatggcaattatactagaactataggtgcgttgtatacacatattgatgtgtctgtttatacaatccatgatatttggatccatgctactaccttcgggtaaaattgtagcatcatataccatttctagtactttaggttcattattatccattgcagaggacgtcatgatcgaatcataaaaaaatatattatttttatgttattttgttaaaaataatcatcgaatacttcgtaagatactccttcatgaacataatcagttacaaaacgtttatatgaagtaaagtatctacgatttttacaaaagtccggatgcataagtacaaagtacgcgataaacggaataataatagatttatctagtctatctttttctatagctttcatagttagatacatggtctcagaagtaggattatgtaacatcagcttcgataaaatgactgggttatttagtcttacacattcgctcatacatgtatgaccgttaactacagagtctacactaaaatgattgaacaatagatagtctaccattgtttcgtattcagatagtacagcgtagtacatggcatcttcacaaattatatcattgtctaatagatatttgacgcatcttatggatcccacttcaacagccatcttaaaatcatattgctttcctttatcattaataatttctagaacatcatctctatcataaaagatacaaatattaactgtttgatccgtaataacattgctagtcaatagcaatttgttaataagatgcgctgggctcaatgtcttaataagaagtgtaagaggactatctccgaatttgttttgtttattaacatccgttgatggaagtaaaagatctataatgtctacattcttgactgttttagagcatacaatatggagaggtgtatttccatcatgatctggttttgagggactaattcctagtttcatcatccatgagattgtagaagcttttggattgtctgacataagatgtctatgaatatgatttttgccaaatttatccactatcctggcttcgaatccgatggacattatttttttaaacactctttctgaaggatctgtacacgccaacaacggaccacatccttcttcatcaaccgagttgttaatcttggctccatactgtaccaataaatttattctctctatgacttcatcatctgttcccgagagataatatagaggtgttttatgctgtttatcacacgcgtttggatctgcgccgtgcgtcagcagcatcgcgactattctattattattaattttagaagctatatgcaatggataatttccatcatcatccgtctcatttggagagtatcctctatgaagaagttcttcgacaaatcgttcatctagtcctttaattccacaatacgcatgtagaatgtgataattatttccagaaggttcgatagcttgtagcatattcctaaatacatctaaatttttactattatatttggcataaagagatagataatactcggccgacataatgttgtccattgtagtataaaaattaatatttctatttctatttctgtatatttgcaacaatttactctctataacaaatatcataacttagtttttttatgtcaagaaggcactggtttagttcatctataaatgtcacgccataactaccacgcatgccatactcagaattatgataaagatatttatccttggggtgtaggtaatggggattaatctttgttggatcagtctctaagttaacacatgtcacacatgatccatttatagttatatcacacgatgatgatttatgaattgattccggaagatcgctatcgtattttgtggttccacaattcatttccatacatgttattgtcacactaatattatgatgaactttatctagccgctgagtggtaaacaacagaacagatagtttattatctttaccaacaccctcagccgctgccacaaatctctgatccgtatccatgatggtcatgtttatttctagtccgtatccagtcaacactatgttagcatttctgtcgatatagctttcactcatatgacactcaccaataatagtagaattaatgtcgtaatttacaccaatagtgagttcggcggcaaagtaccaataccggtaatcttgtcgaggaggacatatagtattcttgtattctaccgaatacccgagagatgcgatacaaaagagcaagactaatttgtaaaccatcttactcaaaatatgtaacaatagtacgatgcaatgagtaagacaataggaaatctatcttatatacacataattattctatcaattttaccaattagttagtgtaatgttaacaaaaatgtgggagaatctaattagtttttctttacacaattgacgtacatgagtctgagttccttgtttttgctaattatttcatccaatttattattcttgacgatatcgagatcttttgtataggagtcaaacttgtattcaacatgcttttctataatcattttagctatttcggcatcatccaatagtacattttccagattagcagaatagatattaatgtcgtatttgaacagagcctgtaacatctcaatgtctttattatctatagccaatttaatgtccggaatgaagagaagggaattattggtgtttgtcgacgtcatatagtcgagcaagagaatcatcatatccacgtgtccattttttatagtgatgtgaatacaactaaggagaatagccagatcaaaagtagatggtatctctgaaagaaagtaggaaacaatacttacatcattaagcatgacggcatgataaaatgaagttttccatccagttttcccatagaacatcagtctccaatttttcttaacaaacagttttaccgtttgcatgttaccactatcaaccgcataatacaatgcggtgtttcccttgtcatcaaattgtgaatcatccagtccactgaatagcaaaatctttactattttggtatcttccaatgtggctgcctgatgtaatggaaattcattctctagaagatttttcaatgctccagcgttcaacaacgtacatactagacgcacgttattatcagctattgcataatacaaggcactatgtccatggacatccgccttaaatgtatctttactagagagaaagcttttcagctgcttagacttccaagtattaattcgtgacagatccatgtctgaaacgagacgctaattagtgtatattttttcattttttataattttgtcatattgcaccagaattaataatatctttaatagatctgattagtagatacatggctatcgcaaaacaacatatacacatttaataaaaataatatttattaagaaaattcagatttcacgtacccatcaatataaataaaataatgattccttacaccgtacccatattaaggagattccaccttacccataaacaatataaatccagtaatatcatgtctgatgatgaacacaaatggtgtattaaattccagtttttcaggagatgatctcgccgtagctaccataatagtagatgcctctgctacagttccttgttcgtcgacatctatctttgcattctgaaacattttataaatatataatgggtccctagtcatatgtttaaacgacgcattatctggattaaacatactaggagccatcatttcggctatcgacttaatatccctcttattttcgatagaaaatttagggagtttaagattgtacactttattccctaattgagacgaccaatagtctaattttgcagccgtgatagaatctgtgaaatgggtcatattatcacctattgccaggtacatactaatattagcatccttatacggaaggcgtaccatgtcatattctttgtcatcgattgtgattgtatttccttgcaatttagtaactacgttcatcatgggaaccgttttcgtaccgtacttattagtaaaactagcattgcgtgttttagtgatatcaaacggatattgccatatacctttaaaatatatagtattaatgattgcccatagagtattattgtcgagcatattagaatctactacattagacataccggatctacgttctactatagaattaattttattaaccgcatctcgtctaaagtttaatctatataggccgaatctatgatattgttgataatacgacggtttaatgcacacagtattatctacgaaactttgataagttagatcagtgtacgtatatttagatgttttcagcttagctaatcctgatattaattctgtaaatgctggacccagatctctttttctcaaatccatagtcttcaataattctattctagtattacctgatgcaggcaatagcgacataaacatagaaaacgaataaccaaacggtgagaagacaatattatcatcttgaatatttttatacgctactataccggcattggtaaatccttgtagacgataggcggacgctgaacacgctaacgatagtatcaataacgcaatcatgattttatggtattaataattaaccttatttttatgttcggtataaaaaaattattgatgtctacacatccttttgtaattgacatctatatatccttttgtataatcaactctaatcactttaacttttacagttttccctaccagtttatccctatattcaacatatctatccatatgcatcttaacactctctgccaagatagcttcagagtgaggatagtcaaaaagataaatatatagagcataatcattctcgtatactctgccctttattacatcacccgcattgggcaacgaataacaaaatgcaagcatcttgttaacgggctcgtaaattgggataaaaattatgtttttattgtcttatatctattttattcaagagaatattcaggaatttctttttccggttgtatctcgtcgcagtatatatcatttgtacattgtttcatattttttaatagtttacaccttttagtaggactagtatcgtacaattcatagctgtattttgaattccaatcacgcataaaaatatcttccaattgttgacgaagacctaatccatcatccggtgtaatattaatagatgctccacatgtatccgtaaagtaatttcctgtccaatttgaggtacctatataggccgttttatcggttaccatatatttggcatggtttaccctagaatacggaatgggaggatcagcatctggtacaataaatagctttacttctatatttatgtttttagattttagcatagcgatagatcttaaaaagtttctcatgataaacgaagatcgttgccagcaactaatcaatagcttaacggatacttgtctgtctatagcggatcttcttaattcatcttctatataaggccaaaacaaaattttacccgccttcgaataaataatagggataaagttcataacagatacataaacgaatttactcgcatttctaatacatgacaataaagcggttaaatcattggttctttccatagtacatagttgttgcggtgcagaagcaataaatacagagtgtggaacgccgcttacgttaatactaagaggatgatctgtattataatacgacggataaaagtttttccaattatatggtagattgttaactccaagataccagtatacctcaaaaatttgagtgagatccgctgccaagttcctattattgaagatcgcaatacccaattccttgacctgagttagtgatctccaatccatgttagcgcttcctaaataaatatgtgtattatcagatatccaaaattttgtatgaagaactcctcctaggatatttgtaatatctatgtatcgtacttcaactccggccatttgtagtctttcaacatcctttaatggtttgttagatttattaacggctactctaactcgtactcctcttttgggtaattgtacaatctcgtttaatattatcgtgccgaaattcgtacccacttcatccgataaactccaataaaaagatgatatatctagtgtttttgtggtattggatagaatttccctccacatgttaaatgtagacaaatatactttatcaaattgcatacctataggaatagtttctgtaatcactgcgattgtattatccggattcattttatttgttaaaagaataatcctatatcacttcactctattaaaaatccaagtttctatttctttcatgactgattttttaacttcatccgtttccttatgaagatgatgtttggcaccttcataaatttttatttctctattacaatttgcatgttgcatgaaataatatgcacctaaaacatcgctaatcttattgtttgttccctggagtatgagagtcggggggtgttaatcttggaaattatttttctaaccttgttggtagccttcaagacctgactagcaaatccagccttaattttttcatgattgactaatgggtcgtattggtatttataaactttatccatatctctagatactgattctggacatagctttccgactggcgcatttggtgtgatggttcccataagtttggcagctagcagattcagtcttgaaacagcatctgcattaactagaggagacattagaatcattgctgtaaacaagtttggattatcgtaagaggctagctcccatggaatgacccaataagtagatttaatagttaccacgtgctgtaccaaagtcatcaatcatcattttttcaccattacttcttccatgtccaatatgatcatgtgagaatactaaaattcctaacgatgatatgttttcagctagttcgtcataacgtccagaatgtttaccagctccatgacttatgaatactaatgccttaggatatgtaataggtttccaatatttacaatatatgtaatcattgtccagattgaacatacagtttgcactcatgattcacgttatataactatcaatattaacagttcgtttgatgatcatattatttttatgttttattgataattgtaaaaacatacaattaaatcaatatagaggaaggagacggctactgtcttttgtaagatagtcatggcgactaaattagattatgaggatgctgttttttactttgtggatgatgataaaatatgtagtcgcgactccatcatcgatctaatagatgaatatattacgtggagaaatcatgttatagtgtttaacaaagatattaccagttgtggaagactgtacaaggaattgatgaagttcgatgatgtcgctatacggtactatggtattgataaaattaatgagattgtcgaagctatgagcgaaggagaccactacatcaattttacaaaagtccatgatcaggaaagtttattcgctaccataggaatatgtgctaaaatcactgaacattggggatacaaaaagatttcagaatctagattccaatcattgggaaacattacagatttgatgaccgacgataatataaacatcttgatactttttctagaaaaaaaattgaattgatgatataggggtcttcataacgcataattattacgttagcattctatatccgtgttaaaaaaaattatcctatcatgtatttgagagttttatatgtagcaaacatgatagctgtgatgccaataagctttagatattcacgcgtgctagtgttagggatggtattatctggtggtgaaatgtccgttatataatctacaaaacaatcatcgcatatagtatgcgatagtagagtaaacatttttatagtttttactggattcatacatcgtctacccaattcggttataaatgaaattgtcgccaatcttacacccaaccccttgttatccattagcatagtattaacttcgttatttatgtcataaactgtaaatgattttgtagatgccatatcatacatgatattcatgtccctattataatcattactaactttatcacaatatatgttgataatatctatatatgatctagtctttgtgggcaactgtctatacaagtcgtctaaacgttgtttactcatatagtatcgaacagccatcattacatggtcccgttccgttgatagataatcgagtatgttagtggacttgtcaaatctatataccatattttctggaagtggatatacatagtcgtgatcaacattattgctagcctcatcttctatatcctgtactataccattatctatatcatctacataatctatgatattattacacataaacatcgacaacatactattgtttattatctaagtcctgttgatccaaacccttgatctcctctatttgtactatctagagattgtacttcttccagttctggataatatatacgttgatagattagctgagctattctatctccagtatttacattaaacgtacattttccattattaataagaatgactcctatgtttcccctataatcttcgtctattacaccacctcctatatcaatgccttttagtgacagaccagacctaggagctattctaccatagcagaacttaggcatggacatactaatatctgtcttaattaactgtctttctcctggagggatagtataatcgtaagcgctatacaaatcatatccggcagcacccggcgattgcctagtaggagatttagctctgttagtttccttaacaaatctaactggtgagttaatattcatgttgaacataaaactaatattttatttcaaaattatttaccatcccatatattccatgaataagtgtgatgattgtacacttctatagtatctatatacgatccacgataaaatcctcctatcaatagcagtttattatccactatgatcaattctggattatccctcggataaataggatcatctatcagagtccatgtattgctggattcacaataaaattccgcatttctaccaaccaagaataaccttctaccgaacactaacgcgcatgatttataatgaggataataagtggatggtccaaactgccactgatcatgattgggtagcaaatattctgtagttgtatcagtttcagaatgtcctcccattacgtatataacattgtttatggatgccactgctggattacatctaggtttcagaagactcggcatattaacccaagcagcatccccgtggaaccaacgctcaacagatgtgggatttggtagacctcctactacgtataatttattgttagcgggtatcccgctagcatacagtctggggctattcatcggaggaattggaatccaattgtttgatatataatttacagctatagcattgttatgtatttcattgttcatccatccaccgatgagatatactacttctccaacatgagtacttgtacacatatggaatatatctataatttgatccatgttcataggatactctatgaatggatacttgtatgatttgcgtggttgtttatcacaatgaaatattttggtacagtctagtatccattttacattatttatacctctgggagaaagataatttgacctgattacatttttgataaggagtagcagatttcctaatttatttcttcgcctcatataccacttaatgacaaaatcaactacataatcctcatctggaacatttagttcatcgctttctagaataagtttcatagatagataatcaaaattgtctatgatgtcatcttccagttccaaaaagtgtttggcaataaagtttttagtatgacataagagattggatagtccgtattctatacccatcatgtaacactcgacacaatattcctttctaaaatctcgtaagataaagtttatacaagtgtagatgataaattctacagaggttaatatagaagcacgtaataaattgacgacgttatgactatctatatatacctttccagtatatgagtaaataactatagaagttaaactgtgaatgtcaaggtctagacaaacccttgtaactggatctttatttttcgtgtatttttgacgtaaatgtgtgcgaaagtaaggagataactttttcaatatcgtagaattgactattatattgcctcctatggcatcaataattgttttgaatttcttagtcatagacaatgctaatatattcttacagtacacagtattgacaaatatcggcatttatgtttctttaaaagtcaacatctagagaaaaatgattatctttttgagacataactcccattttttggtattcacccacacgtttttcgaaaaaattagtttttccttccaatgatatattttccatgaaatcaaacggattggtaacattataaatttttttaaatcccaattcagaaatcaatctatccgcgacgaattctatatatgttttcatcatttcacaattcattcctataagtttaactggaagagccgcagtaagaaattcttgttcaatggatactgcatctgttataatagatctaacggtttcttcactcggtggatgcaataaatgtttaaacatcaaacatgcgaaatcgcagtgcagaccctcgtctctactaattagttcgttggaaaacgtgagtccgggcattaggccacgctttttaagccaaaatatggaagcgaatgatccagaaaagaaaattccttctactgcagcaaaggcaataagtctctctccataaccggcgctgtcatgtatccacttttgagcccaatcggccttcttttttacacaaggcatcgtttctatggcattaaagagatagtttttttcattactatctttaacataagtatcgatcaaaagactatacatttccgaatgaatgttttcaatggccatctgaaatccgtagaaacatctagcctcggtaatctgtacttctgtacaaaatcgttccgccaaattttcattcactattccgtcactggctgcaaaaaacgccaatacatgttttataaaatatttttcgtctggtgttagtttattccaatcattgatatctttagatatatctacttcttccactgtccaaaatgatgcctctgcctttttatacatgttccagatgtcatgatattggattgggaaaataacaaatctatttggatttggtgcaaggatgggttccataactaaattaacaataacaataaattttttttcagttatctatatgcctgtacttggattttttgtacatcgatatcgccgcaatcactacaataattacaagtattattgatagcattgttattagtactatcataattaaattatctacattcatgggtgctgaataatcgttattatcatcattatcattttgtaattgtgacatcatactagataaatcgtttgcgagattgttgtgggaagcgggcatggaggatgcattatcattattatttaacgccttccatttggattcacaaatgttacgcacattcaacattttatggaaactataattttgtgaaaacaaataacaagaaaactcgtcatcgttcaaatttttaacgatagtaaaccgattaaacgtcgagctaatttctaacgctagcgactctgttggatatgggtttccagatatatatcttttcagttcccctacgtatctataatcatctgtaggaaatggaagatatttccatttatctactgttcctaatatcatatgtggtggtgtagtagaaccattaagcgcgaaagatgttatttcgcatcgtattttaacttcgcaataatttctggttagataacgcactctaccagtcaagtcaatgatattagcctttacagatatattcatagtagtcgtaacgatgactccatcttttagatgcgatactcctttgtatgtaccagaatcttcgtacctcaaactcgatatatttaaacaagttaatgagatattaacgcgttttatgaatgatgatatataaccagaagttttatcctcggtggctagcgctataaccttatcattataataccaactagtgtgattaatatgtgacacgtcagtgtgggtacaaatatgtacattatcgtctacgtcgtattcgatacatccgcatacagccaacaaatataaaatgacaaatactctaacgccgttcgtacccatcttgatgcggtttaataaatgttttgatttcaatttattgtaaaaaaagattcggttttatactgttcgatattctcattgcttatattttcatctatcatctccacacagtcaaatccgtggttagcatgcacctcatcaaccggtaaaagactatcggactcttctatcattataactctagaatatttaatttggtcattattaatcaagtcaattatcttatttttaacaaacgtgagtattttactcattttttataaaaacttttagaaatatacagactctatcgtgtgtctatatcttctttttatatccaatgtatttatgtctgatttttcttcatttatcatatataatggtccaaattctacacgtgcttcggattcatccagatcattaaggttcttataattgtaacatccttctcttccctcttctacatcttccttcttattcttattcttagcgtcacagaatctaccacagcaggatcccatgacgagcgtcatattaaactaatccattttcaattataatatatgattagtaatgaccattaaaataaaaaatattcttcataaccggcaagaaagtgaaaagttcacattgaaactatgtcagtagtatacatcatgaaatgatgatatatatatactctattttggtggaggattatatgatataattcgtggataatcatttttaagacacatttctttattcgtaaatcttttcacgttaaatgagtgtccatattttgcaatttcttcatatgatggcggtgtacgtggacgaggctgctcctgttcttgttgtggtcgccgactgtcgtgtctgcgtttagatccctccattatcgcgattgcgtagatggagtactattttataccttgtaattaaatttttttattaattaaacgtataaaaacgttccgtatctgtatttaagagccagatttcgtctaatagaacaaatagctacagtaaaaataactagaataattgctacacccactagaaaccacggatcgtaatacggcaatcggttttcgataataggtggaacgtatattttatttaaggacttaacaattgtctgtaaaccacaatttgcttccgcggatcctgtattaactatctgtaaaagcatatgttgaccgggcggagccgaacattctccgatatctaatttctgtatatctataatattattaacctccgcatacgcattacagttcttttctagcttggataccgcactaggtacatcgtctagatctattcctatttcctcagcgatagctcttctatccttttccggaagcaatgaaatcacttcaataaatgattcaaccatgagtgtgaaactaagtcgagaattactcatgcatttgttagttattcggagcgcgcaatttttaaactgtcctataacctctcctatatgaatagcacaagtgacattagtagggatagaatgttgagctaatttttgtaaataactatctataaaaagattatacaaagttttaaactctttagtttccgccatttatccagtctgagaaaatgtctctcataataaatttttccaagaaactaattgggtgaagaatggaaacctttaatctatatttatcacagtctgttttggtacacatgatgaattcttccaatgccgtactaaattcgatatctttttcgatttctggatatgtttttaataaagtatgaacaaagaaatggaaatcgtaataccagttatgtttaactttgaaattgttttttattttcttgttaatgattccagccacttgggaaaagtcaaagtcgtttaatgccgatttaatacgttcattaaaaacaaactttttatcctttagatgaattattattggttcattggaatcaaaaagtaagatattatcgggtttaagatctgcgtgtaaaaagttgtcgcaacagggtagttcgtagattttaatgtataacagagccatctgtaaaaagataaactttatgtattgtaccaaagatttaaatcctaatttgatagctaactcggtatctactttatctgccgaatacagtgctaggggaaaaattataatgtttcctctttcatattcgtagttagttctcttttcatgttcgaaaaagtgaaacatgcggttaaaatagtttataacattaatattactgttaataactgccggataaaagtgggatagtaatttcacgaatttgatactgtcctttctctcgttaaacgcctttaaaaaaactttagaagaatatctcaatgagagttcctgaccatccatagtttgtatcaataatagcaacatatgaagaacacgtttatacagagtatgtaaaaatgttaatttatagtttaatcccatggcccacgcacacacgattaattttttttcatctccctttagattgttgtatagaaatttgggtactgtgaactccgccgtagtttccatgggactatataattttgtggcctcgaatacaaattttactacatagttatctatcttaaagactataccatatcctcctgtagatatgtgataaaaatcgtcgtttataggataaaatcgtttatccttttgttggaaaaaggatgaattaatgtaatcattctcttctatctttagtagtgtttccttattaaaattcttaaaataatttaacaatctaactgacggagcccaattttggtgtaaatctaattgggacattatattgttaaaatacaaacagtctcctaatataacagtatctgataatctatggggagacatccattgatattcaggggatgaatcattggcaacacccatttattgtacaaaaagccccaatttacaaacgaaagtccaggtttgatagagacaaacaattaactattttgtctctgtttttaacacctccacagtttttaatttctttagtaatgaaattattcacaatatcagtatcttctttatctaccagagattttactaacttgataaccttggctgtctcattcaatagggtagtaatatttgtatgtgtgatattgatatctttttgaattgtttcttttagaagtgattctttgatggtgccagcatacgaattacaataatgcagaaactcggttaacatgcaggaattatagtaagccaattccaattgttgcctgtgttgtattagagtgtcaatatgagcaatggtgtccttgcgtttctctgatagaatgcgagcagcgattttggcgttatcatttgacgatatttctggaatgacgaatcctgtttctactaactttttggtaggacaaagtgaaacaatcaagaagatagcttctcctcctatttgtggaagaaattgaactcctctagatgatctactgacgatagtatctccttgacagatattggaccgaattacagaagtacctggaatgtaaagccctgaaaccccctcattttttaagcagattgttgccgtaaatcctgcactatgcccaagatagagagctcctttggtgaatccatctctatgtttcagtttaaccaagaaacagtcagctggtctaaaatttccatctctatctaatacagcatctaacttgatgtcaggaactatgaccggtttaatgttatatgtaacattgagtaaatccttaagttcataatcatcactgtcatcagttatgtacgatccaaacaatgtttctaccggcatagtggatacgaagatgctatccatcagaatgtttccctgattagtattttctatatagctattcttctttaaacgattttccaaatcagtaactatgttcatttttttaggagtaggacgcctagccagtatggaagaggattttctagatcctctcttcaacatctttgatctcgatggaatgcaaaaccccatagtgaaacaaccaacgataaaaataatattgtttttcactttttataattttaccatctgactcatggattcattaatatctttataagagctactaacgtataattctttataactgaactgagatatatacaccggatctatggtttccataattgagtaaatgaatgctcggcaataactaatggcaaatgtatagaacaacgaaattatactagagttgttaaagttaatattttctatgagctgttccaataaattatttgttgtgactgcgttcaagtcataaatcatcttgatactatccagtaaaccgtttttaagttctggaatattatcatcccattgtaaagcccctaattcgactatcgaatatcctgctctgatagcagtttcaatatcgacggacgtcaatactgtaataaaggtggtagtattgtcatcatcgtgataaactacgggaatatggtcgttagtaggtacggtaactttacacaacgcgatatataactttccttttgtaccatttttaacgtagttgggacgtcctgcagggtattgttttgaagaaatgatatcgagaacagatttgatacgatatttgttggattcctgattattcactataatataatctagacagatagatgattcgataaatagagaaggtatatcgttggtaggataatacatccccattccagtattctcggatactctattgatgacactagttaagaacatgtcttctattctagaaaacgaaaacatcctacatggactcattaaaacttctaacgctcctgattgtgtctcgaatgcctcgtacaaggatttcaaggatgccatagattctttgaccaacgatttagaattgcgtttagcatctgatttttttattaaatcgaatggtcggctctctggtttgctaccccaatgataacaatagtcttgtaaagataaaccgcaagaaaatttatacgcatccatccaaataaccctagcaccatcggatgatattaatgtattattatagattttccatccacaattattgggccagtatactgttagcaacggtatatcgaatagattactcatgtaacctactagaatgatagttcgtgtactagtcataatatctttaatccaatctaaaaaatttaaaattagattttttacactgttaaagttaacaaaagtattacccgggtacgtggatatcatatatggcattggtccattatcagtaatagctccataaactgatacggcgatggtttttatatgtgtttgatctaacgaggaagaaattcgcgcccacaattcatctctagatatgtatttaatatcaaacggtaacacatcaatttcgggacgcgtatatgtttctaaatttttaatccaaatataatgatgacctatatgccctattatcatactgtcaactatagtacacctagggaacttacgatacatctgtttcctataatcgttaaattttacaaatctataacatgctaaaccttttgacgacagccattcattaatttctgatatggaatctgtattctcgataccgtatcgttctaaagccagtgctatatctccctgttcgtgggaacgctttcgtataatatcgatcaacggataatctgaagtttttggagaataatatgactcatgatctatttcgtccataaacaatctagacataggaattggaggcgatgatcttaattttgtgcaatgagtcgtcaatcctataacttctaatcttgtaatattcatcatcgacataatactatctatgttatcatcgtatattagtataccatgaccttcttcatttcgtgccaaaatgatatacagtcttaaatagttacgcaatatctcaatagtttcataattgttagctgttttcatcaaggtttgtatcctgtttaacatgatggcgttctataacgtctctattttctatttttaattttttaaatttttaacgatttactgtggctagatacccaatctctctcaaatatttttttagcctcgcttacaagctgtttatctatactattaaaactgacgaatccgtgattttggtaatgggttccgtcgaaatttgccgaagtgatatgaacatattcgtcgtcgactatcaacaattttgtattattctgaatagtgaaaaccttcacagatagatcattttgaacacacaacgcatctagacttttggcggttgccatagaatatacgtcgttcttatcccaattaccaactagaagtctgatcttaactcctctattaatggctgcttctataatggagttgtaaatgtcgggccaatagtagctattaccgtcgacacgtgtagtgggaactatggccaaatgttcaatatctatactagtcttagctgacctgagtttatcaataactacatcggtatctagatctctagaatatcccaataggtgttccggagaatcagtaaagaacactccacctataggattcttaatatgatacgcagtgctaactggcaaacaacaagccgcagagcataaattcaaccatgaattttttgcgctattaaaggctttaaaagtatcaaatcttctacgaagatctgtggccagcgggggataatcagaatatacacctaacgttttaatcgtatgtatagatcctccagtaaatgacgcgtttcctacataacatctttcatcatctgacacccaaaaacaaccgagtagtagtcccacattattttttttatctatattaacggttataaaatttatatccgggcagtgactttgtagctctcccagatttcttttccctcgttcatctagcaaaactattattttaatccctttttcagatgcctcttttagtttatcaaaaataagcgctcccctagtcgtactcagaggattacaacaaaaagatgctatgtatatatatttcttagctagagtgataatttcgttaaaacattcaaatgttgttaaatgatcggatctaaaatccatattttctggtagtgtttctaccagcctacattttgctcccgcaggtaccgatgcaaatggccacatttagttaacataaaaacttatacatcctgttctatcaacgattctagaatatcatcggctatatcgctaaaattttcatcaaagtcgacatcacaacctaactcagtcaatatattaagaagttccatgatgtcatcttcgtctatttctatatccgtatccattgtagattgttgaccgattatcgagtttaaatcattactaatactcaatccttcagaatacaatctgtgtttcattgtaaatttataggcggtgtatttaagttggtagattttcaattatgtattaatatagcaacagtagttcttgctcctccttgattctagcatcctcttcattattttcttctacgtacataaacatgtccaatacgttagacaacacaccgacgatggcggccgcagatctcgagttatgatctacttccttaccgtgcaataaattagaatatattttctacttttacgagaaattaattattgtatttattatttatgggtgaaaaacttactataaaaagcgggtgggtttggaattagtgaaagcttaaaaattgaaattttattttttttttttggaatataaataagctcgaagtcgacagatctaggcctggtaccaggaggaggaattcagcttaaagatgacttcgaaagtttatgatccagaacaaaggaaacggatgataactggtccgcagtggtgggccagatgtaaacaaatgaatgttcttgattcatttattaattattatgattcagaaaaacatgcagaaaatgctgttatttttttacatggtaacgcggcctcttcttatttatggcgacatgttgtgccacatattgagccagtagcgcggtgtattataccagatcttattggtatgggcaaatcaggcaaatctggtaatggttcttataggttacttgatcattacaaatatcttactgcatggtttgaacttcttaatttaccaaagaagatcatttttgtcggccatgattggggtgcttgtttggcatttcattatagctatgagcatcaagataagatcaaagcaatagttcacgctgaaagtgtagtagatgtgattgaatcatgggatgaatggcctgatattgaagaagatattgcgttgatcaaatctgaagaaggagaaaaaatggttttggagaataacttcttcgtggaaaccatgttgccatcaaaaatcatgagaaagttagaaccagaagaatttgcagcatatcttgaaccattcaaagagaaaggtgaagttcgtcgtccaacattatcatggcctcgtgaaatcccgttagtaaaaggtggtaaacctgacgttgtacaaattgttaggaattataatgcttatctacgtgcaagtgatgatttaccaaaaatgtttattgaatcggatccaggattcttttccaatgctattgttgaaggcgccaagaagtttcctaatactgaatttgtcaaagtaaaaggtcttcatttttcgcaagaagatgcacctgatgaaatgggaaaatatatcaaatcgttcgttgagcgagttctcaaaaatgaacaagcggccgccgccaccatgagcaagggcgaggaactgttcactggcgtggtcccaattctcgtggaactggatggcgatgtgaatgggcacaaattttctgtcagcggagagggtgaaggtgatgccacatacggaaagctcaccctgaaattcatctgcaccactggaaagctccctgtgccatggccaacactggtcactaccttcacctatggcgtgcagtgcttttccagatacccagaccatatgaagcagcatgactttttcaagagcgccatgcccgagggctatgtgcaggagagaaccatctttttcaaagatgacgggaactacaagacccgcgctgaagtcaagttcgaaggtgacaccctggtgaatagaatcgagctgaagggcattgactttaaggaggatggaaacattctcggccacaagctggaatacaactataactcccacaatgtgtacatcatggccgacaagcaaaagaatggcatcaaggtcaacttcaagatcagacacaacattgaggatggatccgtgcagctggccgaccattatcaacagaacactccaatcggcgacggccctgtgctcctcccagacaaccattacctgtccacccagtctgccctgtctaaagatcccaacgaaaagagagaccacatggtcctgctggagtttgtgaccgctgctgggatcacacatggcatggacgagctgtacaagtgagcggccgccctgctagcaagcttgctagcggccgctcgagatctgcggccgctacagacacgaatatgactaaaccgatgaccatttaaaaacccctctctagctttcacttaaactgtatcgatcattcttttagcacatgtataatataaaaacattattctatttcgaatttaggcttccaaaaatttttcatccgtaaaccgataataatatatatagacttgttaatagtcggaataaatagattaatgcttaaactatcatcatctccacgattagagatacaatatttacattctttttgctgtttcgaaactttatcaatacacgttaatacaaacccaggaaggagatattgaaactgaggctgttgaaaatgaaacggtgaatacaataattcagataatgtaaaatcatgattccgtattctgatgatattagaactgctaatggatgtcgatggtatgtatctaggagtatctattttaacaaagcatcgatttgctaatatacaattatccttttgattaattgttattttattcatattcttaaaaggtttcatatttatcaattcttctacattaaaaatttccatttttaatttatgtagccccgcaatactcctcattacgtttcattttttgtctataatatccattttgttcatctcggtacatagattatccaattgagaagcgcatttagtagttttgtacattttaagtttattgacgaatcgtcgaaaactagttatagttaacattttattatttgataccctgatattaatacccctgccgttactattatttataactgatgtaatccacgtaacattggaattaactatcgatagtaatgcatcgacgcttccaaaattgtctattataaactcaccgataatttttttattgcatgttttcatattcattaggattatcaaatctttaatcttattacgattgtatgcgttgatattacaagacgtcattctaaaagacggaggatctccatcaaatgccagacaatcacgtacaaagtacatggaaataggttttgttctattgcgcatcatagatttatatagaacacccgtagaaatactaatttgttttactctataaaatactaatgcatctatttcatcgttttgtataacgtctttccaagtgtcaaattccaaatttttttcattgatagtaccaaattcttctatctctttaactacttgcatagataggtaattacagtgatgcctacatgccgttttttgaaactgaatagatgcgtctagaagcgatgctacgctagtcacaatcaccactttcatatttagaatatatatatgtaaaaatatagtagaatttcattttgtttttttctatgctataaatgaattctcattttgcatctgctcatactccgttttatattaataccaaagaaggaagatatctggttctaaaagccgttaaagtatgcgatgttagaactgtagaatgcgaaggaagtaaagcttcctgcgtactcaaagtagataaaccctcatcgcccgcgtgtgagagaagaccttcgtccccgtccagatgcgagagaatgaataaccctggaaaacaagttccgtttatgaggacggacatgctacaaaatatgttcgcggctaatcgcgataatgtagcttctagacttttgtcctaaaatactattatatccttttcgatattaataaatccgtgtcgtccaggttttttatctctttcagtatgtgaatagataggtattttatctctattcatcatcgaatttaagagatccgataaacattgtttgtattctccagatgtcagcatctgatacaacaatatatgtgcacataaacctctggcacttatttcatgtaccttccccttatcactaaggagaatagtatttgagaaatatgtatacatgatattatcatgaattagatatacagaatttgtaacactctcgaaatcacacgatgtgtcggcgttaagatctaatatatcactcgataacacattttcatctagatacactagacattttttaaagctaaaatagtctttagtagtaacagtaactatgcgattattttcatcgatgatacatttcatcggcatattattacgcttaccatcaaagactataccatgtgtatatctaacgtattctagcatggttgccatacgcgcattaaacttttcaggatctttggatagatcttccaatctatctatttgagaaaacatttttatcatgttcaatagttgaaacgtcggatccactatatagatattatctataaagattttaggaactacgttcatggtatcctggcgaatattaaaactatcaatgatatgattatcgttttcatcttttatcaccatatagtttctaagatatgggattttacttaatataatattatttcccgtgataaattttattagaaaggccaaatctataagaaaagtcctagaattagtctgaagaatatctatatcgccgtatagtatatttggattaattagatatagagaatatgatccgtaacatatacaacttttattatggcgtctaagatattcttccatcaacttattaacatttttgactagggaagatacattatgacgtcccattacttttgccttgtctattactgcgacgttcatagaatttagcatatctcttgccaattcttccattgatgttacattataagaaattttagatgaaattacatttggagctttaatagtaagaactcctaatatgtccgtgtatgtggtcactaatacagattgtagttctataatcgtaaataatttacctatattatatgtttgagtctgtttagaaaagtagctaagtatacgatcttttatttctgatgcagatgtattaacatcggaaaaaaatctttttttattcttttttactaaagatacaaatatgtctttgttaaaaacagttattttctgaatatttctagcttgtaattttaacatatgatattcgttcacactaggtactctgcctaaataggtttctataatctttaatgtaatattaggaaaagtattctgatcaggattcctattcattttgaggatttaaaactctgattattgtctaatatggtctctacgcaaactttttcacagagcgatagagtttttgataactcgtttttcttaagaaatataaaactactgtctccagagctcgctctatcttttattttatctaattcgatacaaactcctgatactggttcagaaagtaattcattaattttcagtcctttatagaagatatttaatatagataatacaaaatcttcagtttttgatatcgatctgattgatcctagaactagatatattaataacgtgctcattaggcagtttatggcagcttgataattagatatagtatattccagttcatatttattagataccgcattgcccagattttgatattctatgaattcctctgaaaataaatccaaaataactagacattctattttttgtggattagtgtactctcttccctctatcatgttcactactggtgtccacgatgataaatatctagagggaatataatatagtccataggatgccaatctagcaatgtcgaataactgtaattttattcttcgctcttcattatgaattgattcttgaggtataaacctaacacaaattatattattagacttttcgtatgtaatgtctttcatgttataagtttttaatcctggaatagaatctattttaatgaggcttttaaacgcagagttctccaacgagtcaaagcataatactctgttgtttttcttatatacgatgttacgattttcttctttgaatggaataggtttttgaattagtttataattacaacataatagataaggaagtgtgcaaatagtacgcggaaaaaacataatagctcccctgttttcatccatggttttaagtaaatgatcactggcttctttagtcaatggatattcgaacattaaccgtttcatcatcattggacagaatccatatttcttaatgtaaagagtgatcaaatcattgtgtttattgtaccatcttgttgtaaatgtgtattcggttatcggatctgctcctttttctattaaagtatcgatgtcaatctcgtctaagaattcaactatatcgacatatttcatttgtatacacataaccattactaacgtagaatgtataggaagagatgtaacgggaacagggtttgttgattcgcaaactattctaatacataattcttctgttaatacgtcttgcacgtaatctattatagatgccaagatatctatataattattttgtaagatgatgttaactatgtgatctatataagtagtgtaataattcatgtattttgatatatgttccaactctgtctttgtgatgtctagtttcgtaatatctatagcatcctcaaaaaatatattcgcatatattcccaagtcttcagttctatcttctaaaaaatcttcaacgtatggaatataataatctattttacctcttctgatatcattaatgatatagtttttgacactatcttctgtcaattgattcttattcactatatctaagaaacggatagcgtccctaggacgaactactgccattaatatctctattatagcttctggacataattcatctattataccagaattaatgggaactattccgtatctatctaacatagttttaagaaagtcagaatctaagacttgatgttcatatattggttcatacatgaaatgatctctattgatgatagtgactatttcattctctgaaaattggtaactcattctatatatgctttccttgttgatgaaggatagaatatactcaatagaatttgtaccaacaaactgttctcttatgaatcgtatatcatcatctgaaataatcatgtaaggcatacatttaacaattagagacttgtctcctgttatcaatatactattcttgtgataatttatgtgtgaggcaaatttgtccacgttctttaattttgttatagtagatatcaaatccaatggagctacagttcttggcttaaacagatatagtttttctggaacaaattctacaacattattataaaggactttgggtagataagtgggatgaaatcctattttaattaatgcgatagccttgtcctcgtgcagatatccaaacgcttttgtgatagtatggcattcattgtctagaaacgctctacgaatatctgtgacagatatcatctttagagaatatactagtcgcgttaatagtactacaatttgtattttttaatctatctcaataaaaaaattaatatgtatgattcaatgtataactaaactactaactgttattgataactagaatcagaatctaatgatgacgtaaccaagaagtttatctactgccaatttagctgcattatttttagcatctcgtttagattttccatcggccttatcgaatactcttccgtcgatgtctacacaggcataaaatgtaggagagttactaggcccaactgattcaatacgaaaagaccaatctctcctagtaatttggcagtactcattaataacggtgacagggttagcatctttccaatcaataatttttttagccggaataacatcatcaaaagacttatgatcctctctcattgatttttcgcgggatacatcatctattatgacgtcagccatagcatcagcatccggcttatccgcctccgttgtcataaaccaacgaggaggaatatcgtcggagctgtacaccatagcactacgttgaagatcgtacagagctttattaacttctcgcttctccatattaagttgtctagttagttgtgcagcagtagctccttcgattccaatgtttttaatagccgcacacacaatctctgcgtcagaacgctcgtcaatatagatcttagacatttttagagagaactaacgcaaccagcaataaaactgaacctactttatcatttttttattcatcatcctctggtggttcgtcgttcctatcaaatgtagctctgattaacccgtcatctataggtgatgctggttctggagattctggaggagatggattattatctggaagaatctctgttatttccttgttttcatgtatcgattgcgttgtaacattaagattgcgaaatgctctaaatttgggaggcttaaagtgttgtttgcaatctctacacgcgtgtctaactagtggaggttcgtcagctgctctagtttgaatcatcatcggcgtagtattcctacttttacagttaggacacggtgtattgtatttctcgtcgagaacgttaaaataatcgttgtaactcacatcctttattttatctatattgtattctactcctttcttaatgcattttataccgaataagagatagcgaaggaattctttttcggtgccgctagtacccttaatcatatcacatagtgttttatattccaaatttgtggcaatagacggtttatttctatacgatagtttgtttctggaatcctttgagtattctataccaatattattctttgattcgaatttagtttcttcgatattagattttgtattacctatattcttgatgtagtactttgatgatttttccatggcccattctattaagtcttccaagttggcatcatccacatattgtgatagtaattctcggatatcagtagcggctaccgccattgatgtttgttcattggatgagtaactactaatgtatacattttccatttataacacttatgtattaactttgttcatttatattttttcattattatgttgatattaacaaaagtgaatatatatatgttaataattgtattgtggttatacggctacaattttataatgagtgaaagtcagtgtccgatgatcaatgacgatagctttactctgaaaagaaagtatcaaatcgatagtgcggagtcaacaataaaaatggataagaagaggataaagtttcagaatagagccaaaatggtaaaagaaataaatcagacaataagagcagcacaaactcattacgagacattgaaactaggatacataaaatttaagagaatgattatgactactactctagaagatatagcaccatctattccaaataatcagaaaacttataaactattctcggacatttcagccatcggcaaagcatcacagaatccgagtaagatggtatatgctctgctgctttacatgtttcccaatttgtttggagatgatcatagattcattcgttatagaatgcatccaatgagtaaaatcaaacacaagatcttctctcctttcaaacttaatcttattagaatattagtggaagaaagattctataataatgaatgcagatctaataaatggagaataattggaacacaagttgataaaatgttgatagctgaatctgataaatatacaatagatgcaaggtataacctaaaacccatgtatagaatcaagggagaatctgaagaagataccctctttatcaaacagatggtagaacaatgtgtgacatcccaggaattggtggaaaaagtgttgaagatactgtttagagatttgttcaagagtggagaatacaaagcgtacagatacgatgatgatgtagaaaatggatttattggattggatacactaaaattaaacattgttcatgatatagttgaaccatgtatgcctgttcgtaggccagtggctaagatactgtgtaaagaaatggtaaataaatactttgagaatccgctacatattattggtaaaaatcttcaagagtgcattgactttgttagtgaataggcatttcatctttctccaatactaattcaaattgttaaattaataatggatagtataaatagttattagttataagatagtaaaaataattattagaataagagtgtagtatcatagataactctcttctataaaaatggattttattcgtagaaagtatcttatatacacagtagaaaataatatagattttttaaaggatgatacattaagtaaagtaaacaattttaccctcaatcatgtactagctctcaagtatctagttagcaattttcctcaacacgttattactaaggatgtattagctaataccaatttttttgttttcatacatatggtacgatgttgtaaagtgtacgaagcggttttacgacacgcatttgatgcacccacgttgtacgttaaagcattgactaagaattatttatcgtttagtaacgcaatacaatcgtacaaggaaaccgtgcataaactaacacaagatgaaaaatttttagaggttgccgaatacatggacgaattaggagaacttataggcgtaaattatgacttagttcttaatccattatttcacggaggggaacccatcaaagatatggaaatcatttttttaaaactgtttaagaaaacagacttcaaagttgttaaaaaattaagtgttataagattacttatttgggcatacctaagcaagaaagatacaggcatagagtttgcggataatgatagacaaaatatatacactctatttcaacaaactggtagaatcgtccatagcaatctaacagaaacgtttagagattatatctttcccggagataagactagctattgggtgtggttaaacgaaagtatagctaatgatgcggatatcgttcttaatagacacgccattaccatgtatgataaaattcttagttatatatactctgagataaaacaaggacgcgttaataaaaacatgcttaagttagtttatatctttgagcctgaaaaagatatcagagaacttctgctagaaatcatatatgatattcctggagatatcctatctattattgatgcaaaaaacgacgattggaaaaaatattttattagtttttataaagctaattttattaacggtaatacatttattagtgatagaacgtttaacgaggacttattcagagttgttgttcaaatagatcccgaatatttcgataatgaacgaattatgtctttattctctacgagtgctgcggacattaaacgatttgatgagttagatattaataacagttatatatctaatataatttatgaggtgaacgatatcacattagatacaatggatgatatgaagaagtgtcaaatctttaacgaggatacgtcgtattatgttaaggaatacaatacatacctgtttttgcacgagtcggatcccatggtcatagagaacggaatactaaagaaactgtcatctataaaatccaagagtagacggctgaacttgtttagcaaaaacattttaaaatattatttagacggacaattggctcgtctaggtcttgtgttagatgattataaaggagacttgttagttaaaatgataaaccatcttaagtctgtggaggatgtatccgcattcgttcgattttctacagataaaaaccctagtattcttccatcgctaatcaaaactattttagctagttataatatttccatcatcgtcttatttcaaaggtttttgagagataatctatatcatgtagaagaattcttggataaaagcatccatctaaccaagacggataagaaatatatacttcaattgataagacacggtagatcatagaacagaccaaatatattattaataatttgtatatacatagatataattatcacacatttttgataaatgggaactgctgcaacaattcagactcccaccaaattaatgaataaagaaaatgcagaaatgattttggaaaaaattgttgatcatatagttatgtatattagtgacgaatcaagtgattcagaaaataatcctgaatatattgattttcgtaacagatacgaagactatagatctctcattataaaaagtgatcacgagtttgtaaagctatgtaaaaatcatgcggagaaaagttctccagaaacgcaacaaatgattatcaaacacatatacgaacaatatcttattccagtatctgaagtactattaaaacctataatgtccatgggtgacataattacatataacggatgtaaagacaatgaatggatgctagaacaactctctaccctaaactttaacaatctccgcacatggaactcatgtagcataggcaatgtaacgcgtctgttttatacattttttagttatctgatgaaagataaactaaatatataagtataatcccattctaatactttaacctgatgtattagcatcttattagaatattaacctaactaaaagacataacataaaaactcattacatagttgataaaaagcggtaggatataaatattatggctgccaccgttccgcgttttgacgacgtgtacaaaaatgcacaaagaagaattctagatcaagaaacattttttagtagaggtctaagtagaccgttaatgaaaaacacatatctatttgataattacgcgtatggatggataccagaaactgcaatttggagtagtagatacgcaaacctagatgctagtgactattatcccatttcgttgggattacttaaaaagttcgagtttctcatgtctctatataaaggtcctattcccgtatatgaagaaaaagtaaatactgaattcatagccaatggatcgttctctggtagatacgtatcatatcttcgaaagttttctgcccttccaacaaacgagtttattagttttttgttactgacttccattccaatctataatatcttgttctggtttaaaaacacacagtttgatattactaaacacacattattcagatacgtctatacagataatgccaaacacctggcgttggctaggtatatgcatcaaacaggagactataagcctttgtttagtcgtctcaaagagaattatatatttaccggtcccgttccaataagtatcaaagatatagatcaccctaatcttagtagagcaagaagtccatccgattatgagacattagctaatattagtactatattgtactttaccaagtatgatccggtattaatgtttttattgttttacgtacctgggtattcaattactacaaaaattactccagccgtagaatatctaatggataaactgaatctaacaaagagcgacgtacaactgttgtaaattattttatgcttcgtaaaatgtaggttttgaaccaaacattctttcaaagaatgagatgcataaaactttattatccaatagattgactatttcggacgtcaatcgtttaaagtaaacttcgtaaaatattctttgatcactgccgagtttaaaacttctatcgataattgtctcatatgttttaatatttacaagttttttggtccatggtacattagccggacaaatatatgcaaaataatatcgttctccaagttctatagtttctggattatttttattatattcagtaactaaatacatattagggttatctgcggatttataatttgagtgatgcattctactcaacataaataattctagaggagacgatctactatcaaattcggatcgtaaatctgtttctaaagaacggagaatatctatacatacctgattagaattcatccgtccttcagacaacatctcagacagtctggttttgtacatcttaatcatattcttatgaaacttggaaacatctcttctagtttcactagtacctttattaattctctcaggtacagattttgaattcgacgatgctgagtatttcatcgttgtatatttcttcttcgattgcataatcagattcttatataccgcctcaaactctattttaaaattattaaacaatactctattattaatcagtcgttctaactctttcgctatttctatagacttatctacatcttgactgtctatctctgtaaacacggagtcggtatctccatacacgctacgaaaacgaaatctgtaatctataggcaacgatgttttcacaatcggattaatatctctatcgtccatataaaatggattacttaatggattggcaaaccgtaacataccgttagataactctgctccatttagtaccgattctagatacaagatcattctacgtcctatggatgtgcaactcttagccgaagcgtatgagtatagagcactatttctaaatcccatcagaccatatactgagttggctactatcttgtacgtatattgcatggaatcatagatggccttttcagttgaactggtagcctgttttagcatctttttatatctggctctctctgccaaaaatgttcttaatagtctaggaatggttccttctatcgatctatcgaaaattgctatttcagagatgaggttcggtagtctaggttcacaatgaaccgtaatatatctaggaggtggatatttctgaagcaatagctgattatttatttcttcttccaatctattggtactaacaacgacaccgactaatgtttccggagatagatttccaaagatacacacattaggatacagactgttataatcaaagattaatacattattactaaacattttttgttttggagcaaataccttaccgccttcataaggaaacttttgttttgtttctgatctaactaagatagttttagtttccaacaatagctttaacagtggacccttgatgactgtactcgctctatattcgaataccatggattgaggaagcacatatgttgacgcacccgcgtctgtttttgtttctactccataatactcccacaaatactgacacaaacaagcatcatgaatacagtatctagccatatctaaagctatgtttagattataatccttatacatctgagctaaatcaacgtcatcctttccgaaagataatttatatgtatcattaggtaaagtaggacataatagtacgactttaaatccattttcccaaatatctttacgaattactttacatataatatcctcatcaacagtcacataattacctgtggttaaaacctttgcaaatgcagcggctttgcctttcgcgtctgtagtatcgtcaccgatgaacgtcatttctctaactcctctatttaatactttacccatgcaactgaacgcgttcttggatatagaatccaatttgtacgaatccaatttttcaaatttttgaatgaatgaatatagatcgaaaaatatagttccattattgttattaacgtgaaacgtagtattggccatgccgcctactcccttatgactagactgatttctctcataaatacagagatgtacagcttcctttttgtccggagatctaaagataattttctctcctgttaataactctagacgattagtaatatatctcagatcaaagttatgtccgttaaaggtaacgacgtagtcgaacgttagttccaacaattgtttagctattcgtaacaaaactatttcagaacatagaactagttctcgttcgtaatccatttccattagtgactgtatcctcaaacatcctctatcgacggcttcttgtatttcctgttccgttaacatctcttcattaatgagcgtaaacaataatcgtttaccacttaaatcgatataacagtaacttgtatgcgagattgggttaataaatacagaaggaaacttcttatcgaagtgacactctatatctagaaataagtacgatcttgggatatcgaatctaggtatttttttagcgaaacagttacgtggatcgtcacaatgataacatccattgttaatctttgtcaaatattgctcgtccaacgagtaacatccgtctggagatatcccgttagaaatataaaaccaactaatattgagaaattcatccatggtggcattttgtatgctgcgtttctttggctcttctatcaaccacatatctgcgacggagcattttctatctttaatatctagattataacttattgtctcgtcaatgtctatagttctcatctttcccaacggcctcgcattaaatggaggaggagacaatgactgatatatttcgtccgtcactacgtaataaaagtaatgaggaaatcgtataaatacggtctcgccatttcgacatctggatttcagatataaaaatctgttttcaccgtgactttcaaaccaattaatgcaccgaacatccatttatagaatttagaaatatattttcatttaaatgaatcccaaacattggggaagagccgtatggaccattatttttatagtactttcgcaagcgggtttagacggcaacatagaagcgtgtaaacgaaaactatatactatagttagcactcttccatgtcctgcatgtagacggcacgcgactatcgctatagaggacaataatgtcatgtctagcgatgatctgaattatatttattattttttcatcagattatttaacaatttggcatctgatcccaaatacgcgatcgatgtgacaaaggttaaccctttataaacttaacccattataaaacttatgattagtcacaactgaaataaccgcgtgattattttttggtataattctacacggcatggtttctgtgactatgaattcaacccccgttacattagtgaaatctttaacaaacagcaagggttcgtcaaagacataaaactcattgtttacaatcgaaatagaccccctatcacacttaaaataaaaaatatccttatcctttaccaccaaataaaattctgattggtcaatgtgaatgtattcacttaacagttccacaaatttatttattaactccgaggcacatacatcgtcggtattttttatggcaaactttactcttccagcatccgtttctaaaaaaatattaacgagttccatttatatcatccaatattattgaaatgacgttgatggacagatgatacaaataagaaggtacggtacctttgtccaccatctcctccaattcatgctctattttgtcattaactttaatgtatgaaaacagtacgccacatgcttccatgacagtgtgtaacactttggatacaaaatgtttgacattagtataattgtccaagactgtcaatctataatagatagtagctataatatattctatgatggtattgaagaagatgacaaccttggcatattgatcatttaacacagacatggtatcaacagatagcttgaatgaaagagaatcagtaattggaataagcgtcttctcgatagagtgtccgtataccaacatgtctgatattttgatgtattccattaaattatttagttttttctttttattctcgttaaacagcatttctgtcaacggaccccaacatcgttgaccgattaagttttgattgatttttccgtgtaaggcgtatctagtcagatcgtatagcctatccaataatccatcgtctgtgtgtagatcacatcgtacactttttaattctctatagaagagcgacagacatctggagcaattacagacagcaatttctttattctctacagatgtaagatacttgaagacattcctatgatgatgcagaattttggataacacggtattgatggtatctgttaccataattcctttgatggctgatagtgtcagagcacaagatttccaatctttgacaatttttagcaccattatctttgttttgatatctatatcagacagcatggtgcgtctgacaacacagggattaagacggaaagatgaaatgattctctcaacatcttcaatagataccttgctattttttctggcattatctatatgtgcgagaatatcctctagagaatcagtatcctttttgatgatagtggatctcaatgacatgggacgtttaaaccttcttattctatcaccagattgcatggtgatttgtcttctttcttttatcataatgtaatctctaaattcatcggcaaattgtctatatctaaaatcataatatgagatgtttacctctacaaatatctgttcgtccaatgttagagtatttacatcagttttgtattccaaattaaacatggcaacggatttaattttatattcctctattaagtcctcgtcgataataacagaatgtagataatcatttaatccgtcgtacatggttggaagatgcttgttgacaaaatctttaattgtcttgatgaaggtgggactatatctaacatcttgattaataaaatttataacattgtccataggatactttgtaactagttttatacacatctcttcatcggtaagtttagacagaatatcgtgaacaggtggtatattatattcatcagatatacgaagaacaatgtccaaatctatattgtttaatatattatatagatgtagcgtagctcctacaggaatatctttaactaagtcaatgatttcatcaaccgttagatctattttaaagttaatcatataggcattgatttttaaaaggtatgtagccttgactacattctcattaattaaccattccaagtcattgtgtgtaagaagattatattctatcataagcttgactacatttggtcccgataccattaaagaattcttatgatataaggaaacagattttaggtactcatctactctacaagaattttggagagccttaacgatatcagtgacgtttattatttcaggaggaaagaatctaacattgagaatatcggaattaatagcttccagatacagtgattttggcaatagtccgtgtaatccataatccagtaacacgagctggtgcttgctagacaccttttcaatgtttaatttttttgaaataagctttgataaagccttcctcgcaaattccggatacatgaacatgtcggcgacatgattaagtattgttttttcattatttttatattttctcaacaagttctcaataccccaatagatgatagaatatcacccaatgcgtccatgttgtctatttccaacaggtcgctatatccaccaatagaagtttttccaaaaaagattctaggaacagttctaccaccagtaatttgttcaaaataatcccgcaattcattttcgggtttaaattctttaatatcgacaatttcatacgctcctcttttgaaactaaacttatttagaatatccagtgcatttctacaaaaaggacatgtatacttgacaaaaattgtcactttgttattggccaacctttgttgtacaaattcctcggccattttaatatttaagtgatataaaactatctcgacttatttaactctttagtcgagatatatggacgcagatagctatatgatagccaactacagaaggcaaacgctataaaaaacataattacgacgagcatatttataaatatttttattcagcattacttgatatagtaatattaggcacagtcaaacattcaaccactctcgatacattaactctctcattttctttaacaaattctgcaatatcttcgtaaaaagattcttgaaactttttagaatatctatcgactctagatgaaatagcgttcgtcaacatactatgttttgtatacataaaggcgcccattttaacagtttctagtgacaaaatgctagcgatcctaggatcctttagaatcacatagattgacgattcgtctctcttagtaactctagtaaaataatcatacaatctagtacgcgaaataatattatccttgacttgaggagatctaaacaatctagttttgagaacatcgataagttcatcgggaatgacatacatactatctttaatagaactcttttcatccagttgaatggattcgtccttaaccaactgattaatgagatcttctattttatcattttccagatgatatgtatgtccattaaagttaaattgtgtagcgcttctttttagtctagcagccaatactttaacatcactaatatcgatatacaaaggagatgatttatctatggcattaagaattcgtttttcgacatccgtcaaaaccaattcctttttgcctgtatcatccagttttccatcctttgtaaagaaattattttctactagactattaataagactgataaggattcctccataattgcacaatccaaactttttaacaaaactagactttacgagatctacaggaatgcgtacttcaggttttttagcttgtgattttttcttttgcggacattttctagtaaccaactcatctaccatttcattgattttagcagtgaaataagctttcaatgcacgggcactgatactattgaaaacgagttgatcttcaaattccgccatttaagttcaccaaacaacttttaaatacaaatatatcaatagtagtagaataagaactataaaaaaaataataattaaccaaccccaacaaccggtattattagttgatgtggtagttttctcatcacttagaacagatttaacaatttctataaagtctgtcaaatcatcttccggagaccccataaatacaccaaatatagcggcgtacaacttatccatttatacattgaatattggcttttctttatcgctatcttcatcatattcatcatcaatatcaacaagtcccagattacgagccagatcttcttctacattttcagtcattgatacacgttcactatctccagagagtccgataacgttagccaccacttctctatcaatgattagtttcttgagcgcgaaagtaatttttgtttccgttccggatctatagaagacgataggtgtgataattgccttggccaattgtctttctcttttactgagtgattctagttcaccttctatagatctgagaatggatgattctccagtcgaaacatattctaccatggatccgtttaatttgttgatgaagatggattcatccttaaatgttttctctgtaatagtttccaccgaaagactatgcaaagaatttggaatgcgttccttgtgcttaatgtttccatagacggcttctagaagttgatacaacataggactagccgcggtaacttttatttttagaaagtatccatcgcttctatcttgtttagatttatttttataaagtttagtctctccttccaacataataaaagtggaagtcatttgactagataaactatcagtaagttttatagagatagacgaacaattagcgtattgagaagcatttagtgtaacgtattcgatacattttgcattagatttactaatcgattttgcatactctataacacccgcacaagtctgtagagaatcgctagatgcagtaggtcttggtgaagtttcaactctcttcttgattaccttactcatgattaaacctaaataattgtactttgtaatataatgatatatattttcactttatctcatttgagaataaaaatgtttttgtttaaccactgcatgatgtacagatttcggaatcgcaaaccaccagtggttttattttatccttgtccaatgtgaattgaatgggagcggatgcgggtttcgtacgtagatagtacattcccgtttttagaccgagactccatccgtaaaaatgcatactcgttagtttggaataactcggatctgctatatggatattcatagattgactttgatcgatgaaggctcccctgtctgcagccatttttatgatcgtcttttgtggaatttcccaaatagttttataaactcgcttaatatcttctggaaggtttgtattctgaatggatccaccatctgccataatcctattcttgatctcatcattccataattttctctcggttaaaactctaaggagatgcggattaactacttgaaattctccagacaatactctccgagtgtaaatattactggtatacggttccaccgactcattatttcccaaaatttgagcagttgatgcagtcggcataggtgccaccaataaactatttctaagaccgtatgttctgattttatcttttagaggttcccaattccaaagatccgacggtacaacattccaaagatcatattgtagaataccgttactggcgtacgatcctacatatgtatcgtatggtccttccttctcagctagttcacaactcgcctctaatgcaccgtaataaatggtttcgaagatcttcttatttagatcttgtgcttccaggctatcaaatggataatttaagagaataaacgcgtccgctaatccttgaacaccaataccgataggtctatgtctcttattagagatttcagcttctggaataggataataattaatatctataattttattgagatttctgacaattactttgaccacatccttcagtttgagaaaatcaaatcgcccatctattacaaacatgttcaaggcaacagatgccagattacaaacggctacctcattagcatccgcatattgtattatctcagtgcaaagattactacacttgatagttcctaaattttgttgattactctttttgttacacgcatccttataaagaatgaatggagtaccagtttcaatctgagattctataatcgctttccagacgactcgagcctttattatagatttgtatctcctttctctttcgtatagtgtatacaatcgttcgaactcgtctccccaaacattgtccaatccaggacattcatccggacacatcaacgaccactctccgtcatccttcactcgtttcataaagagatcaggaatccaaagagctataaatagatctctggttctatgttcctcgtttcctgtattctttttaagatcgaggaacgccataatatcagaatgccacggttccaagtatatggccataactccaggccgtttgtttcctccctgatctatgtatctagcggtgttattataaactctcaacattggaataataccgtttgatataccattggtaccggagatatagcttccactggcacgaatattactaattgatagacctattccccctgccattttagagattaatgcgcatcgttttaacgtgtcatagataccctctatgctatcatcgatcatgttaagtagaaaacagctagacatttggtgacgactagttcccgcattaaataaggtaggagaagcgtgcgtaaaccatttttcagaaagtagattgtacgtctcaatagctgagtctatatcccattgatgaattcctactgcgacacgcattaacatgtgctgaggtctttcaacgatcttgttgtttattttcaacaagtaggatttttccaaagttttaaaaccaaaatagttgtatgaaaagtctcgttcgtaaataataaccgagttgagtttatccttatatttgttaactatatccatggtgatacttgaaataatcggagaatgtttcccatttttaggattaacatagttgaataaatcctccatcacttcactaaatagtttttttgtttccttgtgtagatttgatacggctattctggcggctagaatggcataatccggatgttgtgtagtacaagtggctgctatttcggctgccagagtgtccaattctaccgttgttactccattatatattccttgaataaccttcatagctattttaataggatctatatgatccgtgtttaagccataacataattttctaatacgagacgtgattttatcaaacatgacattttccttgtatccatttcgtttaatgacaaacatttttgttggtgtaataaaaaaattatttaacttttcattaatagggatttgacgtatgtagcgtacaaaatgattgttcctggtatatagataaagagtcctatatatttgaaaatcgttacggctcgattaaactttaatgattgcatagtgaatatatcattaggatttaactccttgactatcatggcggcgccagaaattaccatcaaaagcattaatacagttataccgatcgcagttagaacggttatagcatccaccatttatatctaaaaattagatcaaagaatatgtgacaaagtcctagttgtatactgagaattgacgaaacaatgtttcttacatatttttttcttattagtaaccgacttaatagtaggaactggaaaactagacttgattattctataagtatagatacccttccaaataatattctctttgataaaagttccagaaaatgtagaattttttaaaaagttatcttttgctattaccaagattgtgtttagacgcttattattaatatgagtgatgaaatccacaccgcctctagatatcgcctttatttccacattagatggtaaatccaatagtgaaactatctttttaggaatgtatggactcgcgtttagaggagtaaacgtcttaggcgtcggaaaggatgattcatcaaacgaataaacaatttcacaaatggatgttaatgtattagtaggaaattttttgacgctattggaattgaagattctaatggatgatgttctacctatttcatccgataacatgttaatttccgacaccaacggttttaatatttcgatgatatacggtagtctctctttcggacttatatagcttattccacaatacgagtcattatatactccaaaaaacaaaataactagtataaaatctgtatcgaatgggaaaaacgaaattatcgacataggtatagaatccggaacattgaacgtattaatacttaattctttttctgtggtaagtaccgataggttattgacattgtatggttttaaatattctataacttgagacttgatagatattagtgatgaattgaaaattatttttatcaccacgtgtgtttcaggatcatcgtcgacgcccgtcaaccaaccgaacggagtaaaataaatatcattaatatatgctctagatattagtatttttatcaatcctttgattatcatcttctcgtaggcgaatgattccatgatcaagagtgatttaagaacatcctccggagtattaatgggcttagtaaacagtccatcgttgcaataataaaagttatccaagttaaaggatattatgcattcgtttaaagatatcacctcatctgacggagacaattttttggtaggttttagagactttgaagctacttgtttaacaaagttattcatcgtcgtctactattctatttaattttgtagttaatttatcacatatcacattaattgactttttggtccacttttccatacgtttatattcttttaatcctgcgttatccgtttccgttatatccagggatagatcttgcaagttaaatagaatgctcttaaataatgtcattttcttatccgctaaaaatttaaagaatgtataaacctttttcagagatttgaaactcttaggtggtgtcctagtacacaatatcataaacaaactaataaacattccacattcagattccaacagctgattaacttccacattaatacagcctattttcgctccaaatgtacattcgaaaaatctgaataaaacatcgatgtcacaatttgtattatccaatacagaatgtttgtgattcgtgttaaaaccatcggagaaggaatagaaataaaaattattatagtggtggaattcagttggaatattgcctccggagtcataaaaggatactaaacattgttttttatcataaattacacatttccaatgagacaaataacaaaatccaaacattacaaatctagaggtagaacttttaattttgtctttaagtatatacgataagatatgtttattcataaacgcgtcaaatttttcatgaatcgctaaggagtttaagaatctcatgtcaaattgtcctatataatccacttcggatccataagcaaactgagagactaagttcttaatacttcgattgctcatccaggctcctctctcaggctctattttcatcttgacgacctttggattttcaccagtatgtattcctttacgtgataaatcatcgattttcaaatccatttgtgagaagtctatcgccttagatactttttcccgtagtcgaggtttaaaaaaatacgctaacggtatactagtaggtaactcaaagacatcatatatagaatggtaacgcgtctttaactcgtcggttaactctttcttttgatcgagttcgtcgctactattgggtctgctcaggtgccccgactctactagttccaacatcataccgataggaatacaagacactttgccggcggttgtagatttatcatatttttccactacatatccgttacaatttgttaaaaatttagatacatctatattgctacataatccagctagtgaatatatatgacataataaattggtaaatcctagttctggtattttactaattactaaatctgtatatctttccatttatcatggaaaagaatttaccagatatcttcttttttccaaactgcgttaatgtattctcttacaaatattcacaagatgaattcagtaatatgagtaaaacggaacgtgatagtttctcattggccgtgtttccagttataaaacatagatggcataacgcacacgttgtaaaacataaaggaatatacaaagttagtacagaagcacgtggaaaaaaagtatctcctccatcactaggaaaacccgcacacataaacctaaccgcgaagcaatatatatacagtgaacacacaataagctttgaatgttatagttttctaaaatgtataacaaatacagaaatcaattcgttcgatgagtatatattaagaggactattagaagctggtaatagtttacagatattttccaattccgtaggtaaacgaacagatactataggtgtactagggaataagtatccatttagcaaaattccattggcctcattaactcctaaagcacaacgagagatattttcagcgtggatttctcatagacctgtagttttaactggaggaactggagtgggtaagacgtcacaggtacccaagttattgctttggtttaattatttatttggtggattctctactctagataaaatcactgactttcacgaaagaccagtcattctatctcttcctaggatagctttagttagattgcatagcaataccattttaaaatcattgggatttaaggtactagatggatctcctatttctttacggtacggatctataccggaagaattaataaacaaacaaccaaaaaaatatggaattgtattttctacccataagttatctctaacaaaactatttagttatggcactcttattatagacgaagttcatgagcatgatcaaataggagatattattatagcagtagcgagaaagcatcatacgaaaatagattctatgtttttaatgactgccacgttagaggatgacagggaacggctaaaagtatttttacctaatcccgcatttatacatattcctggagatacactgtttaaaattagcgaggtatttattcataataagataaatccatcttccagaatggcatacatagaagaagaaaagagaaatttagttactgctatacagatgtatactcctcctgatggatcatccggtatagtctttgtggcatccgttgcacagtgtcacgaatataaatcatatttagaaaaaagattaccgtatgatatgtatattattcatggtaaggtcttagatatagacgaaatattagaaaaagtgtattcatcacctaatgtatcgataattatttctactccttatttggaatccagcgttactatacgcaatgttacacacatttatgatatgggtagagtttttgtccccgctccttttggaggatcgcaacaatttatttctaaatctatgagagatcaacgaaaaggaagagtaggaagagttaatcctggtacatacgtctatttctatgatctgtcttatatgaagtctatacagcgaatagattcagaatttctacataattatatattgtacgctaataagtttaatctaacactccccgaagatttgtttataatccctacaaatttggatattctatggcgtacaaaggaatatatagactcgttcgatattagtacagaaacatggaataaattattatccaattattatatgaagatgatagagtatgctaaactttatgtactaagtcctattctcgctgaggagttggataactttgagaggacgggagaattaactagtattgtacgagaagccattttatctctaaatttacaaattaagattttaaattttaaacataaagatgatgatacgtatatacacttttgtaaaatattattcggtgtctataacggaacaaacgctactatatattatcatagacctctaacgggatatatgaatatgatttcagatactatatttgttcctgtagataataactaaaaatcaaactctaatgaccacatctttttttagagatgaaaaattttccacatctccttttgtagacacgactaaacattttgcagaaaaaagtttattagtgtttagataatcgtatacttcatcagtgtagatagtaaatgtgaacagataaaaggtattcttgctcaatagattggtaaattccatagaatatattaatcctttcttcttgagatcccacatcatttcaaccagagacgttttatccaatgatttacctcgtactataccacatacaaaactagattttgcagtgacgtcgtacctggtattcctaccaaacaaaattttacttttagttcttttagaaaattctaaggtagaatctctatttgccaatatgtcatctatggaattaccactagcaaaaaatgatagaaatatatattgatacatcgcagctggttttgatctactatactttaaaaacgaatcagattccataattgcctgtatatcatcagctgaaaaactatgttttacacgtattccttcggcatttctttttaatgatatatcttgtttagacaatgataaagttatcatgtccatgagagacgcgtctccgtatcgtataaatatttcattagatgttagacgcttcattaggggtatacttctataaggtttcttaatcagtccatcattggttgcgtcaagaactactatcggatgttgttgggtatctctagtgttacacatggccttactaaagtttgggtaaataactatgatatctctattaattatagatgcatatatttcattcgtcaaggatattagtatcgacttgctatcgtcattaatacgtgtaatgtaatcatataaatcatgcgatagccaaggaaaatttaaatagatgttcatcatataatcgtcgctataattcatattaatacgttgacattgactaatttgtaatatagcctcgccacgaagaaagctctcgtattcagtttcatcgataaaggataccgttaaatataactggttgccgatagtctcatagtctattaagtggtaagtttcgtacaaatacagaatccctaaaatattatctaatgttggattaatctttaccataactgtataaaatggagacggagtcataactattttaccgtttgtacttactggaatagatgaaggaataatctccggacatgctggtaaagacccaaatgtctgtttgaagaaatccaatgttccaggtcctaatctcttaacaaaaattacgatattcgatcccgatatcctttgcattctatttaccagcatatcacgaactatattaagattatctatcatgtctattctcccaccgttatataaatcgcctccgctaagaaacgttagtatatccatacaatggaatacttcatttctaaaatagtattcgttttctaattctttaatgtgaaatcgtatactagaaagggaaaaattatctttgagttttccgttagaaaagaaccacgaaactaatgttctgattgcgtccgattccgttgctgaattaatggatttacaccaaaaactcatataacttctagatgtagaagcattcgctaaaaaattagtagaatcaaaggatataagtagatgttccaacaagtgagcaattcccaagatttcatctatatcattctcgaatccgaaattagaaattcccaagtagatatcctttttcatccgatcgttgatgaaaatacgaactttattcggtaagacaatcatttactaaggagtaaaataggaagtaatgttcgtatgtcgttatcatcgtataaattaaaggtgtgttttttaccattaagtgacattataattttaccaatattggaattataatataggtgtatttgcgcactcgcgacggttgatgcatcggtaaatatagctgtatctaatgttctagtcggtatttcatcatttcgctgtctaataatagcgttttctctatctgtttccattacagctgcctgaagtttattggtcggataatatgtaaaataataagaaatacatacgaataacaaaaataaaataagatataataaagatgccatttagagatctaattttgtttaacttgtccaaattcctacttacagaagatgaggaatcgttggagatagtgtcttccttatgtagaggatttgaaatatcttataatgacttgataacttactttccagataggaaataccataaatatatttataaagtatttgaacatgtagatttatcggaggaattaagtatggaattccatgatacaactctgagagatttagtctatcttagattgtacaagtattccaagtgtatacggccgtgttataaattaggagataatctaaaaggcatagttgttataaaggacaggaatatttatattagggaagcaaatgatgacttgatagaatatctcctcaaggaatacactcctcagatttatacatattctaatgagcgcgtccccataactggttcaaaattaattctttgtggattttctcaagttacatttatggcgtatacaacgtcgcatataacaacaaataaaaaggtagatgttctcgtttccaaaaaatgtatagatgaactagtcgatccaataaattatcaaatacttcaaaatttatttgataaaggaagcggaacaataaacaaaatactcaggaagatattttattcggtaacaggtggccaaactccataggtagctttttctatttcggattttagaatttccaaattcaccagcgatttatcggttttggtgaaatccaaggatttattaatgtccacaaatgccatttgttttgtctgtggattgtatttgaaaatggaaacgatgtagttagatagatgcgctgcgaagtttcctattagggttccgcgcttcacgtcacccagcatacttgaatcaccatcctttaaaaaaaatgataagatatcaacatggagtatatcatactcgaattttaattcttctactgactcactgacattttcacaaatactacaatacggtttaccgaaaataatcagtacgttcttcatttatgggtatcaaaaacttaaaatcgttactgctggaaaataaatcactgacgatattagatgataatttatacaaagtatacaatggaatatttgtggatacaatgagtatttatatagccgtcgccaattgtgtcagaaacttagaagagttaactacggtattcataaaatacgtaaacggatgggtaaaaaagggagggcatgtaaccctttttatcgatagaggaagtataaaaattaaacaagacgttagagacaagagacgtaaatattctaaattaaccaaggacagaaaaatgttagaattagaaaagtgtacatccgaaatacaaaatgttaccggatttatggaagaagaaataaaggcagaaatgcaattaaaaatcgataaactcacatttcaaatatatttatctgattctgataacataaaaatatcattgaatgagatactaacacatttcaacaataatgagaatgttacattattttattgtgatgaacgagacgcagaattcgttatgtgtctcgaggctaaaacacatttctctaccacaggagaatggccgttgataataagtaccgatcaggatactatgctatttgcatctgctgataatcatcctaagatgataaaaaacttaactcaactgtttaaatttgttccctcggcagaggataactatttagcaaaattaacggcgttagtgaatggatgtgatttctttcctggactctatggggcatctataacacccaccaacttaaacaaaatacaattgtttagtgattttacaatcgataatatagtcactagtttggcaattaaaaattattatagaaagactaactctaccgtagacgtgcgtaatattgttacgtttataaacgattacgctaatttagacgatgtctactcgtatattcctccttgtcaatgcactgttcaagaatttatattttccgcattagatgaaaaatggaatgaatttaaatcatcttatttagaaagcgtgccgttaccctgccaattaatgtacgcgttagaaccacgcaaggagattgatgtttcagaagttaaaactttatcatcttatatagatttcgaaaatactaaatcagatatcgatgttataaaatctatatcctcgatcttcggatattctaacgaaaactgtaacacgatagtattcggcatctataaggataatttactactgagtataaataattcattttactttaacgatagtctgttaataaccaatactaaaagtgataatataataaatataggttactagattaaaaatggtgttccaactcgtgtgctctacatgcggtaaagatatttctcacgaacgatataaattgattatacgaaaaaaatcattaaaggatgtactcgtcagtgtaaagaacgaatgttgtaggttaaaattatctacacaaatagaacctcaacgtaacttaacagtgcaacctctattggatataaactaatatggatccggttaattttatcaagacatatgcgcctagaggttctattatttttattaattataccatgtcattaacaagtcatttgaatccatcgatagaaaaacatgtgggtatttattatggtacgttattatcggaacacttggtagttgaatctacctatagaaaaggagttcgaatagtcccattggatagtttttttgaaggatatcttagtgcaaaagtatacatgttagagaatattcaagttatgaaaatagcagctgatacgtcattaactttattgggtattccgtatggatttggtcatgatagaatgtattgttttaaattggtagctgactgttataaaaatgccggtattgatacatcgtctaaacgaatattgggcaaagatatttttctgagccaaaacttcacagacgataatagatggataaagatatatgattctaataatttaacattttggcaaattgattaccttaaagggtgagttaatatgcataactactcctccgttgttttttccctcgttctttttcttaacgttgtttgccatcactctcataatgtaaagatattctaaaatggtaaacttttgcatatcggacgcagaaattggtataaatgttgtaattgtattatttcccgtcaatggactagtcacagctccatcagttttatatcctttagagtatttctcactcgtgtctaacattctagagcattccatgatctgtttatcgttgatattggccggaaagatagattttttattttttattatattactattggcaattgtagatataacttctggtaaatatttttctaccttttcaatctcttctattttcaagccggctatatattctgctatattgttgctagtatcaataccttttctggctaagaagtcatatgtggtattcactatatcagttttaactggtagttccattagcctttccacttctgcagaataatcagaaattggttctttaccagaaaatccagctactataataggctcaccgatgatcattggcaaaatcctatattgtaccagattaatgagagcatatttcatttccaataattctgctagttcttgagacattgatttatttgatgaatctagttggttctctagatactctaccatttctgccgcatacaataacttgttagataaaatcagggttatcaaagtgtttagcgtggctagaatagtgggcttgcatgtattaaagaatgcggtagtatgagtaaaccgttttaacgaattatatagtctccagaaatctgtggcgttacatacatgagccgaatgacatcgaagattgtccaatatttttaatagctgctctttgtccattatttctatatttgactcgcaacaattgtagataccattaatcaccgattcctttttcgatgccggacaatagcacaattgtttagctttggactctatgtattcagaattaatagatatatctctcaatacagattgcactatacattttgaaactatgtcaaaaattgtagaacgacgctgttctgcagccatttaactttaaataatttacaaaaatttaaaatgagcatccgtataaaaatcgataaactgcgccaaattgtggcatatttttcagagttcagtgaagaagtgtctataaatgtagactcgacggatgagttaatgtatatttttgccgccttgggcggatctgtaaacatttgggcaattatacctctaagtgcatcagtgttttaccgaggagccgaaaatattgtgtttaatcttcctgtgtccaaggtaaaatcgtgtttgtgtagttttcacaatgatgccatcatagatatagaacctgatctggaaaataatctagtaaaactttctagttatcatgtagtaagtgtcgattgtaacaaggaactgatgcctattaggacagatactactatttgtctaagtatagatcaaaagaaatcttacgtgtttaattttcacaagtatgaagaaaaatgttgtggtagaaccgtcattcatctagaatggttgttgggctttatcaagtgtattagtcagcatcagcatctggctattatgtttaaagatgacaatattattatgaagactcctggtaatactgatgcgttttccagggaatattctatgactgaatgttctcaagaactacaaaagttttctttcaaaatagctatctcgtctctcaacaaactacgaggattcaaaaagagagtcaatgtttttgaaactagaatcgtaatggataatgacgataacattttaggaatgttgttttcggatagagttcaatcctttaagatcaacatctttatggcgtttttagattaatactttcaatgagataaatatgggtggcggagtaagtgttgagctccctaaacgggatccgcctccgggagtacccactgatgagatgttattaaacgtggataaaatgcatgacgtgatagctcccgctaagcttttagaatatgtgcatataggaccactagcaaaagataaagaggataaagtaaagaaaagatatccagagtttagattagtcaacacaggacccggtggtctttcggcattgttaagacaatcgtataatggaaccgcacccaattgctgtcgcacttttaatcgtactcattattggaagaaggatggaaagatatcagataagtatgaagagggtgcagtattagaatcgtgttggccagacgttcacgacactggaaaatgcgatgttgatttattcgactggtgtcagggggatacgttcgatagaaacatatgccatcagtggatcggttcagcctttaataggagtaatagaactgtagagggtcaacaatcgttaataaatctgtataataagatgcaaacattatgtagtaaagatgctagtgtaccaatatgcgaatcatttttgcattatttacgcgcacacaatacagaagatagcaaagagatgatcgattatattctaagacaacagtctgcggactttaaacagaaatatatgagatgtagttatcccactagagataagttagaagagtcattaaaatatgcggaacctcgagaatgttgggatccagagtgttcgaatgccaatgttaatttcttactaacacgtaattataataatttaggactttgcaatattgtacgatgtaataccagcgtgaacaacttacagatggataaaacttcctcattaagattgtcatgtggattaagcaatagtgatagattttctactgttcccgtcaatagagcaaaagtagttcaacataatattaaacactcgttcgacctaaaattgcatttgatcagtttattatctctcttggtaatatggatactaattgtagctatttaaatgggtgccgcggcaagcatacagacgacggtgaatacactcagcgaacgtatctcgtctaaattagaacaagaagcgaacgctagtgctcaaacaaaatgtgatatagaaatcggaaatttttatatccgacaaaaccatggatgtaacctcactgttaaaaatatgtgctctgcggacgcggatgctcagttggatgctgtgttatcagccgctacagaaacatatagtggattaacaccggaacaaaaagcatacgtgccagctatgtttactgctgcgttaaacattcagacgagtgtaaacactgttgttagagattttgaaaattatgtgaaacagacttgtaattctagcgcggtcgtcgataacaaattaaagatacaaaacgtaatcatagatgaatgttacggagccccaggatctccaacaaatttggaatttattaatacaggatctagcaaaggaaattgtgccattaaagcgttgatgcaattgacgactaaggccactactcaaatagcacctagacaagttgctggtacaggagttcagttttatatgattgttatcggtgttataatattggcagcgttgtttatgtactatgccaagcgtatgttgttcacatccaccaatgataaaatcaaacttattttagccaataaggaaaacgtccattggactacttacatggacacattctttagaacttctccgatggttattgctaccacggatatgcaaaactgaaaatatattgataatattttaatagattaacatggaagttatcgctgatcgtctagacgatatagtgaaacaaaatatagcggatgaaaaatttgtagattttgttatacacggtctagagcatcaatgtcctgctatacttcgaccattaattaggttgtttattgatatactattatttgttatagtaatttatatttttacggtacgtctagtaagtagaaattatcaaatgttgttggtggtgctagtcatcacattaactattttttattactttatactataatagtactagactgacttctaacaaacatctcacctgccataaataaatgcttgatattaaagtcttctatttctaacactattccatctgtggaaaataatactctgacattatcgctaattgacacatcggtgagtgatatgcctataaagtaataatcttctttgggcacatataccagtgtaccaggttctaacaacctatttactggtgctcctgtagcatactttttctttaccttgagaatatccatcgtttgcttggtcaatagcgatatgtgattttttatcaaccactcaaaaaagtaattggagtgttcatatcctctacgggctattgtctcatggccgtgtatgaaatttaagtaacacgactgtggtagatttgttctatagagccgattgccgcaaatagatagaactaccaatatgtctgtacaaatgttaaacattaattgattaacagaaaaaacaatgttcgttctgggaatagaaaccagatcaaaacaaaattcgttagaatatatgccacgtttatacatggaatataaaataactacagtttgaaaaataacagtatcatttaaacatttaacttgcggggttaatctcacaactttactgtttttgaactgttcaaaatatagcatcgatccgtgagaaatacgtttagccgcctttaatagaggaaatcccaccgcctttctggatctcaccaacgacgatagttctgaccagcaactcatttcttcatcatccacctgttttaacatataataggcaggagatagatatccgtcattgcaatattccttctcgtaggcacacaatctaatattgataaaatctccattctcttctctgcatttattatcttgtctcggtggctgattaggctgtggtcttggtttaggccttggtctatcgttgttgaatctattttggtcattaaatctttcatttcttcctggtatatttctatcacctcgtttggttggatttttgtctatattatcgtttgtaacatcggtacgggtattcatttatcacaaaaaaaacttctctaaatgagtctactgctagaaaacctcatcgaagaagataccatattttttgcaggaagtatatctgagtatgatgatttacaaatggttattgccggcgcaaaatccaaatttccaagatctatgctttctatttttaatatagtacctagaacgatgtcaaaatatgagttggagttgattcataacgaaaatatcacaggagcaatgtttaccacaatgtataatataagaaacaatttgggtctaggagatgataaactaactattgaagccattgaaaactatttcttggatcctaacaatgaagttatgcctcttattattaataatacggatatgactgccgtcattcctaaaaaaagtggtaggagaaagaataagaacatggttatcttccgtcaaggatcatcacctatcttgtgcattttcgaaactcgtaaaaagattaatatttataaagaaaatatggaatccgcgtcgactgagtatacacctatcggagacaacaaggctttgatatctaaatatgcgggaattaatgtcctgaatgtgtattctccttccacatccataagattgaatgccatttacggattcaccaataaaaataaactagagaaacttagtactaataaggaactagaatcgtatagttctagccctcttcaagaacccattaggttaaatgattttctgggactattggaatgtgttaaaaagaatattcctctaacagatattccgacaaaggattgattactataaatggagaatgttcctaatgtatactttaatcctgtgtttatagagcccacgtttaaacattctttattaagtgtttataaacacagattaatagttttatttgaagtattcgttgtattcattctaatatatgtattttttagatctgaattaaatatgttcttcatgcctaaacgaaaaatacccgatcctattgatagattacgacgtgctaatctagcgtgtgaagacgataaattaatgatctatggattaccatggatgacaactcaaacatctgcgttatcaataaatagtaaaccgatagtgtataaagattgtgcaaagcttttgcgatcaataaatggatcacaaccagtatctcttaacgatgttcttcgcagatgatgattcattttttaagtatttggctagtcaagatgatgaatcttcattatctgatatattgcaaatcactcaatatctagactttctgttattattattgatccaatcaaaaaataaattagaagctgtgggtcattgttatgaatctctttcagaggaatacagacaattgacaaaattcacagactttcaagattttaaaaaactgtttaacaaggtccctattgttacagatggaagggtcaaacttaataaaggatatttgttcgactttgtgattagtttgatgcgattcaaaaaagaatcctctctagctaccaccgcaatagatcctgttagatacatagatcctcgtcgcaatatcgcattttctaacgtgatggatatattaaagtcgaataaagtgaacaataattaattctttattgtcatcatgaacggcggacatattcagttgataatcggccccatgttttcaggtaaaagtacagaattaattagacgagttagacgttatcaaatagctcaatataaatgcgtgactataaaatattctaacgataatagatacggaacgggactatggacgcatgataagaataattttgaagcattggaagcaactaaactatgtgatgtcttggaatcaattacagatttctccgtgataggtatcgatgaaggacagttctttccagacattgttgaattagatcgataaaaattaattaattacccgggtaccaggcctagatctgtcgagatccggtggtggtgcaaatcaaagaactgctcctcagtggatgttgcctttacttctaggcctgtacggaagtgttacttctgctctaaaagctgctgcagggggggggggggggtgggggggccggttagggccgccatcccctcagagcgtcgggatatcgggtggcggctcgggacggaggacgcgctagtgttcttctgtgtggcagttcagaatgatggatcaagctagatcagcattctctaacttgtttggtggagaaccattgtcatatacccggttcagcctggctcggcaagtagatggcgataacagtcatgtggagatgaaacttgctgtagatgaagaagaaaatgctgacaataacacaaaggccaatgtcacaaaaccaaaaaggtgtagtggaagtatctgctatgggactattgctgtgatcgtctttttcttgattggatttatgattggctacttgggctattgtaaaggggtagaaccaaaaactgagtgtgagagactggcaggaaccgagtctccagtgagggaggagccaggagaggacttccctgcagcacgtcgcttatattgggatgacctgaagagaaagttgtcggagaaactggacagcacagacttcaccagcaccatcaagctgctgaatgaaaattcatatgtccctcgtgaggctggatctcaaaaagatgaaaatcttgcgttgtatgttgaaaatcaatttcgtgaatttaaactcagcaaagtctggcgtgatcaacattttgttaagattcaggtcaaagacagcgctcaaaactcggtgatcatagttgataagaacggtagacttgtttacctggtggagaatcctgggggttatgtggcgtatagtaaggctgcaacagttactggtaaactggtccatgctaattttggtactaaaaaagattttgaggatttatacactcctgtgaatggatctatagtgattgtcagagcagggaaaatcacctttgcagaaaaggttgcaaatgctgaaagcttaaatgcaattggtgtgttgatatacatggaccagactaaatttcccattgttaacgcagaactttcattctttggacatgctcatctggggacaggtgacccttacacacctggattcccttccttcaatcacactcagtttccaccatctcggtcatcaggattgcctaatatacctgtccagacaatctccagagctgctgcagaaaagctgtttgggaatatggaaggagactgtccctctgactggaaaacagactctacatgtaggatggtaacctcagaaagcaagaatgtgaagctcactgtgagcaatgtgctgaaagagataaaaattcttaacatctttggagttattaaaggctttgtagaaccagatcactatgttgtagttggggcccagagagatgcatggggccctggagctgcaaaatccggtgtaggcacagctctcctattgaaacttgcccagatgttctcagatatggtcttaaaagatgggtttcagcccagcagaagcattatctttgccagttggagtgctggagactttggatcggttggtgccactgaatggctagagggatacctttcgtccctgcatttaaaggctttcacttatattaatctggataaagcggttcttggtaccagcaacttcaaggtttctgccagcccactgttgtatacgcttattgagaaaacaatgcaaaatgtgaagcatccggttactgggcaatttctatatcaggacagcaactgggccagcaaagttgagaaactcactttagacaatgctgctttccctttccttgcatattctggaatcccagcagtttctttctgtttttgcgaggacacagattatccttatttgggtaccaccatggacacctataaggaactgattgagaggattcctgagttgaacaaagtggcacgagcagctgcagaggtcgctggtcagttcgtgattaaactaacccatgatgttgaattgaacctggactatgagaggtacaacagccaactgctttcatttgtgagggatctgaaccaatacagagcagacataaaggaaatgggcctgagtttacagtggctgtattctgctcgtggagacttcttccgtgctacttccagactaacaacagatttcgggaatgctgagaaaacagacagatttgtcatgaagaaactcaatgatcgtgtcatgagagtggagtatcacttcctctctccctacgtatctccaaaagagtctcctttccgacatgtcttctggggctccggctctcacacgctgccagctttactggagaacttgaaactgcgtaaacaaaataacggtgcttttaatgaaacgctgttcagaaaccagttggctctagctacttggactattcagggagctgcaaatgccctctctggtgacgtttgggacattgacaatgagttttaaatgtgatacccatagcttccatgagaacagcagggtagtctggtttctagacttgtgctgatcgtgctaaattttcagtagggctacaaaacctgatgttaaaattccatcccatcatcttggtactactagatgtctttaggcagcagcttttaatacagggtagataacctgtacttcaagttaaagtgaataaccacttaaaaaatgtccatgatggaatattcccctatctctagaattttaagtgctttgtaatgggaactgcctctttcctgttgttgttaatgaaaatgtcagaaaccagttatgtgaatgatctctctgaatcctaagggctggtctctgctgaaggttgtaagtggtcgcttactttgagtgatcctccaacttcatttgatgctaaataggagataccaggttgaaagaccttctccaaatgagatctaagcctttccataaggaatgtagctggtttcctcattcctgaaagaaacagttaactttcagaagagatgggcttgttttcttgccaatgaggtctgaaatggaggtccttctgctggataaaatgaggttcaactgttgattgcaggaataaggccttaatatgttaacctcagtgtcatttatgaaaagaggggaccagaagccaaagacttagtatattttcttttcctctgtcccttcccccataagcctccatttagttctttgttatttttgtttcttccaaagcacattgaaagagaaccagtttcaggtgtttagttgcagactcagtttgtcagactttaaagaataatatgctgccaaattttggccaaagtgttaatcttaggggagagctttctgtccttttggcactgagatatttattgtttatttatcagtgacagagttcactataaatggtgtttttttaatagaatataattatcggaagcagtgccttccataattatgacagttatactgtcggttttttttaaataaaagcagcatctgctaataaaacccaacagatactggaagttttgcatttatggtcaacacttaagggttttagaaaacagccgtcagccaaatgtaattgaataaagttgaagctaagatttagagatgaattaaatttaattaggggttgctaagaagcgagcactgaccagataagaatgctggttttcctaaatgcagtgaattgtgaccaagttataaatcaatgtcacttaaaggctgtggtagtactcctgcaaaattttatagctcagtttatccaaggtgtaactctaattcccattttgcaaaatttccagtacctttgtcacaatcctaacacattatcgggagcagtatcttccataatgtataaagaacaaggtagtttttacctaccacagtgtctgtatcggagacagtgatctccatatgttacactaagggtgtaagtaattatcgggaacagtgtttcccataattttcttcatgcaatgacatcttcaaagcttgaagatcgttagtatctaacatgtatcccaactcctataattccctatcttttagttttagttgcagaaacattttgtggtcattaagcattgggtgggtaaattcaaccactgtaaaatgaaattactacaaaatttgaaatttagcttgggtttttgttacctttatggtttctccaggtcctctacttaatgagatagtagcatacatttataatgtttgctattgacaagtcattttaactttatcacattatttgcatgttacctcctataaacttagtgcggacaagttttaatccagaattgaccttttgacttaaagcagagggactttgtatagaaggtttgggggctgtggggaaggagagtcccctgaaggtctgacacgtctgcctacccattcgtggtgatcaattaaatgtaggtatgaataagttcgaagctccgtgagtgaaccatcattataaacgtgatgatcagctgtttgtcatagggcagttggaaacggcctcctagggaaaagttcatagggtctcttcaggttcttagtgtcacttacctagatttacagcctcacttgaatgtgtcactactcacagtctctttaatcttcagttttatctttaatctcctcttttatcttggactgacatttagcgtagctaagtgaaaaggtcatagctgagattcctggttcgggtgttacgcacacgtacttaaatgaaagcatgtggcatgttcatcgtataacacaatatgaatacagggcatgcattttgcagcagtgagtctcttcagaaaacccttttctacagttagggttgagttacttcctatcaagccagtacgtgctaacaggctcaatattcctgaatgaaatatcagactagtgacaagctcctggtcttgagatgtcttctcgttaaggagatgggccttttggaggtaaaggataaaatgaatgagttctgtcatgattcactattctagaacttgcatgacctttactgtgttagctctttgaatgttcttgaaattttagactttctttgtaaacaaatgatatgtccttatcattgtataaaagctgttatgtgcaacagtgtggagattccttgtctgatttaataaaatacttaaacactgaaaaaaaaaaaaaaaaaaaaaaaaaaaaaaaaaaaaaaaaaaaaaaaaaaaaaaaaaaaaaaaaaaaaaaaaaaaaaaaaagtaccttctgaggcggaaagaaccagccggatctcgacttcgagcttatttatattccaaaaaaaaaaaataaaatttcaatttttaagctttcactaattccaaacccacccgctttttatagtaagtttttcacccataaataataaatacaataattaatttctcgtaaaagtagaaaatatattctaatttattgcacggtaaggaagtagatcataactcgagcatgggagatcccgtcgttttacaacgtcgtgactgggaaaaccctggcgttacccaacttaatcgccttgcagcacatccccctttcgccagctggcgtaatagcgaagaggcccgcaccgatcgcccttcccaacagttgcgcagcctgaatggcgaatggcgctttgcctggtttccggcaccagaagcggtgccggaaagctggctggagtgcgatcttcctgaggccgatactgtcgtcgtcccctcaaactggcagatgcacggttacgatgcgcccatctacaccaacgtgacctatcccattacggtcaatccgccgtttgttcccacggagaatccgacgggttgttactcgctcacatttaatgttgatgaaagctggctacaggaaggccagacgcgaattatttttgatggcgttaactcggcgtttcatctgtggtgcaacgggcgctgggtcggttacggccaggacagtcgtttgccgtctgaatttgacctgagcgcatttttacgcgccggagaaaaccgcctcgcggtgatggtgctgcgctggagtgacggcagttatctggaagatcaggatatgtggcggatgagcggcattttccgtgacgtctcgttgctgcataaaccgactacacaaatcagcgatttccatgttgccactcgctttaatgatgatttcagccgcgctgtactggaggctgaagttcagatgtgcggcgagttgcgtgactacctacgggtaacagtttctttatggcagggtgaaacgcaggtcgccagcggcaccgcgcctttcggcggtgaaattatcgatgagcgtggtggttatgccgatcgcgtcacactacgtctgaacgtcgaaaacccgaaactgtggagcgccgaaatcccgaatctctatcgtgcggtggttgaactgcacaccgccgacggcacgctgattgaagcagaagcctgcgatgtcggtttccgcgaggtgcggattgaaaatggtctgctgctgctgaacggcaagccgttgctgattcgaggcgttaaccgtcacgagcatcatcctctgcatggtcaggtcatggatgagcagacgatggtgcaggatatcctgctgatgaagcagaacaactttaacgccgtgcgctgttcgcattatccgaaccatccgctgtggtacacgctgtgcgaccgctacggcctgtatgtggtggatgaagccaatattgaaacccacggcatggtgccaatgaatcgtctgaccgatgatccgcgctggctaccggcgatgagcgaacgcgtaacgcgaatggtgcagcgcgatcgtaatcacccgagtgtgatcatctggtcgctggggaatgaatcaggccacggcgctaatcacgacgcgctgtatcgctggatcaaatctgtcgatccttcccgcccggtgcagtatgaaggcggcggagccgacaccacggccaccgatattatttgcccgatgtacgcgcgcgtggatgaagaccagcccttcccggctgtgccgaaatggtccatcaaaaaatggctttcgctacctggagagacgcgcccgctgatcctttgcgaatacgcccacgcgatgggtaacagtcttggcggtttcgctaaatactggcaggcgtttcgtcagtatccccgtttacagggcggcttcgtctgggactgggtggatcagtcgctgattaaatatgatgaaaacggcaacccgtggtcggcttacggcggtgattttggcgatacgccgaacgatcgccagttctgtatgaacggtctggtctttgccgaccgcacgccgcatccagcgctgacggaagcaaaacaccagcagcagtttttccagttccgtttatccgggcaaaccatcgaagtgaccagcgaatacctgttccgtcatagcgataacgagctcctgcactggatggtggcgctggatggtaagccgctggcaagcggtgaagtgcctctggatgtcgctccacaaggtaaacagttgattgaactgcctgaactaccgcagccggagagcgccgggcaactctggctcacagtacgcgtagtgcaaccgaacgcgaccgcatggtcagaagccgggcacatcagcgcctggcagcagtggcgtctggcggaaaacctcagtgtgacgctccccgccgcgtcccacgccatcccgcatctgaccaccagcgaaatggatttttgcatcgagctgggtaataagcgttggcaatttaaccgccagtcaggctttctttcacagatgtggattggcgataaaaaacaactgctgacgccgctgcgcgatcagttcacccgtgcaccgctggataacgacattggcgtaagtgaagcgacccgcattgaccctaacgcctgggtcgaacgctggaaggcggcgggccattaccaggccgaagcagcgttgttgcagtgcacggcagatacacttgctgatgcggtgctgattacgaccgctcacgcgtggcagcatcaggggaaaaccttatttatcagccggaaaacctaccggattgatggtagtggtcaaatggcgattaccgttgatgttgaagtggcgagcgatacaccgcatccggcgcggattggcctgaactgccagctggcgcaggtagcagagcgggtaaactggctcggattagggccgcaagaaaactatcccgaccgccttactgccgcctgttttgaccgctgggatctgccattgtcagacatgtataccccgtacgtcttcccgagcgaaaacggtctgcgctgcgggacgcgcgaattgaattatggcccacaccagtggcgcggcgacttccagttcaacatcagccgctacagtcaacagcaactgatggaaaccagccatcgccatctgctgcacgcggaagaaggcacatggctgaatatcgacggtttccatatggggattggtggcgacgactcctggagcccgtcagtatcggcggaattccagctgagcgccggtcgctaccattaccagttggtctggtgtcaaaaataataataaccgggcaggggggatccaattctgtgagcgtatggcaaacgaaggaaaaatagttatagtagccgcactcgatgggacatttcaacgtaaaccgtttaataatattttgaatcttattccattatctgaaatggtggtaaaactaactgctgtgtgtatgaaatgctttaaggaggcttccttttctaaacgattgggtgaggaaaccgagatagaaataataggaggtaatgatatgtatcaatcggtgtgtagaaagtgttacatcgactcataatattatattttttatctaaaaaactaaaaataaacattgattaaattttaatataatacttaaaaatggatgttgtgtcgttagataaaccgtttatgtattttgaggaaattgataatgagttagattacgaaccagaaagtgcaaatgaggtcgcaaaaaaactgccgtatcaaggacagttaaaactattactaggagaattattttttcttagtaagttacagcgacacggtatattagatggtgccaccgtagtgtatataggatctgctcccggtacacatatacgttatttgagagatcatttctataatttaggagtgatcatcaaatggatgctaattgacggccgccatcatgatcctattttaaatggattgcgtgatgtgactctagtgactcggttcgttgatgaggaatatctacgatccatcaaaaaacaactgcatccttctaagattattttaatttctgatgtgagatccaaacgaggaggaaatgaacctagtacggcggatttactaagtaattacgctctacaaaatgtcatgattagtattttaaaccccgtggcgtctagtcttaaatggagatgcccgtttccagatcaatggatcaaggacttttatatcccacacggtaataaaatgttacaaccttttgctccttcatattcagctgaaatgagattattaagtatttataccggtgagaacatgagactgactcgagttaccaaattagacgctgtaaattatgaaaaaaagatgtactaccttaataagatcgtccgtaacaaagtagttgttaactttgattatcctaatcaggaatatgactattttcacatgtactttatgctgaggaccgtgtactgcaataaaacatttcctactactaaagcaaaggtactatttctacaacaatctatatttcgtttcttaaatattccaacaacatcaactgaaaaagttagtcatgaaccaatacaacgtaaaatatctagcaaaaattctatgtctaaaaacagaaatagcaagagatccgtacgcggtaataaatagaaacgtactactgagatatactaccgatatagagtataatgatttagttactttaataaccgttagacataaaattgattctatgaaaactgtgtttcaggtatttaacgaatcatccataaattatactccggttgatgatgattatggagaaccaatcattataacatcgtatcttcaaaaaggtcataacaagtttcctgtaaattttctatacatagatgtggtaatatctgacttatttcctagctttgttagactagatactacagaaactaatatagttaatagtgtactacaaacaggcgatggtaaaaagactcttcgtcttcccaaaatgttagagacggaaatagttgtcaagattctctatcgccctaatataccattaaaaattgttagatttttccgcaataacatggtaactggagtagagatagccgatagatctgttatttcagtcgctgattaatcaattagtagagatgagataagaacattataataatcaataatatatcttatatcttatatcttatatcttatatcttgtttagaaaaatgctaatattaaaatagctaacgctagtaatccaatcggaagccatttgatatctataatagggtatctaatttcctgatttaaatagcggacagctatattctcggtagctactcgtttggaatcacaaacattatttacatctaatttactatctgtaatggaaacgtttcccaatgaaatggtacaatccgatacattgcattttgttatatttttttttaaagaggctggtaacaacgcatcgcttcgtttacatggctcgtaccaacaataatagggtaatcttgtatctattcctatccgtactatgcttttatcaggataaatacatttacatcgtatatcgtctttgttagcatcacagaatgcataaatttgttcgtccgtcatgataaaaatttaaagtgtaaatataactattatttttatagttgtaataaaaagggaaatttgattgtatactttcggttctttaaaagaaactgacttgataaaaatggctgtaatctctaaggttacgtatagtctatatgatcaaaaagagattaatgctacagatattatcattagtcatgttaaaaatgacgacgatatcggtaccgttaaagatggtagactaggtgctatggatggggcattatgtaagacttgtgggaaaacggaattggaatgtttcggtcactggggtaaagtaagtatttataaaactcatatagttaagcctgaatttatttcagaaattattcgtttactgaatcatatatgtattcactgcggattattgcgttcacgagaaccgtattccgacgatattaacctaaaagagttatcgggacacgctcttaggagattaaaggataaaatattatccaagaaaaagtcatgttggaacagtgaatgtatgcaaccgtatcaaaaaattactttttcaaagaaaaaggtttgtttcgtcaacaagttggatgatattaacgttcctaattctctcatctatcaaaagttaatttctattcatgaaaagttttggccattattagaaattcatcaatatccagctaacttattttatacagactactttcccatccctccgttgattattagaccggctattagtttttggatagatagtatacccaaagagaccaatgaattaacttacttattaggtatgatcgttaagaattgtaacttgaatgctgatgaacaggttatccagaaggcggtaatagaatacgatgatattaaaattatttctaataacactaccagtatcaatttatcatatattacatccggcaaaaataatatgattagaagttatatcgtcgcccgacgaaaagatcagaccgctagatctgtaattggtcccagtacatctatcaccgttaatgaggtaggaatgcccgcatatattagaaatacacttacagaaaagatatttgttaatgcctttacagtggataaagttaaacaactattagcgtcaaaccaagttaaattttactttaataaacgattaaaccaattaacaagaatacgccaaggaaagtttattaaaaataaaatacatttattgcctggtgattgggtagaagtagctgttcaagaatatacaagtattatttttggaagacagccgtctctacatagatacaacgtcatcgcttcatctatcagagctaccgaaggagatactatcaaaatatctcccggaattgccaactctcaaaatgctgatttcgacggggatgaggaatggatgatattagaacaaaatcctaaagctgtaattgaacaaagtattcttatgtatccgacgacgttactcaaacacgatattcatggagcccccgtttatggatctattcaagatgaaatcgtagcagcgtattcattgtttaggatacaagatctttgtttagatgaagtattgaacatcttggggaaatatggaagagagttcgatcctaaaggtaaatgtaaattcagcggtaaagatatctatacttacttgataggtgaaaagattaattatccgggtctcttaaaggatggtgaaattattgcaaacgacgtagatagtaattttgttgtggctatgaggcatctgtcattggctggactcttatccgatcataagtcgaacgtggaaggtatcaactttattatcaagtcatcttatgtttttaagagatatctatctatttacggttttggggtgacattcaaagatctgagaccaaattcgacgttcactaataaattggaggccatcaacgtagaaaaaatagaacttatcaaagaagcatacgccaaatatctcaacgatgtaagagacgggaaaatagttccattatctaaagctttagaggcggactatgtggaatccatgttatccaacttgacaaatcttaatatccgagagatagaagaacatatgagacaaacgctgatagatgatccagataataacctcctgaaaatggccaaagcgggttataaagtaaatcccacagaactaatgtatattctaggtacgtatggacaacaaaggattgatggtgaaccagcagagactcgagtattgggtagagttttaccttactatcttccagactctaaggatccagaaggaagaggttacattcttaattctttaacaaaaggattaacgggttctcaatattacttttcgatgctggttgccagatctcaatctactgatatcgtctgtgaaacatcacgtaccggaacactggctagaaaaatcattaaaaagatggaggatatggtggtcgacggatacggacaagtagttataggtaatacgctcatcaagtacgccgccaattataccaaaattctaggctcagtatgtaaacctgtagatcttatctatccagatgagtccatgacttggtatttggaaattagtgctctgtggaataaaataaaacagggattcgtttactctcagaaacagaaacttgcaaagaagacattggcgccgtttaatttcctagtattcgtcaaacccaccactgaggataatgctattaaggttaaggatctgtacgatatgattcataacgtcattgatgatgtgagagagaaatacttctttacggtatctaatatagattttatggagtatatattcttgacgcatcttaatccttctagaattagaattacaaaagaaacggctatcactatctttgaaaagttctatgaaaaactcaattatactctaggtggtggaactcctattggaattatttctgcacaggtattgtctgagaagtttacacaacaagccctgtccagttttcacactactgaaaaaagtggtgccgtcaaacaaaaacttggtttcaacgagtttaataacttgactaatttgagtaagaataagaccgaaattatcactctggtatccgatgatatctctaaacttcaatctgttaagattaatttcgaatttgtatgtttgggagaattaaatccaaacatcactcttcgaaaagaaacagataaatatgtagtagatataatagtcaatagattatacatcaagagagcagaaataaccgaattagtcgtcgaatatatgattgaacgatttatctcctttagcgtcattgtaaaggaatggggtatggagacattcattgaggacgaggataatattagatttactgtctacctaaatttcgttgaaccggaagaattgaatcttagtaagtttatgatggttcttccgggggcagccaacaagggaaagattagtaaattcaagattcctatctctgattatacgggatatgacgacttcaatcaaacaaaaaagctcaataagatgactgtagaactcatgaatctaaaagaattgggttctttcgatttggaaaacgtcaacgtgtatcctggagtatggaatacatacgatatcttcggtatcgaggccgctcgtgaatacttgtgcgaagccatgttaaacacctatggagaagggttcgattatctgtatcagccttgtgatcttctcgctagtttactatgtgctagttacgaaccagaatcagtgaataaattcaagttcggcgcagctagtactcttaagagagctacgttcggagacaataaagcattgttaaacgcggctcttcataaaaagtcagaacctattaacgataatagtagctgccacttttttagcaaggtccctaatataggaactggatattacaaatactttatcgacttgggtcttctcatgagaatggaaaggaaactatctgataagatatcttctcaaaagatcaaggaaatggaagaaacagaagacttttaattcttatcaataacatatttttctatgatctgtcttttaaacgatggattttccacaaatgcgcctctcaagtccctcatagaatgatacacgtataaaaaatatagcataggcaatgactccttatttttagacattagatatgccaaaatcatagccccgcttctatttactcccgcagcacaatgaaccaacacgggctcgtttcgttgatcacatttagataaaaaggcggttacgtcgtcaaaatatttactaatatcggtagttgtatcatctaccaacggtatatgaataatattaatattagagttaggtaatgtatatttatccatcgtcaaatttaaaacatatttgaacttaacttcagatgatggtgcatccatagcatttttataatttcccaaatacacattattggttacccttgtcattatagtgggagatttggctttgtgcatatctccagttgaacgtagtagtaagtatttatacaaacttttcttatccatttataacgtacaaatggataaaactactttatcggtaaacgcgtgtaatttagaatacgttagagaaaaggctatagtaggcgtacaagcagccaaaacatcaacacttatattctttgttattatattggcaattagtgcgctattactctggtttcagacgtctgataatccagtctttaatgaattaacgagatatatgcgaattaaaaatacggttaacgattggaaatcattaacggatagcaaaacaaaattagaaagtgatagaggtagacttctagccgctggtaaggatgatatatttgaattcaaatgtgtggatttcggcgcctattttatagctatgcgattggataagaaaacatatctgccgcaagctattaggcgaggtactggagacgcgtggatggttaaaaaggcggcaaaggtcgatccatctgctcaacaattttgtcagtatttgataaaacacaagtctaataatgttattacttgtggtaatgagatgttaaatgaattaggttatagcggttattttatgtcaccgcattggtgttccgattttagtaatatggaatagtgttagataaatgcggtaacgaatgttcctgtaaggaaccataacagcttagatttaacgttaaagatgagcataaacataataaacaaaattacaatcaaacttataacattaatatcaaacaatccaaaaaatgaaatcagtggagtagtaaacgcgtacataactcctggataacgtttagcagctgccgttcctattctagaccaaaaattcggtttcatgttttcgaaacggtattctgcaacaagtcgaggatcgtgttctacatatttggcggcattatccagtatctgcctattgatcttcatttcgttttcgattctggctatttcaaaataaaatcccgatgatagacctccagactttataatttcatctacgatgttcagcgccgtagtaactctaataatataggctgataagctaacatcataccctcctgtatatgtgaatatggcatgatttttgtccattacaagctcggttttaactttattgcctgtaataatttctctcatctgtaggatatctatttttttgtcatgcattgccttcaagacgggacgaagaaacgtaatatcctcaataacgttatcgttttctacaataactacatattctacctttttattttctaactcggtaaaaaaattagaatcccatagggctaaatgtctagcgatatttcttttcgtttcctctgtacacatagtgttacaaaaccctgaaaagaagtgagtatacttgtcatcatttctaatgtttcctccagtccactgtataaacgcataatccttgtaatgatctggatcatccttgactaccacaacatttcttttttctggcataacttcgttgtcctttacatcatcgaacttctgatcattaatatgctcatgaacattaggaaatgtttctgatggaggtctatcaataactggcacaacaataacaggagttttcaccgccgccatttagttattgaaattaatcatatacaactctttaatacgagttatattttcgtctatccattgtttcacattgacatatttcgacaaaaagatataaaatgcgtattccaatgcttctctgtttaatgaattactaaaatatacaaacacgtcactgtctggcaataaatgatatcttagaatattgtaacaatttattttgtattgcacatgttcgtgatctatgagttcttcttcgaatggcataggatctccgaatctgaaaacgtataaataggagttagaataataatatttgagagtattggtaatatataaactctttagcggtataattagtttttttctctcaatttctatttttagatgtgatggaaaaatgactaattttgtagcattagtatcatgaactctaatcaaaatcttaatatcttcgtcacacgttagctctttgaagtttttaagagatgcatcagttggttctacagatggagtaggtgcaacaattttttgttctacacatgtatgtactggagccattgttttaactataatggtgcttgtatcgaaaaactttaatgcagatagcggaagctcttcgccgcgactttctacgtcgtaattgggttctaacgccgatctctgaatggatactagttttctaagttctaatgtgattctctgaaaatgtaaatccaattcctccggcattatagatgtgtatacatcggtaaataaaactatagtatccaacgatcccttctcgcaaattctagtcttaaccaaaaaatcgtatataaccacggagatggcgtatttaagagtggattcttctaccgttttgttcttggatgtcatataggaaactataaagtccgcactactgttaagaatgattactaacgcaactatatagtttaaattaagcattttggaaacataaaataactctgtagacgatacttgactttcgaataagtttgcagacaaacgaagaaagaacagacctctcttaatttcagaagaaaactttttttcgtattcctgacgtctagagtttatatcaataagaaagttaagaattagtcggttaatgttgtatttcattacccaagtttgagatttcataatattatcaaaagacatgataatattaaagataaagcgctgactatgaacgaaatagctatatggttcgctcaagaatatagtcttgttaaacgtggaaacgataactgtatttttaatcacgtcagcggcatctaaattaaatataggtatatttattccacacactctacaatatgccacaccatcttcataataaataaattcgttagcaaaattattaattttagtgaaatagttagcgtcaactttcatagcttccttcaatctaatttgatgctcacacggtgcgaattccactctaacatcccttttccatgcctcaggttcatcgatctctataatatctagttttttgcgtttcacaaacacaggctcgtctctcgcgatgagatctgtatagtaactatgtaaatgataactagatagaaagatgtagctatatagatgacgatcctttaagagaggtataataactttaccccaatcagatagactgttgttatggtcttcggaaaaagaatttttataaatttttccagtattttccaaatatacgtacttaacatctaaaaaatccttaatgataataggaatggataatccgtctattttataaagaaatacatatcgcacattatacttttttttggaaatgggaataccgatgtgtctacataaatatgcaaagtctaaatattttttagagaatcttagttggtccaaattcttttccaagtacggtaatagatttttcatattgaacggtatcttcttaatctctggttctagttccgcattaaatgatgaaactaagtcactatttttataactaacgattacatcacctctaacatcatcatttaccagaatactgatcttcttttgtcgtaaatacatgtctaatgtgttaaaaaaaagatcatacaagttatacgtcatttcatctgtggtattcttgtcattgaaggataaactcgtactaatctcttctttaacagcctgttcaaatttatatcctatatacgaaaaaatagcaaccagtgtttgatcatccgcgtcaatattctgttctatcgtagtgtataacaatcgtatatcttcttctgtgatagtcgatacgttataaaggttgataacgaaaatatttttatttcgtgaaataaagtcatcgtaggattttggacttatattcgcgtctagtagatatgcttttatttttggaatgatctcaattagaatagtctctttagagtccatttaaagttacaaacaactaggaaattggtttatgatgtataatttttttagtttttatagattctttattctatacttaaaaaatgaaaataaatacaaaggttcttgagggttgtgttaaattgaaagcgagaaataatcataaattatttcattatcgcgatatccgttaagtttgtatcgtaatggcgtggtcaattacgaataaagcggatactagtagcttcacaaagatggctgaaatcagagctcatctaaaaaatagcgctgaaaataaagataaaaacgaggatattttcccggaagatgtaataattccatctactaagcccaaaaccaaacgagccactactcctcgtaaaccagcggctactaaaagatcaaccaaaaaggaggaagtggaagaagaagtagttatagaggaatatcatcaaacaactgaaaaaaattctccatctcctggagtcagcgacattgtagaaagcgtggccgctgtagagctcgatgatagcgacggggatgatgaacctatggtacaagttgaagctggtaaagtaaatcatagtgctagaagcgatctctctgacctaaaggtggctaccgacaatatcgttaaagatcttaagaaaattattactagaatctctgcagtatcgacggttctagaggatgttcaagcagctggtatctctagacaatttacttctatgactaaagctattacaacactatctgatctagtcaccgagggaaaatctaaagttgttcgtaaaaaagttaaaacttgtaagaagtaaatgcgtgcacttttttataaagatggtaaactctttaccgataataattttttaaatcctgtatcagacgataatccagcgtatgaggttttgcaacatgttaaaattcctactcatttaacagatgtagtagtatatgaacaaacgtgggaggaggcgttaactagattaatttttgtgggaagtgattcaaaaggacgtagacaatacttttacggaaaaatgcatgtacagaatcgcaacgctaaaagagatcgtatttttgttagagtatataacgttatgaaacgaattaattgttttataaacaaaaatataaagaaatcgtccacagattccaattatcagttggcggtttttatgttaatggaaactatgttttttattagatttggtaaaatgaaatatcttaaggagaatgaaacagtagggttattaacactaaaaaataaacacatagaaataagtcccgatgaaatagttatcaagtttgtaggaaaggacaaagtttcacatgaatttgttgttcataagtctaatagactatataaaccgctattgaaactgacggatgattctagtcccgaagaatttctgttcaacaaactaagtgaacgaaaggtatacgaatgtatcaaacagtttggtattagaatcaaggatctccgaacgtatggagtcaattatacgtttttatataatttttggacaaatgtaaagtccatatctcctcttccgtcaccaaaaaagttaatagcattaactatcaaacaaactgctgaagtggtaggtcatactccatcaatttcaaaaagagcttatatggcaacgactattttagaaatggtaaaggataaaaattttttagatgtagtatctaaaactacgttcgatgaattcctatctatagtcgtagatcacgttaaatcatctacggatggatgatatagatctttacacaaataattacaagaccgataaatggaaatggataagcgtatgaaatctctcgcaatgacagctttcttcggagagctaagcacattagatattatggcattgataatgtctatatttaaacgccatccaaacaataccattttttcagtggataaggatggtcagtttatgattgatttcgaatacgataattataaggcttctcaatatttggatctgaccctcactccgatatctggagatgaatgcaagactcacgcatcgagtatagccgaacaattggcgtgtgcggatattattaaagaggatattagcgaatatatcaaaactactccccgtcttaaacgatttataaaaaaataccgcaatagatcagatactcgtatcagtcgagatacagaaaagcttaaaatagctctagctaaaggcatagattacgaatatataaaagacgcttgttaataagtaaatgaaaaaaaactagtcgtttataataaaacacgatatggatgccaacgtagtatcattttctactattgcgacgtatatagacgctttagcgaagaatgcttcggaattagaacagaggtctaccgcatacgaaataaataatgaattggaactagtatttattaagccgccattgattactttgacaaatgtagtgaatatctctacgattcaggaatcgtttattcgatttaccgttactaataaggaaggtgttaaaattagaactaagattccattatctaaggtacatggtctagatgtaaaaaatgtacagttagtagatgctatagataacatagtttgggaaaagaaatcattagtgacggaaaatcgtcttcacaaagaatgcttgttgagactatcgacagaggaacgtcatatatttttggattacaagaaatatggatcctctatccgactagaattagtcaatcttattcaagcaaaaacaaaaaactttacgatagactttaagctaaaatattttctaggatccggtgcccagtctaaaagttctttgttgcacgctattaatcatccaaagtcaaggcctaatacatctctggaaatagaattcacacctagagacaatgaaacagttccatatgatgaactaataaaggaattgacgactctctcgcgtcatatatttatggcttctccagagaatgtaattctttctccgcctattaacgcgcctataaaaacctttatgttgcctaaacaagatatagtaggtttggatctggaaaatctatatgccgtaactaagactgacggcattcctataactatcagagttacatcaaacgggttgtattgttattttacacatcttggttatattattagatatcctgttaagagaataatagattccgaagtagtagtctttggtgaggcagttaaggataagaactggaccgtatatctcattaagctaatagagcctgtgaatgcaatcaatgatagactagaagaaagtaagtatgttgaatctaaactagtggatatttgtgatcggatagtattcaagtcaaagaaatacgaaggtccgtttactacaactagtgaagtcgtcgatatgttatctacatatttaccaaagcaaccagaaggtgttattctgttctattcaaagggacctaaatctaacattgattttaaaattaaaaaggaaaatactatagaccaaactgcaaatgtagtatttaggtacatgtccagtgaaccaattatctttggagaatcgtctatctttgtagagtataagaaatttagcaacgataaaggctttcctaaagaatatggttctggtaagattgtgttatataacggcgttaattatctaaataatatctattgtttggaatatattaatacacataatgaagtgggtattaagtccgtggttgtacctattaagtttatagcagaattcttagttaatggagaaatacttaaacctagaattgataaaaccatgaaatatattaactcagaagattattatggaaatcaacataatatcatagtcgaacatttaagagatcaaagcatcaaaataggagatatctttaacgaggataaactatcggatgtgggacatcaatacgccaataatgataaatttagattaaatccagaagttagttattttacgaataaacgaactagaggaccgttgggaattttatcaaactacgtcaagactcttcttatttctatgtattgttccaaaacatttttagacgattccaacaaacgaaaggtattggcgattgattttggaaacggtgctgacctggaaaaatacttttatggagagattgcgttattggtagcgacggatccggatgctgatgctatagctagaggaaatgaaagatacaacaaattaaactctggaattaaaaccaagtactacaaatttgactacattcaggaaactattcgatccgatacatttgtctctagtgtcagagaagtattctattttggaaagtttaatatcatcgactggcagtttgctatccattattcttttcatccgagacattatgctaccgtcatgaataacttatccgaactaactgcttctggaggcaaggtattaatcactaccatggacggagacaaattatcaaaattaacagataaaaagacttttataattcataagaatttacctagtagcgaaaactatatgtctgtagaaaaaatagctgatgatagaatagtggtatataatccatcaacaatgtctactccaatgactgaatacattatcaaaaagaacgatatagtcagagtgtttaacgaatacggatttgttcttgtagataacgttgatttcgctacaattatagaacgaagtaaaaagtttattaatggcgcatctacaatggaagatagaccgtctacaaaaaactttttcgaactaaatagaggagccattaaatgtgaaggtttagatgtcgaagacttacttagttactatgttgtttatgtcttttctaagcggtaaataataatatggtatgggttctgatctcccagttctaaatgcattaaataattccaatagagcgatttttgttcctataggaccttccaactgtggatactctgtattgttaatagatatattaatacttttgtcgggtaacagaggttctacgtcttctaaaaataaaagttttataacatctggcctgttcataaataaaaacttggcgattctatatatactcttattatcaaatctagccattgtcttatagatgtgagctactgtaggtgtaccatttgattttctttctaatactatatatttctctcgaagaagttcttgcacatcatctgggaataaaatactactgttgagtaaatcagttattttttttatatcgatattgatggacatttttatagttaaggataataagtatcccaaagtcgataacgacgataacgaagtatttatacttttaggaaatcacaatgactttatcagattaaaattaacaaaattaaaggagcatgtatttttttctgaatatattgtgactccagatacatatggatctttatgcgtcgaattaaatgggtctagttttcagcacggcggtagatatatagaggtggaggaatttatagatgctggaagacaagttagatggtgttctacatccaatcatatatctaaagatatacccgaagatatgcacactgataaatttgtcatttatgatatttatacgtttgattcgttcaagaataaacgattggtattcgtacaggtacctccgtcgttaggagatgatagtcatttgactaatccgttattgtcaccgtattatcgtaattcagtagccagacaaatggtcaatgatatgatttttaatcaagattcatttttaaaatatttattagaacatctgattagaagccactatagagtttctaaacatataacaatagttagatacaaggataccgaagaattaaatctaacgagaatatgttataatagagataagtttaaggcgtttgtattcgcttggtttaacggcgtttcggaaaatgaaaaggtactagatacgtataaaaaggtatctaatttgatataatgaattcagtgactgtatcacacgcgccatatactattacttatcacgatgattgggaaccagtaatgagtcaattggtagagttttataacgaagtagccagttggctgctacgagacgagacgtcgcctattcctgataagttctttatacagttgaaacaaccgcttagaaataaacgagtatgtgtgtgtggtatagatccgtatccgaaagatggaactggtgtaccgttcgaatcaccaaattttacaaaaaaatcaattaaggagatagcttcatctatatctagattaaccggagtaattgattataaaggttataaccttaatataatagacggggttataccctggaattattacttaagttgtaaattaggagaaacaaaaagtcacgcgatttactgggataagatttccaagttactgctgcagcatataactaaacacgttagtgttctttattgtttgggtaaaacagatttctcgaatatacgggccaagttagaatccccggtaactaccatagtcggatatcatccagcggctagagaccgccaattcgagaaagatagatcatttgaaattatcaacgttttactggaattagacaacaaggcacctataaattgggctcaagggtttatttattaatgctttagtgaaattttaacttgtgttctaaatggatgcggctattagaggtaatgatgttatctttgttcttaagactataggtgtcccgtcagcgtgcagacaaaatgaagatccaagatttgtagaagcatttaaatgcgacgagttagaaagatatattgagaataatccagaatgtacactattcgaaagtcttagggatgaggaagcatactctatagtcagaattttcatggatgtagatttagacgcgtgtctagacgaaatagattatttaacggccattcaagattttattatcgaggtgtcaaactgtgtagctagattcgcgtttacagaatgcggcgccattcatgaaaatgtaataaaatccatgagatctaatttttcattgactaagtctacaaatagagataaaacaagttttcatattatctttttagatacgtataccactatggatacattgatagctatgaaacgaacactattagaattaagtagatcatctgaaaatccactaaccagatcgatagacactgccgtatataggagaaaaacaactcttcgggttgtaggtactaggaaaaatccaaattgcgacactattcatgtaatgcaaccaccgcatgataatatagaagattacctattcacttacgtggatatgaacaacaatagttattacttttctctacaacaacgattggaggatttagttcctgataagttatgggaaccagggtttatttcattcgaagacgctataaaaagagtttcaaaaatattcattaattctataataaactttaatgatctcgatgaaaataattttacaacggtaccactggtcatagattacgtaacaccttgtgcattatgtaaaaaacgatcgcataaacatccgcatcaactatcgttggaaaatggtgctattagaatttacaaaactggtaatccacatagttgtaaagttaaaattgttccgttggatggtaataaactgtttaatattgcacaaagaattttagacactaactctgttttattaaccgaacgaggagaccatatagtttggattaataattcatggaaatttaacagcgaagaacccttgataacaaaactaattttgtcaataagacatcaactacctaaggaatattcaagcgaattactctgtccaagaaaacgaaagactgtagaagctaacatacgagacatgttagtagattcagtggagaccgatacctatccggataaacttccgtttaaaaatggtgtattggacctggtagacggaatgttttactctggagatgatgctaaaaaatatacgtgtactgtatcaaccggatttaaatttgacgatacaaagttcgtcgaagacagtccagaaatggaagagttaatgaatatcattaacgatatccaaccattaacggatgaaaataagaaaaatagagagctatatgaaaaaacattatctagttgtttatgcggtgctaccaaaggatgtttaacattcttttttggagaaactgcaactggaaagtcgacaaccaaacgtttgttaaagtctgctatcggtgacctgtttgttgagacgggtcaaacaattttaacagatgtattggataaaggacctaatccatttatcgctaacatgcatttgaaaagatctgtattctgtagcgaactacctgattttgcctgtagtggatcaaagaaaattagatctgacaatattaaaaagttgacagaaccttgtgtcattggaagaccgtgtttctccaataaaattaataatagaaaccatgcgacaatcattatcgatactaattacaaacctgtttttgataggatagataacgcattaatgagaagaattgccgtcgtgcgattcagaacacacttttctcaaccttctggtagagaggctgctgaaaataatgacgcgtacgataaagtcaaactattagacgaggggttagatggtaaaatacaaaataatatatatagatttgcatttctatacttgttggtgaaatggtacaaaaaatatcatgttcctattatgaaactatatcctacacccgaagagattcctgactttgcattctatctcaaaataggtactctgttggtatctagctctgtaaagcatattccattaatgacggacctctccaaaaagggatatatattgtacgataatgtggtcactcttccgttgactactttccaacagaaaatatccaagtattttaattctagactatttggacacgatatagagagcttcatcaatagacataagaaatttgccaatgttagtgatgaatatctgcaatatatattcatagaggatatttcatctccgtaaatatatgctcatatatttatagaagatatcacatatctaaatgaataccggaatcatagatttatttgataatcatgttgatagtataccaactatattacctcatcagttagctactctagattatctagttagaactatcatagatgagaacagaagcgtgttattgttccatattatgggatcaggtaaaacaataatcgctttgttgttcgccttggtagcttccagatttaaaaaggtttacattctagtgccgaacatcaacatcttaaaaattttcaattataatatgggtgtagctatgaacttgtttaatgacgaattcatagctgagaatatctttattcattccacaacaagtttttattctcttaattataacgataacgtcattaattataacggattatctcgctacaataactctatttttatcgttgatgaggcacataatatctttgggaataatactggagaacttatgaccgtgataaaaaataaaaacaagattccttttttactattgtctggatctcccattactaacacacctaatactctgggtcatattatagatttaatgtccgaagagacgatagattttggtgaaattattagtcgtggtaagaaagtaattcagacacttcttaacgaacgcggtgtgaatgtacttaaggatttgcttaaaggaagaatatcatattacgaaatgcctgataaagatctaccaacgataagatatcacggacgtaagtttctagatactagagtagtatattgtcacatgtctaaacttcaagagagagattatatgattactagacgacagctatgttatcatgaaatgtttgataaaaatatgtataacgtgtcaatggcagtattgggacaacttaatctgatgaataatttagatactttatttcaggaacaggataaggaattgtacccaaatctgaaaataaataatggcgtgttatacggagaagaattggtaacgttaaacattagttccaaatttaaatactttattaatcggatacagacactcaacggaaaacattttatatacttttctaattctacatatggcggattggtaattaaatatatcatgctcagtaatggatattctgaatataatggttctcagggaactaatccacatatgataaacggcaaaccaaaaacatttgctatcgttactagtaaaatgaaatcgtctttagaggatctattagatgtgtataattctcctgaaaacgatgatggtagtcaattgatgtttttgttttcatcaaacattatgtccgaatcctatactctaaaagaggtaaggcatatttggtttatgactatcccagatactttttctcaatacaaccaaattcttggacgatctattagaaaattctcttacgccgatatttctgaaccagttaatgtatatcttttagccgccgtatattccgatttcaatgacgaagtgacgtcattaaacgattacacacaggatgaattaattaatgttttaccatttgacatcaaaaagctgttgtatctaaaatttaagacgaaagaaacgaatagaatatactctattcttcaagagatgtctgaaacgtattctcttccaccacatccatcaattgtaaaagttttattgggagaattggtcagacaatttttttataataattctcgtattaagtataacgataccaagttacttaaaatggttacatcagttataaaaaataaagaagacgctaggaattacatagatgatattgtaaacggtcacttctttgtatcgaataaagtatttgataaatctcttttatacaaatacgaaaacgatattattacagtaccgtttagactttcctacgaaccatttgtttggggagttaactttcgtaaagaatataacgtggtatcttctccataaaactgatgagatatataaagaaataaatgtcgagctttgttaccaatggatacctttccgttacattggaaccacacgagctgacgttagacataaaaactaatattaggaatgccgtatataagacgtatctccatagagaaattagtggtaaaatggccaagaaaatagaaattcgtgaagacgtggaattacctctcggcgaaatagttaataattctgtagttataaacgttccgtgtgtaataacctacgcgtattatcacgttggggatatagtcagaggaacattaaacatcgaagatgaatcaaatgtaactattcaatgtggagatttaatctgtaaactaagtagagattcgggtactgtatcatttagcgattcaaagtactgcttttttcgaaatggtaatgcgtatgacaatggcagcgaagtcactgccgttctaatggaggctcaacaaggtatcgaatctagttttgtttttctcgcgaatatcgtcgactcataaaaaagagaatagcggtaagtataaacacgaatactatggcaataattgcgaatgttttattctcttcgatatatttttgataatatgaaaaacatgtctctctcaaatcggacaaccatctcataaaatagttctcgcgcgctggagaggtagttgccgctcgtataatctctccagaataatatacttgcgtgtcgtcgttcaatttatacggatttctatagttctctgttatataatgcggtttgccctcatgattagacgacgacaatagtgttctaaatttagatagttgatcagaatgaatgtttattggcgttggaaaaattatccatacagcgtctgcagagtggttgatagttgttcctagatatgtaaaataatccaacttactaggcagcaaattgtctagataaaatactgaatcaaacggtgcagacgtattggcggatctaatggaatccaattgattaactatcttttgaaaatatacatttttatgatccaatacttgtaagaatatagaaataatgataagtccatcatcgtgtttttttgcctcttcataagaactatattttttcttattccaatgaacaagattaatctctccagagtatttgtacacatctatcaagtgattggatccataatcgtcttcctttccccaatatatatgtagtgatgataacacatattcattggggagaaaccctccacttatatatcctcctttaaaattaatccttactagttttccagtgttctggatagtggttggtttcgactcattataatgtatgtctaacggcttcaatcgcgcgttagaaattgcttttttagtttctatattaataggagatagttgttgcggcatagtaaaaatgaaatgataactgtttaaaaatagctcttagtatgggaattacaatggatgaggaagtgatatttgaaactcctagagaattaatatctattaaacgaataaaagatattccaagatcaaaagacacgcatgtgtttgctgcgtgtataacaagtgacggatatccgttaataggagctagaagaacttcattcgcgttccaggcgatattatctcaacaaaattcagattctatctttagagtatccactaaactattacggtttatgtactacaatgaactaagagaaatctttagacggttgagaaaaggttctatcaacaatatcgatcctcactttgaagagttaatattattgggtggtaaactagataaaaaggaatctattaaagattgtttaagaagagaattaaaagaggaaagtgatgaacgtataacagtaaaagaatttggaaatgtaattctaaaacttacaacacgggataaattatttaataaagtatatataagttattgcatggcgtgttttattaatcaatcgttggaggatttatcgcatactagtatttacaatgtagaaattagaaagattaaatcattaaatgattgtattaacgacgataaatacgaatatctgtcttatatttataatatgctagttaatagtaaatgaacttttacagatctagtataattagtcagattattaagtataatagacgactagctaagtctattatttgcgaggatgactctcaaattattacactcacggcattcgttaaccaatgcctatggtgtcataaacgagtatccgtgtccgctattttattaactactgataacaaaatattagtatgtaacagacgagatagttttctctattctgaaataattagaactagaaacatgtttagaaagaaacgattatttctgaattattccaattatttgaacaaacaggaaagaagtatactatcgtcatttttttctctagatccagctactactgataatgatagaatagacgctatttatccgggtggcatacccaaaaggggtgagaatgttccagagtgtttatccagggaaattaaagaagaagttaatatagacaattcttttgtattcatagacactcggttttttattcatggcatcatagaagataccattattaataaattttttgaggtaatcttctttgtcggaagaatatctctaacgagtgatcaaatcattgatacatttaaaagtaatcatgaaatcaaggatctaatatttttagatccgaattcaggtaatggactccaatacgaaattgcaaaatatgctctagatactgcaaaacttaaatgttacggccatagaggatgttattatgaatcattaaaaaaattaactgaggatgattgattaaaaaatataaattaatttaccatcgtgtatttttataacgggattgtccggcatatcatgtagatagttaccgtctacatcgtatactcgaccatctacgcctttaaatcctctatttattgacattaatctattagaattggaataccaaatattagtaccctcaattagtttattggtaatattttttttagacgatagatcgatggctcttgaaaccaaggttttccaaccggactcattgtcgatcggtgagaagtctttttcattagcatgaatccattctaatgatgtatgtttaaacactctaaacaattggacaaattcttttgatttgctttgaatgatttcaaataggtcttcgtctacagtaggcataccattagataatctagccattataaagtgcacgtttacatatctacgttctggaggagtaagaacgtgactattgagacgaatggctcttcctactatctgacgaagagacgcctcgttccatgtcatatctaaaatgaagatatcattaattgagaaaaaactaataccctcgcctccactagaagagaatacgcatgttttaatgcattctccgttagtgtttgattcttggttaaactcagccaccgccttgattctagtatcttttgttctagatgagaactctatattagagataccaaagactttgaaatatagtaataagatttctattcctgactgattaacaaatggttcaaagactagacatttaccatgggatgctaatattcccaaacatacatctataaatttgacgcttttctcttttaattcagtaaatagagagatatcagccgcactagcatcccctttcaatagttctccctttttaaaggtatctaatgcggatttagaaaactctctatctcttaatgaatttttaaaatcattatatagtgttgctatctcttgcgcgtattcgcccggatcacgattttgtctttcaggaaagctatcgaacgtaaacgtagtagccatacgtctcagaattctaaatgatgatatacctgtttttatttcagcgagtttagccttttgataaatttcttcttgctttttcgacatattaacgtatcgcattaatactgttttcttagcgaatgatgcagacccttctacgtcatcaaaaatagaaaactcgttattaactatatacgaacatagtcctcctagtttggagactaattctttttcatcgactagacgtttattctcaaatagcgattggtgttgtaaggatcctggtcgtagtaagttaaccaacatggtgaattcttgcacactattgacgataggtgtagccgataaacaaatcatcttatggttttttaacgcaatggtcttagataaaaaattatatactgaacgagtaggacggatcttaccatcttctttgattaatgatttagaaatgaagttatgacattcatcaataatgacgcatattctactcttggaattaatagttttgatattagtaaaaaatttatttctaaaattttgatcatcgtaattaataaaaatacaatccttcgttatctctggagcgtatctgagtatagtgttcatccaaggatcttctatcaaagcctttttcaccaataagataatagcccaattcgtataaatatccttaagatgtttgagaatatatacagtagtcattgttttaccgacacccgtttcatggaacaataaaagagaatgcatactgtctaatcctaagaaaactcttgctacaaaatgttgataatccttgaggcgtactacgtccgaccccatcatttcaacgggcatattagtagttctgcgtaaggcataatcgatataggccgcgtgtgatttactcatttatgagtgataagtaataactatgttttaaaaatcacagcagtagtttaactagtcttctctgatgtttgttttcgatactttttgaatcagaagtcatactagaataaagcaacgagtgaacgtaatagagagcttcgtatactctattcgaaaactctaagaacttattaatgaattccgtatccactggattgtttaaaatactaaattgaacactgttcacatccttccaagaagaagacttagtgacggacttaacatgagacataaataaatccaaattttttttacaaacatcactagccaccataatggcgctatctttcaaccagctatcgcttacgcattttagcagtctaacatttttaaagagactacaatatattctcatagtatcgattacacctctaccgaataaagttggaagtttaataatacaatatttttcgtttacaaaatcaaataatggtcgaaacacgtcgaaggttaacatcttataatcgctaatgtatagattgttttcagtgagatgattattagatttaatagcatctcgttcacgtttgaacagtttattgcgtgcgctgaggtcggcaactacggcgtccgctttagtactcctcccataatactttacgctattaatctttaaaatttcatagactttatctagatcgctttctggtaacatgatatcatgtgtaaaaagttttaacatgtcggtcggcattctatttagatcattaactctagaaatctgaagaaagtaattagctccgtattccagactaggtaatgggcttttacctagagacagattaagttctggcaatgtttcataaaatggaagaaggacatgcgttccctcccggatattttttacaatttcatccatttacaactctatagtttgttttcattattattagttattatctcccataatcttggtaatacttaccccttgatcgtaagataccttatacaggtcattacatacaactaccaattgtttttgtacataatagattggatggttgacatccatggtggaataaactactcgaacagatagtttatctttccccctagatacattagccgtaatagttgtcggcctaaagaatatctttggtgtaaagttaaaagttagggttcttgttccattattgctttttgtcagtagttcattataaattctcgagatgggtccgttctctgaatatagaacatcatttccaaatctaacttctagtctagaaataatatcggtcttattcttaaaatctattcccttgatgaagggatcgttaatgaacaaatccttggcctttgattcggctgatctattatctccgttatagacgttacgttgactagtccaaagacttacaggaatagatgtatcgatgatgttgatactatgtgatatgtgagcaaagattgttctcttagtggcatcactatatgttccagtaatggcggaaaactttttagaaatgttatatataaaagaattttttcgtgttccaaacattagcagattagtatgaagataaacactcatattatcaggaacattatcaatttttacatacacatcagcatcttgaatagaaacgataccatcttctggaacctctacgatctcggcagactccggataaccagtcggtgggccatcgctaacaataactagatcatccaacaatctactcacatatgcatctatataatctttttcatcttgtgagtaccctggatacgaaataaatttattatccgtatttccataataaggtttagtataaacagagagagatgttgccgcatgaacttcagttacagtcgccgttggttggtttatttgacctattactctcctaggtttctctataaacgatggtttaatttgtacattcttaaccatatatccaataaagctcaattcaggaacataaacaaattctttgttgaacgtttcaaagtcgaacgaagagtcacgaataacgatatcggatactggattgaaggttaccgttacggtaatttttgaatcggatagtttaagactgctgaatgtatcttccacatcaaacggagttttaatataaacgtatactgtagatggttctttaatagtgtcattaggagttaggccaatagaaatatcattaagttcactagaatatccagagtgtttcaaagcaattgtattattgatacaattattatataattcttcgccctcaatttcccaaataacaccgttacacgaagagatagatacgtgattaatacatttatatccaacatatggtacgtaactgaatcttcccatacctttaacttctggaagttccaaactcagaaccaaatgattaagcgcagtaatatactgatccctaatttcgaagctagcgatagcctgattgtctggaccatcgtttgtcataactccggatagagaaatatattgcggcatatacaaagttggaatttgactatcgactgcgaagacattagaccgtttaatagagtcatccccaccgatcaaagaattaatgatagtattattcattttctatttaaaatggaaaaagcttacaataaactccgtagagaaatatctataatttgtgagttttccttaaagtaacagcttccgtaaacgccgtctttatctcttagtaggtttattgtatttatgaccttttccttatcttcatagaatactaaaggcaacaaagaaatttttggttcttctctaagagctacgtgagacttaaccatagaagccaacgaatccctacatattttagaacagaaataccctacttcaccacccttgtatgtctcaatactaataggtctaaaaaccaaatcttgattacaaaaccaacacttatcaattacactatttgtcttaatagacacatctgccatagatttataatactttggtagtatacaagcgagtgcttcttctttagcgggcttaaagactgctttaggtgctgaaataaccacatctggaaggcttactcgcttagccatttaattacggaactatttttttatacttctaatgagcaagtagaaaacctctcatctacaaaaacgtactcgtgtccataatcctctaccatagttacacgttttttagatctcatatgtgctaaaaagttttcccatactaattggttactattatttttcgtataatttttaacagtttgaggttttagatttttagttacagaagtgatatcgaatattttatccaaaaagaatgaataattaattgtcttagaaggagtgttttcttggcaaaagaataccaagtgcttaaatatttctactacttcattaatcttttctgtactcagattcagtttctcatcttttacttgattgattatttcaaagactaacttataatcctttttatttattctctcgttagccttaagaaaactagatacaaaatttgcatctacatcatccgtggatatttgatttttttccatgatatccaagagttccgagataatttctccagaacattgatgagacaataatctccgcaatacatttctcaaatgaataagtttattagacacgtggaagtttgactttttttgtacctttgtacatttttgaaataccgactcgcaaaaaatacaatattcatatccttgttcagatactataccgttatgtctacaaccgctacataatcgtagattcatgttaacactctacgtatctcgtcgtccaatattttatataaaaacattttatttctagacgttgccagaaaatcctgtaatatttttagttttttgggctgtgaataaagtatcgccctaatattgttaccgtcttccgccaatatagtagttaaattatccgcacatgcagaagaacaccgcttaggcggattcagtacaatgttatatttttcgtaccaactcatttaaatatcataatctaaaatagttctgtaatatgtctagcgctaatatattgatcataatcctgtgcataaattaagatacaacaatgtctcgaaatcatcgacatggcttcttccatagttagaagatcgtcgtcaaagttagcaacgtgattcatcaacatttgctgttttgaggcagcaaatactgaaccgtcgccattcaaccattcataaaaaccatcgtctgaatccattgataatttcttgtactggtttttgagagctcgcatcaatctagcatttctagctcccggattgaaaacagaaagaggatcgtacatccagggtccattttctgtaaatagaatcgtataatgtcccttcaagaagatatcagacgatccacaatcaaagaattggtctccgagtttgtaacaaactgcggactttaacctatacatgataccgtttagcataatttctggtgatacgtcaatcggagtatcatctattagagatctaaagccggtgtaacattctccaccaaacatattcttattctgacgtcgttctacataaaacatcattgctccattaacgataacaggggaatgaacagcactacccatcacattagttcccaatggatcaatgtgtgtaactccagaacatcttccatagcctatgttaggaggagcgaacaccactcttccactattgccatcgaatgccatagaataaatatccttggaattgatagaaatcggactgtcggatgttgtgatcatcttcataggattaacaactatgtatggtgccgcctgaagtttcatatcgtaactgatgccgtttataggtctagccacagaaaccaacgtaggtctaaatccaactatagacaaaatagaagccaatatctgttcctcatctgtcataacttgagagcatccagtatgaataatcttcattagatggggatctaccgcatcatcatcgttacaataaaaaattcccattctaatgttcataattgcttttctaatcatggtatgcatgtttgctctctgaatctctgtggaaattagatctgatacacctgtaatcactatcggattatcctccgtaagacgattaaccaacaacatataattataagactttacttttctaaattcataaagttgctggattaggctataggtgtctccatgtacatacgcgttctcgagcgcaggaagtttaataccgaatagtgccatcagaataggatgaatatagtaattagtttctggttttctataaataaaagacaaatcttgtgaactagacatatcggtaaaatgcatggattggaatcgtgtagtcgacagaagaatatgatgattagatggagagtatattttatctaactctttgagttggtcaccgattctaggactagctcgagaatgaataagtactaaaggatgagtacatttcacagaaacactagcattgttcaatgtgctctttacatgggtaaggagttgaaatagctcgtttctatttgttctgacaatatttagtttattcataatgttaagcatatcctgaatagtaaagttagatgtgtcatacttgttagtagttagatatttagcaattgcattcccatcatttctcaatctcgtactccaatcatgcgtggatgctacttcgtcgatggaaaccatacaatcctttttgataggctgttgagattgatcatttcctgcacgtttaggtttggtacgttgatttctagcccctgcggatataaagtcatcgtctacaatttgggacaatgaattgcatacactacaagacaaagatttatcagaagtgtgaatatgatcttcatctaccaaagaaagagtttgattagtataactagattttagtcctgcgttagatgttaaaaaaacatcgctattgaccacggcttccattatttatattcgtagtttttactcgaaagcgtgattttaatatccaatcttattacttttggaatcgttcaaaacctttgactagttgtagaatttgatctattgccctacgcgtatactcccttgcatcatatacgttcgtcaccagatcgtttgtttcggcctgaagttggtgcatatctctttcaacattcgacatgagatccttaagggccatatcgtctagattttgttgagatgctgctcctggatttggattttgttgtgctgttgtacatactgtaccaccagtaggtgtaggagtacatacagtggccacaataggaggttgagaaagtgtaaccgttggagtagtacaagaaatacttccatccgattgttgtgtacatgtagttgttggtaacgtctgagaaggttgggtagatggcggcgtcgtcgttttttgatctttattaaatttagagataatatcctgaacagcattgctcggcgtcaacgctggaaggagtgaactcgccggcgcatcagtatcttcagacagccaatcaaaaagattagacatatcagatgatgtattagtttgttgtcgtggttttggtgtaggagcagtactactaggtagaagaataggagccgatgtagctgttggaaccggctgtggagttatatgaatagttggttgtagcggttggataggctgtctgctggcggccatcatattatctctagctagttgttctcgcaactgtctttgataatacgactcttgagactttagtcctatttcaatcgcttcatcctttttcgtatccggatccttttcttcagaataatagattgacgactttggtgtagaggattctgccagcctctgtgagaacttgttaaagaagtccatttaaggctttaaaattgaattgcgattataagattaaatggcagacacagacgatattatcgactatgaatccgatgatctcaccgaatacgaggatgatgaagaagaggaagaagatggagagtcactagaaactagtgatatagatcccaaatcttcttataagattgtagaatcagcatccactcatatagaagatgcgcattccaatcttaaacatatagggaatcatatatctgctcttaaacgacgctatactagacgtataagtctatttgaaatagcgggtataatagcagaaagctataacttgcttcaacgaggaagattacctctagtttcagaattttctgacgaaacgatgaagcaaaatatgctacatgtaattatacaagagatagaggagggttcttgtcctatagtcatcgaaaagaacggagaattgttgtcggtaaacgattttgacaaagatggtctaaaattccatctagactatattatcaaaatttggaaacttcaaaaacgatattagaatttatacgaatatcgttctctaaatgtcacaatcaagtctcgcatgttcagcaatttattgtcgtactttatatcgtgttcattaacgatatcttgcaaaatagtaatgattctatcttccttcgatagatattcttcagagattattgtcttatattctttcttgttatcagatatgaatttgataagactttgaacattattgatacccgtctgtttaattttttctacagatattttagttttggcagattctatcgtatctgtcaatagacatccaacatcgacattcgacgtcaattgtctataaatcaacgtataaattttagaaataacattagcgaattgttgtgcgttgatgtcgttattctgaaacagtatgattttaggtagcattttcttaacaaagagaacgtatttattgttactcagttgaacagatgatatatccagattactaacgcatctgattccgtataccaaactttcagaagaaatggtatacaattgtttgtattcattcaatgtctctttttcagaaattagtttagagtcgaatactgcaataattttcaagagatagttttcatcagataagattttatttagtgtagatatgataaaactattgttttgttggagaacttgatacgccgcgttctctgtagtcgacgctctcaaatgggaaacaatctccattatttttttggaatcggatactatatcttcggtatcttgacgcagtctagtatacatagagttaagagagattagagtttgtacattaagcaacatgtctctaaatgtggctacaaacttttcctttttcacatcatctagtttattatataccgatttcacaacggcaccagatttaaggaaccagaatgaaaaactctgataactacaatatttcatcatagttacgattttatcatcttctatagttggtgtaatagcgcatacctttttctccaagactggaaccaacgtcataaaaatgtttaaatcaaaatccatatcaacatctgatgcgctaagaccagtctcgcgttcaagattatctttactaatggtgacgaactcatcgtataaaactctaagtttgtccattatttatttacagatttagttgtttaatttatttgtgctcttccagagttgggatagtatttttctaacgtcggtattatattattaggatctacgttcatatgtatcataatattaatcatccacgttttgataaatctatctttagcttctgaaataacgtatttaaacaaaggagaaaaatatttagctacggcatcagacgcaataacattttttgtaaatgtaacgtatttagacgacagatcttcgttaaaaagttttccatctatgtagaatccatcggttgttaacaccattcccgcgtcagattgaataggagtttgaatagtttgttttggaaatagatccttcaataacttatagttgggtgggaaaaaatcgattttatcactagactctttcttttttactatcattacctcatgaactatttcttgaatgagtatatgtattttctttcctatatcggacgcgttcattggaaaatataccatgtcgttaactataagaatatttttatcctcgtttacaaactgaataatatcagatgtagttcgtaaacgaactatatcatcaccagcacaacatctaactatatgatatccactagtttcctttagccgtttattatcttgttccatattagcagtcattccatcatttaagaaggcgtcaaaaataatagggagaaatgacattttggattctgttacaactttaccaaaattaaggatatacggacttactatctttttctcaacgtcaatttgatgaacacacgatgaaaatgtgcttctatgagattgatcatgtagaaaacaacaagggatacaatatttccgcatatcatgaaatatattaagaaatcccaccttattatatttccccaaaggatccatgcacgtaaacattatgccgttatcattaataaagacttctttctcatcggatctgtaaaagttgttactgatttttttcattccaggatctagataattaataatgatgggttttctattcttattctttgtattttggcatatcctagaccagtaaacagtttccactttggtaaaatcagcagacttttgaacgctattaaacatggcattaatggcaataactaaaaatgtaaaatatttttctatgttaggaatatggtttttcactttaatagatatatggtttttggccaaaatgatagatatttttttatccgaggatagtaaaatattattagtcgccgtctctataaaaatgaagctagtctcgatatccaattttattctagaattgataggagtcgccaaatgtaccttatacgttatatctcccttgatgcgttccatttgtgtatctatatcggacacaagatctgtaaatagttttacgttattaatcatcacggtatcgccgtcgctagataacgctaatgtaccatccaagtcccaaatggagagatttaactgttcatcgtttagaataaaatgattaccggtcatattaataaagtgttcatcgtatctagataacaacgacttataattaatgtccaagtcttgaactcgctgaatgatcttttttaacccagttagttttagattggtacgaaatatattgttaaactttgattctacagtaatgtccaaatctagttgtggaaatacttccatcaacattgtttcaaacttgataatattattatctacatcttcgtacgatccaaattccggaatagatgtatcgcacgctctggccacccagataaccaaaaagtcacacgctccaggatatacattgtataaaaagctatcgttttttagtagggtttttttctgcgtgtatacgaagggattaaaaatagtattatcaacgtaactatattccaaattattcttatgagaatagataataatatcgtccttaatatctaacaaatttcctaaatatccctttaattgagtcattcgaagcgtcaatagaatatgtctcttaactatttccggctgttgtatatttaaatgacttcgtaaaaaataatatatgggcgacttctcatctatgtaatcatatggagtgagatatagggctcgttctacctcctgccccttacccacctgtaataccaattgcggacttactatatatcgcatatttatatcgtggggtaaagtgaaaatctactaccgatgatgtaagtcttacaatgttcgaaccagtaccagatcttaatttggaggcctccgtagaactaggggaggtaaatatagatcaaacaacacctatgataaaggagaatagcggttttatatcccgcagtagacgtctattcgcccatagatctaaggatgatgagagaaaactagcactacgattctttttacaaagactttattttttagatcatagagagattcattatttgttcagatgcgttgacgctgtaaaagacgtcactattaccaaaaaaaataacattatcgtggcgccttatatagcacttttaactatcgcatcaaaaggatgcaaacttacagaaacaatgattgaagcattctttccagaactatataatgaacatagtaagaaatttaaattcaactctcaagtatccatcatccaagaaaaactcggataccagtttggaaactatcacgtttatgattttgaaccgtattactctacagtagctctggctattcgagatgaacattcatctggcatttttaatatccgtcaagagagttatctggtaagttcattatctgaaataacatatagattttatctaattaatctaaaatctgatcttgttcaatggagtgctagtacgggcgctgtaattaatcaaatggtaaatactgtattgattacagtgtatgaaaagttacaactggtcatagaaaatgattcacaatttacatgttcattggctgtggaatcaaaacttccaataaaattacttaaagatagaaatgaattatttacaaaattcattaacgagttaaaaaagaccagttcattcaagataagcaaacgcgataaggatacgctactaaaatattttacttaggactggagttagaatttatagacgactcatttcgtttatcattgttactattattactattactatcattattagtgttggcattattagtattcttcttgtcatcttgttcagaaatatacagcaatgctatacctaatactaaatacattatcatgctcgcaatggctctaacaacaacgaaccaaaatgaatttggtcgtagcttttgttcacaaaaatacataaagaaatgtctacataaatctatggcgccattggctacttgaaatagcgccagtcctcctacagattttaatatagctgtataacatgacatttattcatcatcaaaagagacagagtcaccatctgtcatatttagattttttttcatgtgttcaaagtatcctctactcatttcattataatagtttatcatacttagaattttaggacggatcaatgagtaagacttgactagatcgtcagtagtaatttgtgcatcgtctattctgcatccgcttcgtcgaataatgtatagcatcgctttgagattctccatagctatcaagtctttatacaatgacatggaaatatctgtgaatactttatacttctccaacatcgatgccttaacatcatcgcctactttagcattgaaaatacgttctattgtgtagatggatgtagcaagatttttaaacaacaatgccatcttacacgatgattgcctcaagtctccaatcgtttgtttagaacgattagctacagagtccaatgcttggctgactagcatattattatctttagaaattgtattcttcaatgaggcgtttatcatatctgtgatttcgttagtcatattacagtctgactgggttgtaatgttatccaacatatcacctatggatacggtacacgtaccagcatttgtaataatcctatctaagatgttgtatggcattgcgcagaaaatatcttctcctgtaatatctccactctcgataaatctactcagattattcttaaatgccttattctctggagaaaagatatcagtgtccatcatttcattaatagtatacgcagaaaagataccacgagtatcaattctatccaagatacttatcggttccgagtcacagataatggtttcctctccttcgggagatcctgcatagaaatatctaggacaatagtttctatactgtctgtaactctgataatctctaaagtcactaactgataccatgaaattgagaagatcaaacgctgaagtaattaatttttctgcctcgtttttactacaactagttttcatcaatgtagtgacgatgtattgtttagttacttttggtctaatactgatgatagagatattattgcttcccataatggatcttctagtagtcaccttaaagcccattgatgcgaatagcagatagataaagtcttggtatgactcctttctaatatagtacggactacctttgtcacccaactttatacccacataagccataacaacctctttaatagccgtttcatgaggtttatcagccatgagcctgagtagttggaagaatctcatgaatcccgtctcagaaagtcctatatgcatgatagatttatctttcctgggaaactctcgtatagtcatagatgaaatactctttaaagtttctgaaataagattagtaacagtcttacctccgactactctaggtaacaaacaaactctaataggtgttttctctgcggagataatatcagaaaggatagagcaataagtagtattattgtgattataaagaccgaatacataacaggtagaatttataaacatcatgtcctgaaggtttttagacttgtattcctcgtaatccataccgtcccaaaacatggatttggtaactttgatagccgtagatctttgttccttcgccaacaggttaaagaaattaataaagaatttgttgtttctatttatgtccacaaattgcacgtttggaagcgccacggttacattcactgcagcattttgaggatcgcgagtatgaagtacgatgttattgtttactggtatatctggaaagaaatctaccagtctaggaataagagattgatatcgcatagaaatagtaaagtttataatctcatcatcgaagagcattttgttaccattgtaataaatatccactctgtcatatgtataaatgaagtactgttcaaacatgatgagatgtttatatgttggcatagtagtgagatcgacgtttggtaatggcaatgtattaagattaactccataatgtctagcagcatctgcgatgttataagcgtcgtcaaagcggggtcgatcttgtattgttatatattgtctaacacctataagattatcaaaatcttgtctgcttaatacaccgttaacaatttttgccttgaattcttttattggtgcattaataacatccttatagaggatgttaaacaaataagtgttatcaaagttaagatctggatatttcttttctgctagaacatccattgagtcggagccatctggtttaatataaccaccgataaatctagctctgtattctgtatccgtcaatctaatattaagaaggtgttgagtgaaaggtggaagatcgtaaaagctgtgagtattaatgataggattagtttccgaactaatgttaattggggtattaataatatctatatttccagcgttaagtgtaacattaaacagttttaattcacgtgacgtggtatcaattaaataattaatgcccaatttggatatagcagcctgaagctcatcttgtttagttacggatcctaatgagttattaagcaatatatcgaacggatgaacgaaggttgttttaagttggtcacatactttgtaatctagacatagatgcggaagaacggtagaaactatacgaaataaatattcagagtcctctaattgatcaagagtaactattgacttaataggcatcatttatttagtattaaatgacgaccgtaccagtgacggatatacaaaacgatttaattacagagttttcagaagataattatccatctaacaaaaattatgaaataactcttcgtcaaatgtctattctaactcacgttaacaacgtggtagatagagaacataatgccgccgtagtgtcatctccagaggaaatatcctcacaacttaatgaagatctatttccagatgatgattcaccggccactattatcgaacgagtacaacctcatactactattattgacgatactccacctcctacgtttcgtagagagttattaatatcggaacaacgtcaacaacgagaaaaaagatttaatattacagtatcgaaaaatgctgaagcaataatggaatctagatctatgataacttctatgccaacacaaacaccatccttgggagtagtttatgataaagataaaagaattcagatgttagaggatgaagtggttaatcttagaaatcaacgatctaatacaaaatcatctgataatttagataattttaccaaaatactatttggtaagactccgtacaaatcaacagaagttaataagcgtatagccatcgttaattatgcaaatttgaacgggtcccccttatcagtcgaggacttggatgtttgttcggaggatgaaatagatagaatctataaaacgattaaacaatatcacgaaagtagaaaacgaaaaattatcgtcactaacgtgattattattgtcataaacattatcgagcaggcattgctaaaactcggatttgaagaaatcaaaggactgagtaccgatatcacttcagaaattatcgatgtggagatcggagatgactgcgatgctgtagcatctaaactaggaatcggtaacagtccggttcttaatattgtattgtttatactcaagatattcgttaaacgaattaaaattatttaatttaatacattcccatatccagacaacaatcgtctggattaatctgttcctgtcgtctcataccggacgacatattaatctttttattagtgggcatctttttagatggtttctttttcccagcattaactgagtcgatacctagaagatcgtgattgatctctccgaccattccacgaacttctaattggccgtctctgacggtaccataaactattttaccagcattagtaacagcttggacaatctgaccatccatcgcattgtacgatgtagtagtaactgttgttctacgtctaggagcaccagaagtatttttggagcccttggatgttgatgtagaagaagacgaggattttgattttggtttacatgtaatacattttgaactctttgattttgtatcacatgcgccggcagtcacatctgtttgagaattaagattattgttgcctcctttgacggctgcatctccaccgatttgcgctagtagatttttaagctgtggtgtaatcttattaactgtttcgatataatcatcgtaactgcttctaacggctaaattttttttatccgccatttagaagctaaaaatatttttatttatgcagaagatttaactagattatacaatgaactaatatgatccttttccagattatttacaaacttggtattttttggttctggaggaggcgaatttaaattcggacttggattcggattttgtaagttcttgatcttattatacatcgagtataggatggcgacagtaactgctacacaaataccgatcaaaagaagaataccaatcatttattgacaataacttcactattgatcaagtatgcaatatatcatcttttcactaaataagtagtaataatgattcaacaatgtcgagatatatggacgataataatttagttcatggaaatatcgctatgattggtgtgaatgactccgctaactctgtggggtgcgcagtgctttccccacatagaataaattagcattccgactgtgataataataccaagtataaacgccataatactcaatactttccatgtacgagtgggactggtagacttactaaagtcaataaaggcgaagatacacgaaagaatcaaaagaatgattccagcgattagcacgccggaaaaataatttccaatcataagcatcatgtccatttaactaataaaaattttaaatcgccgaatgaacaaagtggaatataaaccatataaaaacaatagtttgtactgcaaaaataatatctatttttgttttcgaagatatggtaaaattaaatagtagtacacagcatgttataactaacagcagcaacggctcgtaattacttatcatttactagacgaaaaggtggtgggatattttcttgctcaaataatacgaatatatcacccatccattttatgcgatgtttatatactctaatctttaatagatctatagacgacgggtttaccaacaatatagattttatcgattcatctaatttaaacccttccttaaacgtgaatgatctattatctggcataacgatgaccctacctgatgaatcggacaatgtactgggccatgtagaataaattatcaacgaattatcgtctacgaacatttatatcatttgttttaattttaggacgcgaataaatggatataaaatagaaaataacagatattacaaccagtgttatggccgcgcccaaccaggtaggcagttttattttatcttttactacaggttctcctggatgtacgtcaccaacggcggacgtagttctagtacaattagacgtaagttccgcttgggaattttttaacgctaaagagttaacgttaatcgtgcacccaacgtatttacatctagttcgttgaacatcttgattataatataaccattttctatctctagattcgtcagtgcactcatgtaaccaacataccctaggtcctaaatatttatctccggaattagattttggataattcgcgcaccaacaatttctatttcctttatgatcgttacaaaagacgtataatgccgtatccccaaaagtaaaataatcaggacgaataattctaataaactcagaacaatatctcgcatccatatgtttggagcaaatatcggaataagtagacatagccggtttccgttttgcacgtaaccattctaaacaattggggtttccaggatcgtttctacaaaatccagtcatgaaatcgtcacaatgttctgtcttgtaattattattaaatatttttggacagtgtttggtatttgtcttagaacaacattttgccacgctatcactatcgcccaggagataatccttttttataaaatgacatcgttgcccggatgctatataatcagtagcgtgttttaaatccttaatatattcaggagttacctcgttctgataatagattaatgatccaggacgaaatttgaaagaactacatggttctccatgaattaatacatattgtttagcaaattcaggaactataaaactactacaatgatctatcgacataccatctatcaaacaaaacttgggtttaatttctcccggagatgtttcataatagtacgtataactttcttctgcaaacttaacagctctattatattcaggataattaaaacctaattccatatatttgtctcgtatatctgctattcctggtgctattttgattctattaagagtaacagctgcccccattcttaataatcgtcagtatttaaactgttaaatgttggtatatcaacatctaccttatttcccgcagtataaggtttgttgcaggtatactgttcaggaatggttacatttatacttcttctatagtcctgtctttcgatgttcatcacatatgcaaagaacagaataaacaaaataatgtaagaaataatattaaatatctgtgaattcgtaaatacattgattgccataataattacagcagctacaatacacacaatagacattcccacagtgttgccattacctccacgatacatttgagttactaagcaataggtaataactaagctagtaagaggcaatagaaaagatgagataaatatcatcaatatagagattagaggagggctatatagagccaagacgaacaaaatcaaaccgagtaacgttctaacatcattatttttgaagattcccaaataatcattcattcctccataatcgttttgcatcatacctccatctttaggcataaacgattgctgctgttcctctgtaaataaatctttatcaagcactccagcacccgcagagaagtcgtcaagcatattgtaatatcttaaataactcatttatatattaaaaaatgtcactattaaagatggagtataatctttatgccgaactaaaaaaaatgacttgtggtcaacccctaagtctttttaacgaagacggggatttcgtagaagttgaaccgggatcatcctttaagtttctgatacctaagggattttacgcctctccttccgtaaagacgagtctagtattcgagacattaacaacgaccgataataaaatcactagtatcaatccaacaaatgcgccaaagttatatcctcttcaacgcaaagtcgtatctgaagtagtttctaatatgaggaaaatgatcgaatcaaaacgtcctctatacatcactcttcacttggcgtgtggatttggtaagactattaccacgtgttatcttatggctacacacggtagaaaaaccgtcatttgcgtacccaataaaatgttaatacatcaatggaagacacaggtagaggcagtcggattggaacataagatatccatagatggagtaagtagtctattaaaggaactaaagactcaaagtccggatgtattaatagtagtcagtagacatctgacaaacgatgccttttgtaaatatatcaataagcattatgatttgttcatcttggatgaatcacatacgtataatctgatgaacaatacagcagttacaagatttttagcgtattatcctccgatgatgtgttattttttaactgctacacctagaccatctaaccgaatttattgtaacagtattattaatattgccaagttatccaatctaaaaaaaactatctatgcagtagatagtttttttgagccatattccacagataatattagacatatggtaaaacgactagatggaccatctaataaatatcatatatataccgagaagttattatctgtagacgagcctagaaatcaacttattcttgataccctggtagaagaattcaagtcaggaactattaatcgcattttagttattactaaactacgtgaacatatggtattattctacaaacgattattagattttttcggaccagaggttgtatttataggagacgcccaaaatagacgtactccagatatggtcaaatcaatcaaggaactaaatagatttatattcgtatccaccttattttattccggtactggtttagatattcctagtttggattcgttgttcatttgctcggcagtaatcaacaatatgcaaatagagcaattactagggagggtatgtcgagaaacagaactattagataggacggtatatgtatttcctaacacatccatcaaagaaataaagtacatgataggaaatttcatgcaacgaattattagtctgtctgtagataaactaggatttaaacaaaaaagttatcggaaacatcaagaatccgatcccacttctgcatgtacaacatcatccagagaagaacgtgtattaaatagaatatttaactcgcaaaatcgttaagaagtttaagcgacgatccgcatgctgcgcaggccagtgtattacccctcatagtattaatataatccaatgatacttttgtgatgtcggaaatcttaaccaatttagactgacaggcagaacacgtcatgcaatcatcatcgtcatcgataactgtagtcttgggcttctttttgcgactcttcattccggaacgcacattggtgctatccatttaggtagtaaaaaataagtcagaatatgccctataacacgatcgtgcaaaacctggtatatcgtctctatctttatcacaatatagtgtatcgacatttttattattattgacctcgtttatcttggaacatggaatgggaacatttttgttatcaacggccatctttgccttaattccagatgttgtaaaattataactaaacagtctatcatcgacacaaatgaaattcttgtttagacgtttgtagtttacgtatgcggctcgttcgcgtctcattttttcagatattgcaggtactataatattaaaaataagaatgaaataacataggattaaaaataaagttatcatgacttctagcgctgatttaactaacttaaaagaattacttagtctgtacaaaagtttgagattttcagattctgcggctatagaaaagtataattctttggtagaatggggaacatctacttactggaaaataggcgtgcaaaaggtagctaatgtcgagacgtcaatatctgattattatgatgaggtaaaaaataaaccgtttaatattgatccgggctattacattttcttaccggtatattttgggagcgtctttatttattcgaagggtaaaaatatggtagaacttggatctggaaactcttttcaaataccagatgatatgcgaagtgcgtgtaacaaagtattagacagcgataacggaatagactttctgagatttgttttgttaaacaatagatggataatggaagatgctatatcaaaatatcagtctccagttaatatatttaaactagctagtgagtacggattaaacatacccaaatatttagaaattgaaatagaggaagacacattatttgacgacgagttatactctattatagaacgctctttcgatgataaatttccaaaaatatccatatcgtatattaagttgggagaacttagacggcaagttgtagactttttcaaattctcattcatgtatattgagtccatcaaggtagatcgtataggagataatatttttattcctagcgttataacaaaatcaggaaaaaagatattagtaaaagatgtagaccatttaatacgatccaaggttagagaacatacatttgtaaaagtaaaaaagaaaaacacattttccattttatacgactatgatggaaacggaacagaaactagaggagaagtaataaaacgaattatagacactataggacgagactattatgttaacggaaagtatttctctaaggttggtagtgcaggcttaaagcaattgactaataaattagatattaatgagtgcgcaactgtcgatgagttagttgatgagattaataaatccggaactgtaaaacgaaaaataaaaaaccaatcagcatttgatttaagcagagaatgtttgggatatccagaagcggattttataacgttagttaataacatgcggttcaaaatagaaaattgtaaggttgtaaatttcaatattgaaaatactaattgtttaaataacccgagtattgaaactatatatggaaactttaaccagttcgtctcaatctttaatgtcgtcaccgatgtcaaaaaaagattattcgagtgaaataatatgcgcctttgatataggtgcaaaaaatcctgccagaactgttttagaagtcaaggataactccgttagggtattggatatatcaaaattagactggagttctgattgggaaaggcgcatagctaaagatttgtcacaatatgaatacactacagttcttctagaacgtcagcctagaaggtcgccgtatgttaaatttatctattttattaaaggctttttatatcatacatcggctgccaaagttatttgcgtctcgcctgtcatgtctggtaattcatatagagatcgaaaaaagagatcggtcgaagcatttcttgattggatggacacattcggattgcgagactccgttccggatagacgcaaattagacgatgtagcggatagtttcaatttggctatgagatacgtattagataaatggaatactaattatacaccttataataggtgtaaatctagaaattacataaaaaaaatgtaataacgttagtaacgccattatggataatctatttacctttctacatgaaatagaagatagatatgccagaactatttttaactttcatctaataagttgcgatgaaataggagatatatatggtcttatgaaagaacgcatttcctcagaggatatgtttgataatatagtgtataataaagatatacatcctgccattaagaaactagtgtattgcgacatccaacttactaaacacattattaatcagaatacgtatccggtatttaacgattcttcacaagtgaaatgttgtcattatttcgacataaactcagataatagcaatattagctctcgtacagtagagatatttgagagggaaaagtcatctcttgtatcatatattaaaactaccaataagaagagaaaggtcaattacggcgaaataaagaaaactgttcatggaggcactaatgcaaattacttttccggtaaaaagtctgacgagtatctgagtactacagttagatccaacattaatcaaccttggatcaaaaccatctctaagaggatgagagttgatatcattaatcactctatagtaacgcgtggaaaaagctctatattacaaactatagaaattatttttactaatagaacatgtgtgaaaatattcaaggattctactatgcacattattctatccaaggacaaggatgaaaaggggtgtatacacatgattgacaaattattctatgtctattataatttatttctgttgttcgaagatatcatccaaaacgagtactttaaagaagtagctaatgttgtaaaccacgtactcacggctacggcattagatgagaaattattcctaattaagaaaatggctgaacacgatgtttatggagttagcaatttcaaaatagggatgtttaacctgacatttattaagtcgttggatcataccgttttcccctctctgttagatgaggatagcaaaataaagttttttaaggggaaaaagctcaatattgtagcattacgatctctggaggattgtataaattacgtgactaaatccgagaatatgatagaaatgatgaaggaaagatcgactattttaaatagcatagatatagaaacggaatcggtagatcgtctaaaagaattgcttctaaaatgaaaaaaaacactaattcagaaatggatcaacgactagggtataagtttttggtgcctgatcctaaagccggagttttttatagaccgttacatttccaatatgtatcgtattctaattttatattgcatcgattgcatgaaatcttgaccgtcaagcggccactcttatcgtttaagaataatacagaacgaattatgatagaaattagcaatgttaaagtgactcctccagattactcacctataatcgcgagtattaaaggtaagagttatgacgcattagccacgttcactgtaaatatctttaaagaggtaatgaccaaagagggtatatccatcactaaaataagtagttatgagggaaaagattctcatttgataaaaattccgctactaataggatacgggaataaaaatccacttgatacagccaagtatcttgttcctaatgtcataggtggagtctttatcaataaacaatctgtcgaaaaagtaggaattaatctagtagaaaagattacaacatggccaaaatttagggttgttaagccaaactcattcactttctcgttttcctccgtatcccctcctaatgtattaccgacaagatatcgccattacaagatatctctggatatatcacaattggaagcgttgaatatatcatcgacaaagacatttataacggtcaatattgttttgctgtctcaatatttatctagagtgagtctagaattcattagacgtagtttatcatacgatatgcctccagaagttgtctatctagtaaacgcgataatagatagtgctaaacgaattactgaatctattactgactttaatattgatacatacattaatgacctggtggaagctgaacacattaaacaaaaatctcagttaacgatcaacgagttcaaatatgaaatgctgcataactttttacctcatatgaactatacacccgatcaactaaagggattttatatgatatctttactaagaaagtttctctactgtatcttccacacttctagatatccagatagagattcgatggtttgtcatcgcatcctaacgtacggcaaatattttgagacgttggcacatgatgaattagagaattacataggcaacatccgaaacgatatcatgaacaatcacaagaacagaggcacttacgcggtaaacattcatgtactaacaactcccggacttaatcacgcgttttctagcttattgagtggaaagttcaaaaagtcagacggtagttatcgaacacatcctcactattcatggatgcagaatatttctattcctaggagtgttggattttatccggatcaagtaaagatttcaaagatgttttctgtcagaaaataccatccaagtcaatatctttacttttgttcatcagacgttccggaaagaggtcctcaggtaggtttagtatctcaattgtctgtcttgagttccattacaaatatactaacgtctgagtatttggatttggaaaagaaaatttgtgagtatatcagatcatattataaagatgatataagttactttgaaacaggatttccaatcactatagaaaatgctctagtcgcatctcttaatccaaatatgatatgtgattttgtaactgactttagacgtagaaaacggatgggattcttcggtaacttggaggtaggtattactttagttagggatcacatgaatgaaattcgcattaatattggagcgggaagattagtcagaccattcttggttgtggataacggagagctcatgatggatgtgtgtccggagttagaaagcagattagacgacatgacattctctgacattcagaaagagtttccgcatgtcatcgaaatggtagatatagaacaatttacttttagtaacgtatgtgaatcggttcaaaaatttagaatgatgtcaaaggatgaaagaaagcaatacgatttatgtgactttcctgccgaatttagagatggatatgtagcatcttcattagtgggaatcaatcacaattctggacccagagctattcttggatgtgctcaagctaaacaagctatctcttgtctgagctcggatatacgaaataaaatagacaatggaattcatttgatgtatccagagaggccaatcgtgattagtaaggctttagaaacttcaaagattgcggctaattgcttcggccaacatgttactatagcattaatgtcgtacaaaggtatcaatcaagaggatggaattatcatcaaaaaacaatttattcagagaggcggtctcgatattgttacagccaagaaacatcaagtagaaattccattggaaaactttaataacaaagaaagagataggtctaacgcctattcaaaattagaaagtaatggattagttagactgaatgctttcttggaatccggagacgctatggcacgaaatatctcatcaagaactcttgaagatgattttgctagagataatcagattagcttcgatgtttccgagaaatataccgatatgtacaaatctcgcgttgaacgagtacaagtagaacttactgacaaagttaaggtacgagtattaaccatgaaagaaagaagacccattctaggagacaaatttaccactagaacgagtcaaaagggaacagtcgcgtatgtcgcggatgaaacggaacttccatacgacgaaaatggtatcacaccagatgtcattattaattctacatccatcttctctagaaaaactatatctatgttgatagaagttattttaacagccgcatattctgctaagccgtacaacaataagggagaaaaccgacctgtctgttttcctagtagtaacgaaacatccatcgatacatatatgcaattcgctaaacaatgttatgagcattcaaatccgaaattgtccgatgaagaattatcggataaaatcttttgtgaaaagattctctatgatcctgaaacggataagccttatgcatccaaagtattttttggaccaatttattacttgcgtctgaggcatttaactcaggacaaggcaaccgttagatgtagaggtaaaaagacgaagctcattagacaggcgaatgagggacgaaaacgtggaggaggtatcaagttcggagaaatggagagagactgtttaatagcgcatggtgcagccaatactattacagaagttttgaaagattcggaagaagattatcaagatgtgtatgtttgtgaaaattgtggagacatagcagcacaaatcaagggtattaatacatgtcttagatgttcaaaacttaatctctctcctctcttaacaaaaattgataccacgcacgtatctaaagtatttcttactcaaatgaacgccagaggcgtaaaagtcaaattagatttcgaacgaaggcctccttcgttttataaaccattagataaagttgatctcaagccgtcttttctggtgtaatattctagtttggtagtagatacatatcaatatcatcaaattcgagatccgaattataaaatgggcgtggattgttaactatagaatcggacgtctgatattcgaaaatctgtggagtttcaggttttggtggaggtgtaactgctacttgggatactgaagtctgatattcagaaagctgtggatgttctggttcggcatccaccgatggtgtcacatcactaatcggttcggtaacgtctgtggatggaggtgctacttctacagaacctgtagcctcagttgtcaacggagatacatttttaatgcgagaaaatgtataatttggtaatggtttcttatgtggatctgaagaagaggtaagatatctactagaaagataccgatcacgttctagttctcttttgtagaacttaactttttctttctccgcatctagttgatattccaacctcttcacgttactacgttcagattccaattcacgttcgcatgggttacctccgcagtttttacgagcgatttcacgttcagccttcatgcgtctctccctctctctatcgagtttatcagagcagtctttctgaaggcgatcgaactccataaatttctccaacgctttgattgtttccatagatttccgaagttcagcttttaggactgtgattctttttctttcgaattcacagctggatgtacaaccgtttccattaccgccatctctaagtttcttttctagatcggcaacatttcatccccatgccttttacattcctcgagtctactgtcgtcgaaatatcgttccagctccttttcgacatcaataactttagcacgttgtctctcaagctctcttttgtagttatctgattccctggcacgtttaagatcttcatgcaattgagtcagctcttaacttcctctcttgcttcttcgtcatagtacgcgcaatcactgtgagatccattgttaccacgtctacactcggcgagctcgcgtttaagagattcaatttcccgtttgtattggtccatgtttccattgctaccaccattagatttacaggctgctagttgtcgttcgagatcagaaatacgggttttcttggaattgatttcgtcgatgtacttggcatcgaaacacttattaagttctttttccaattctacgattttatttctttcgcgagtcaattccctcctgtagtaactatctgttttgtcagattcacgctctctacgtagactttcttgcaagttactaatttgttccctagcacgtccgagtttagttttatatgctgaatagagttctgattcatcctttgagcagatctctagcgatcgtttaagattcctaattctagtctttagcctatttacctcctcagaagatgttccgttaccgttgcgtttacactcgttaagctgtctatcaagatccatgattctatctctaagacgttgcatctctctttccatatcagcattgctttcattattacgtctgcagtcactcaactgtctttcaatatctgagattctatctctaagacgtcgcatctctctctgtttcggcattggtttcattattacgtttacagtcgttcaactgtctttcaagatctgatattctagattggagtctgctaatctctgtagcattttcacggcattcactcagttgtctttcaagatctgaaattttagattggagtctgctaatctctgtaagatttcctcctccgctctcgatgcagtcggtcaacttattctctagttctctaatacgcgaacgcagtgcatcaacttcttgcgtgtcttcctggttgcgtgtacattcatcgagatctctaacgcgtcgtcgttcttcctcaagttctctgcgtactacagaaagcgtgtccctatcttgttgatatttagcaatttctgattctagagtactgattttgcttacgtagttactaatagttgtcttggccttatcaagatcctccttgtatttgtcgcattccttgatatccctacgaagtctggacagttcccattcgacattacgacgtttatcgatttcagctcggagatcgtcatcgcgttgttttagccacatacgactgagttcaagttctcgttgacaagatccatctacttttccattcctaatagtatccagttccttttctagttctgaacgcatttctcgttccctatcaagcgattctctcaattctcggatagtcttcttatcaatttctaataaatctgaaccatcatctgtcccattttgaatatccctgtgttctttgatctcttttgtaagtcggtcgattctttcggttttataaacagaatccctttccaaagtcctaatcttactgagtttatcactaagttctgcattcaattcggtgagttttctcttggcttcttccaactctgttttaaactctccactatttccgcattcttcctcgcatttatctaaccattcaattagtttattaataactagttggtaatcagcgattcctatagccgttcttgtaattgtgggaacataattaggatcttctaatggattgtatggcttgatagcatcatctttatcattattagggggatggacaaccttaattggttggtcctcatctcctccagtagcgtgtggttcttcaataccagtgttagtaataggcttaggcaaatgcttgtcgtacgcgggcacttcctcatccatcaagtatttataatcgggttctacttcagaatattcttttctaagagacgcgacttcgggagttagtagaagaactctgtttctgtatctatcaacgctggaatcaatactcaagttaaggatagcgaatacctcatcgtcatcatccgtatcttctgaaacaccatcatatgacatttcatgaagtctaacgtattgataaatagaatcagatttagtattaaacagatccttaacctttttagtaaacgcatatgtatattttagatctccagatttcataatatgatcacatgccttaaatgtcagtgcttccatgatataatctggaacactaatgggtgacgaaaaagatacagcaccatatgctacgttgataaataaatctgaaccactaagtagataatgattaatgttaagaaagaggaaatattcagtgtataggtatgtcttggcgtcatatcttgtactaaacacgctaaacagtttgttaatgtgatcaatttccaatagattaattagagcagcgggaataccaacaaacatattaccacatccgtattttctatgaatatcacatatcatgttaaaaaatcttgatagaagagcgaatatctcgtctgacttaatgagtcgtagttcagcagcaacataagtcataactgtaaatagaacatactttcctgtagtgttgattctagactccacatcaacaccattattaaaaatagttttatatacatctttaatctgctctccgttaatcgtcgaacgttctagtatacggaaacactttgatttcttatctgtagttaatgacttagtgatatcacgaagaatattacgaattacatttcttgtttttcttgagagacctgattcagaactcaactcatcgttccatagtttttctacctcagtggcgaaatctttggagtgcttggtacatttttcaataaggttcgtgacctccatttattataaaaaatttattcaaaacttaactacaatcgggtaattataagatcgtagatctcccatgtggcggaatactaccatctatcgcatgtggatggacagtaggtaatggccatgggaacagtaatgtttgcatatttatctttcttgctagtattactgcatattgtcccaatgtttcgatgtgatgttctaacctatcaactgccgctgtatcacaacaatagtgtccgatgaaattaagattatgatccaatgtgtttaatatatgattatcaagtcttatacgatccgcgtcttttttgacaggatcaggttcttctacaggaagaagtttcggcctcttatgatattcatgtctgggaaacggtggtctagggtgaggctccggtatcggagtgggttttggattataatcatcatcgtctatgacatcatcttcgacttcgatatttattttgctatcttgatgatgtcctgtatcagttgcattttcagcactcgactgaatattagcgcattcattgtctattattaccatatttctaaacccaaaatgtatgtgttgaacatcagtactatcgttgatgagtcttatagcatgaattcgcttatcgttatcgggtttatcttctgtcaccttagcaattccttttttattaaactctacataatcatatccatttctattgtttgttctaatataaacgagtatagcatcattgctaaatttttcaatagtatcaaaaacagaatatcctaaaccatataatatatattcaggaacactcaaactaaatgtccaggattctcctaaatacgtaaactttaatagtgcgaaatcattcaaaaatctaccacttatagatagatagtacataaatgcgtatagtagtctacctatctctttattatgaaaaccggcattacgatcatatatgtcgtgatatacctgtgatccgtttacgttaaaccataaatacatgggtgatcctataaacatgaatttatttctaattctcagagctatagttaattgaccgtgtaatatttgcttacatgcatacttgatacgcttattaataagatttttatcattgctcgttatttcagaatcgtatatataaggagtaccatcgtgattcttaccagatattatacaaaatactatatataaaatatattgacccacgttagtaatcatataaatgtttaacgttttaaattttgtattcaatgatccattatcatacgctatcatggtcttgtaatattcattctttaaaatataatattgtgttagccattgcattggagctcctaatggagattttctattctcatccattttaggataggctttcataaagtccctaataacttcgtgaataatgtttctatgttttctactgatgcatgtatttgcttcgatttttttatcccatgtttcatctatcatagatttaaacgcagtaatgctcgcaacattaacatcttgaaccgttggtacaattccgttccataaatttataatgttcgccatttatataactcattttttgaatatacttttaattaacaaaagagttaagttactcatatggacgccgtccagtctgaacatcaatctttttagccagagatatcatagccgctcttagagtttcagcgtgattttccaacctaaatagaacttcatcgttgcgtttacaacacttttctatttgttcaaactttgttgttacattagtaatctttttttccaaattagttagccgttgtttgagagtttcctcattgtcgtcttcatcggctttaacaattgcttcgcgtttagcctctggctttttagcagcctttgtagaaaaaaattcagttgctggaattgcaagatcgtcatctccggggaaaagagttccgtccatttaaagtacagattttagaaactgacactctgcgttatttatatttggtacaacacatggattataaatattgatgttaataacatcagaaaatgtaaagtctatacattgttgcatcgtgttaaattttctaatggatctagtattattgggtccaacttctgcctgaaatccaaatatggaagcggatacaaaaccgtttcctggataaaccacacatctccacttttgctttacatcagaaattgtgtcgttgacatcttgaactctcctatctaatgccggtgttccacctatagattttgaatattcgaatgctgcatgagtagcattaaattccttaatattgccataattttcatatattgagtaaccctggataaaaagtaaacacaccgcagccgtcgctaccacaataaaaaaaattgatagagagttcatttataatctattagaagctgacaaaatttttttacacgcatcagacaatgctttaataaatagttcaacatctacttttgtcatatcgaaccgatggtatgattctaacctagaattacatccgaaaaagttgactatgttcatagtcattaagtcattaacaaacaacattccagactctggattataagacgatactgtttcgtcacaattacctaccttaatcatgtgattatgaatattggctattagagcaccttctaagaaatctataatatctttgaaacacgatttaaaatcaaaccacgaatatacttctacgaagaaagttagtttacccataggagaaataactataaatggagatctaaatacaaaatccggatctatgatagttttaacattattatattctctattaaatacctccacatctaaaaatgttaattttgaaactatgtcttcgtttattaccgtacctgaactaaacgctataagctctattgtttgagaactctttaaacgatattcttgaaatacatgtaacaaagtttcctttaactcggtcggtttatctaccatagttacagaatttgtatccttatctataatataataatcaaaatcgtataaagttatataattatcgcgttcagattgtgatcttttcaaatagactaaaaaccccatttctctagtaagtatcttatgtatatgtttgtaaaatatcttcatggtgggaatatgctctaccgcagttagccattcctcattgacagcggtagatgtattagacaaaactattccaatgtttaacaagggccattttacgagattattaaatccttgtttgataaatgtagccaatgagggttcgagttcaacgacgattgaattctcttcccgcggatgctgcatgatgaacgacgggatgttgttcgattgatttggaattctttttcgactttttgtttatattaaatattttaaaatttatagcggatagcaattcatgtaccacggataatgtagacgcgtattgcgcatcgatatctttattattagataaatttatcaataaatgtgagaagtttgcctcgttaaggtcttccatttaaatattatataaacatttgtgtttgtatcttattcgtcttttatggaatagttttttactagtaaagctgcaattacacactttgtccgtaaaacataaatataaacaccagcttttatcaatcgttccaaaaagtcgacggcggacatttttaacatggcatctattttaaatacacttaggtttttggaaaaaacatcattttataattgtaacgattcaataactaaagaaaagattaagattaaacataagggaatgtcatttgtattttataagccaaagcattctaccgttgttaaatacttgtctggaggaggtatatatcatgatgatttggttgtattggggaaggtaacaattaataatctaaagatgatgctattttacatggatttatcatatcatggagtgacaagtagtggagcaatttacaaattgggatcgtctatcgatagactttctctaaataggactattgttacaaaagttaataattatgatgatacattttttgacgacgatgattgatcgctattgcacaattttgtttttgtactttctaatatagtgtttaggttctttttcatatgagaatattgatttactaaaatatctatgtttaacttttgttctatgacgtccttatcggcggtatcggtacatatacgtaattcaccttcacaaaatacggagtcttcgataataatagccaatcgattattggatctagctgtctgtatcatattcaacatgtttaatatatcctttcgtttcccctttacaggcatcgatcgtagcatattttccgcgtctgatatggaaatgttaaaactacaaaaatgcgtaatgttagcccgtcctaatattggtacgtgtctataagtttggcatagtagaataatagacgtgtttaaatgccttccaaagtttaagaattctattagagtattgcattttgatagtttatcgcctacatcatcaaaaataagtaaaaagtgtgctgattttttatgattttgtgcgacagcaatacatttttctatgttacttttagttcgtatcagattatattctagagattcctgactactaacgaaattaatatgatttggccaaatgtatccatcataatctgggttataaacgggtgtaaacaagaatatatgtttatattttttaactagtgtagaaaacagagatagtaaatagatagtttttccagatccagatcctcctgttaaaaccattctaaacggcatttttaataaattttctcttgaaaattgtttttcttggaaacaattcataattatatttacagttactaaattaatttgataataaatcaaaatatggaaaactaaggttgttagtagggaggagaacaaagaaggcacatcgtgatataaataacatttattatcatgatgacaccagaaaacgacgaagagcagacatctgtgttctccgctactgtttacggagacaaaattcagggaaagaataaacgcaaacgcgtgattggtctatgtattagaatatctatggttatttcactactatctatgattaccatgtccgcgtttctcatagtgcgcctaaatcaatgcatgtctgctaacgaggctgctattactgacgccgctgttgccgttgctgctgcatcatctactcatagaaaggttgcgtctagcactacacaatatgatcacaaagaaagctgtaatggtttatattaccagggttcttgttatatattacattcagactaccagttattctcggatgctaaagcaaattgcactgcggaatcatcaacactacccaataaatccgatgtcttgactacctggctcattgattatgttgaggatacatggggatctgatggtaatccaattacaaaaactacatccgattatcaagattctgatgtatcacaagaagttagaaagtatttttgtgttaaaacaatgaactaatatttatttttgtacattaataaatgaaatcgcttaatagacaaactgtaagtaggtttaagaagttgtcggtgccggccgctataatgatgatactctcaaccattattagtggcataggaacatttctgcattacaaagaagaactgatgcctagtgcttgcgccaatggatggatacaatacgataaacattgttatttagatactaacattaaaatgtctacagataatgcggtttatcagtgtcgtaaattacgagctagattgcctagacctgatactagacatctgagagtattgtttagtattttttataaagattattgggtaagtttaaaaaagaccaatgataaatggttagatattaataatgataaagatatagatattagtaaattaacaaattttaaacaactaaacagtacgacggatgctgaagcgtgttatatatacaagtctggaaaactggttaaaacagtatgtaaaagtactcaatctgtactatgtgttaaaaaattctacaagtgacaacaaaaaatgaattaataataagtcgttaacgtacgccgccatggacgccgcgtttgttattactccaatgggtgtgttgactataacagatacattgtatgatgatctcgatatctcaatcatggactttataggaccatacattataggtaacataaaaactgtccaaatagatgtacgggatataaaatattccgacatgcaaaaatgctactttagctataagggtaaaatagttcctcaggattctaatgatttggctagattcaacatttatagcatttgtgccgcatacagatcaaaaaataccatcatcatagcatgcgactatgatatcatgttagatatagaagataaacatcagccattttatctattcccatctattgatgtttttaacgctacaatcatagaagcgtataacctgtatacagctggagattatcatctaatcatcaatccttcagataatctgaaaatgaaattgtcgtttaattcttcattctgcatatcagacggcaatggatggatcataattgatgggaaatgcaatagtaattttttatcataaaagttgtaaagtaaataataaaacaataaatattgaactagtagtacgtatattgagcaatcagaaatgatgctggtacctcttatcacggtgaccgtagttgcgggaacaatattagtatgttatatattatatatttgtaggaaaaagatacgtactgtctataatgacaataaaattatcatgacaaaattaaaaaagataaagagttctaattccagcaaatctagtaaatcaactgatagcgaatcagactgggaggatcactgtagtgctatggaacaaaacaatgacgtagataatatttctaggaatgagatattggacgatgatagcttcgctggtagtttaatatgggataacgaatccaatgttatggcgcctagcacagaacacatttacgatagtgttgctggaagcacgctgctaataaataatgatcgtaatgaacagactatttatcagaacactacagtagtaattaatgaaacggagactgttgaagtacttaatgaagataccaaacagaatcctaactattcatccaatcctttcgtaaattataataaaaccagtatttgtagcaagtcaaatccgtttattacagaacttaacaataaatttagtgagaataatccgtttagacgagcacatagcgatgattatcttaataagcaagaacaagatcatgaacacgatgatatagaatcatcggtcgtatcattggtgtgattagtttcctttttataaaattgaagtaatatttagtattattgctgccgtcacgttgtacaaatggagatattccctgtattcggcatttctaaaattagcaattttattgctaataatgactgtagatattatatagatacagaacatcaaaaaattatatctgatgagatcaatagacagatggatgaaacggtacttcttaccaacatcttaagcgtagaagttgtaaatgacaatgagatgtaccatcttattcctcatagattatcgacgattatactctgtattagttctgtcggaggatgtgttatctctatagataatgacatcaatggcaaaaatattctaacctttcccattgatcatgctgtaatcatatccccactgagtaaatgtgtcgtagttagcaagggtcctacaaccatattggttgttaaagcggatatacctagcaaacgattggtaacatcgtttacaaacgacatactatatgtaaacaatctgtcactgattaattatttgccgttgtctgtattcattattagacgagtcaccgactatttggatagacacatatgcgatcagatatttgctaataataagtggtattcccttataaccatcgacgataagcaatatcctattccatcaaactgtataggtatgtcctctgccaagtacataaattctagcatcgagcaagatactttaatccatgtttgtaacctcgagcatccgttcgactcagtatacaaaaaaatgcagtcgtacaattctctacctatcaaggaacaaatattgtacggtagaattgataatataaatatgagcattagtatttctgtggattaatagatttctagtatggggatcattaatcatctctaatctctaaatacctcataaaacgaaaaaaaagctattatcaaatactgtacggaatggattcattctcttctctttttatgaaactctgttgtatatctactgataaaactggaagcaaaaaatctgatagaaagaataagaataagatcaaggattatatggaacacgattattataaaataacaatagttcctggttcctcttccacgtctactagctcgtggtattatacacatgcctagtaatagtctctttgcgttgacggaaagcagactagaaataacaggctaaaatgttcagacaccataatagttcccaacccagataataacagagttccatcaacacattcctttaaactcaatcccaaacccaaaaccgttaaaatgtatccggccaattgatagtagataatgaggtgtacagcgcatgataatttacacagtaaccaaaatgaaaatactttagtaattataagaaatatagacggtaatgtcatcatcaacaatccgataatatgcctgagagtaaacattgacggataaaacaaaaatgctccgcataactctatcatggcaataacacaaccaaatacttgtaagattcctaaattagtagaaaatacaacgaatatcgatgtataagtgatctcgagaaataataagaataaagtaatgcccgtaaagataaacatcaacattgtttggtaatcattaaaccaattagtatgaagttgaactaatttcacagtagattttattccagtgttatcctcgcatgtataagtacctggtaagatatctttatattccataatcaatgagacatcactatctgataacgaatgaagtctagcactagtatgccatttacttaatattgtcgtcttggaagttttattataagttaaaatatcatggttatccaatttccatctaatatactttgtcggattatctatagtacacggaataatgatggtatcattacatgctgtatactctatggtctttgtagttgttataacaaccaacgtatagaggtatatcaacgatattctaactcttgacattttttatttatttaaaatgatacctttgttatttattttattctattttgctaacggtattgaatggcataagtttgaaacgagtgaagaaataatttctacttacttattagacgacgtattatacacgggtgttaatggggcggtatacacattttcaaataataaactaaacaaaactggtttaactaataataattatataacaacatctataaaagtagaggatgcggataaggatacattagtatgcggaaccaataacggaaatcccaaatgttggaaaatagacggttcagacgacccaaaacatagaggtagaggatacgctccttatcaaaatagcaaagtaacgataatcagtcacaacggatgtgtactatctgacataaacatatcaaaagaaggaattaaacgatggagaagatttgacggaccatgtggttatgatttattcacggcggataacgtaattccaaaagatggtttacgaggagcattcgtcgataaagacggtacttatgacaaagtttacattcttttcactgatactatcggctcaaagagaattgtcaaaattccgtatatagcacaaatgtgcctaaacgacgaaggtggtccatcatcattgtctagtcatagatggtcgacgtttctcaaagtcgaattagaatgtgatatcgacggaagaagttatagacaaattattcattctagaactataaaaacagataatgatacgatactatatgtattcttcgatagtccttattccaagtccgcattatgtacctattctatgaataccattaaacaatctttttctacgtcaaaattggaaggatatacaaagcaattgccgtctccagctcctggtatatgtttaccagctggaaaagttgttccacataccacgtttgaagtcatagaacaatataatgtactagatgatattataaagcctttatctaaccaacctatcttcgaaggaccgtctggtgttaaatggttcgatataaaggagaaggaaaatgaacatcgggaatatagaatatacttcataaaagaaaattctatatattcgttcgatacaaaatctaaacaaactcgtagctcgcaagtcgatgcgcgactattttcagtaatggtaactgcgaaaccgttatttatagcagatatagggataggagtaggaatgccacaaatgaaaaaaatacttaaaatgtaatcttaatcgagtacaccacacgacaatgaacaaacataagacagattatgctggttatgcttgctgcgtaatatgcggtctaattgtcggaattatttttacagcgacactattaaaagttgtagaacgtaaattagttcatacaccattaatagataaaacgataaaagatgcatatattagagaagattgtcctactgactggataagctataataataaatgtatccatttatctactgatcgaaaaacctgggaggaaggacgtaatgcatgcaaagctctaaattcaaattcggatctaattaagatagagactccaaacgagttaagttttttaagaagccttagacgaggctattgggtaggagaatccgaaatattaaaccagacaaccccatataattttatagctaagaatgccacgaagaatggaactaaaaaacggaaatatatttgtagcacaacgaatactcccaaactgcattcgtgttacactatataacaattacactacatttttatcataccactacttcggttagatgttttagaaaaaaataaatatcgccgtaccgttcttgtttttataaaaataacaattaacaattatcaaattttttctttaatattttacgtggttgaccattcttggtggtaaaataatctcttagtgttggaatggaatgctgtttaatgtttccacactcatcgtatattttgacgtatgtagtcacatcgtttacgcaatagtcagactgtagttctatcatgcttcctacatcagaaggaggaacagttttaaagtctcttggttttaatctattaccgttagttttcatgaaatcctttgttttatccacttcacattttaaataaatgtccactatacattcttttgttaattttactagatcgtcatgggtcatagaatttataggttccgtagtccatggatccaaactagcaaacttcgcgtatacggtatcgcgattagtgtatacaccaactgtatgaaaattaagaaaacagtttaataaatcaacagaaatatttaatcctccgtttgatacagatgcgccatatttatggatttcggattcacacgttgtttgtctgaggtgttcgtctagtgttgcttctacgtaaacttcgattcccatatattctttattgtcagaatcgcataccgatttatcatcatacactgtttgaaaactaaatggtatacacatcaaaataataaataataacgagtacattctgcaatattgttatcgtaattggaaaaatagtgttcgagtgagttggattatgtgagtattggattgtatattttattttatattttgtaataagaataaaatgctaatgtcaagtttattccaatagatgtcttattaaaaacatatataataaataacaatggctgaatggcataaaattatcgaggatatctcaaaaaataataagttcgaggatgccgccatcgttgattacaagactacaaagaatgttctagctgctattcctaacagaacatttgccaagattaatccgggtgaaattattcctctcatcactaatcgtaatattctaaaacctcttattggtcagaaatattgtattgtatatactaactctctaatggatgagaacacgtatgctatggagttgcttactgggtacgcccctgtatctccgatcgttatagcgagaactcataccgcacttatatttttgatgggtaagccaacaacatccagacgtgacgtgtatagaacgtgtagagatcacgctacccgtgtacgtgcaactggtaattaaaataaaaagtaatattcatatgtagtgtcaattttaaatgatgatgatgaaatggataatatccatattgacgatgtcaataatgccggtattggcatacagttcatcgatttttagatttcattcagaggatgtggaattatgttatgggcatttgtattttgataggatctataatgtagtaaatataaaatataatccgcatattccatatagatataattttattaatcgcacgttaaccgtagatgaactagacgataatgtcttttttacacatggttattttttaaaacacaaatatggttcacttaatcctagtttgattgtctcattatcaggaaacttaaaatataatgatatacaatgctcagtaaatgtatcgtgtctcattaaaaatttggcaacgagtacatctactatattaacatctaaacataagacttattctctacatcggtccacgtgtattactataataggatacgattctattatatggtataaagatataaatgacaagtataatgacatctatgattttactgcaatatgtatgctaatagcgtctacattgatagtgaccatatacgtgtttaaaaaaataaaaatgaactcttaattatgctatgctattagaaatggataaaatcaaaattacggttgattcaaaaattggtaatgttgttaccatatcgtataacttggaaaagataactattgatgtcacacctaaaaagaaaaaagaaaaggatgtattattagcgcaatcagttgctgtcgaagaggcaaaagatgtcaaggtagaagaaaaaaatattatcgatattgaagatgacgatgatatggatgtagaaagcgcgtaatacgatctataaaaataagtatataaatactttttatttactgtactcttactgtgtagtggtgataccctactcgattatttttttaaaaaaaaaatacttattctgattcttctagccatttccgtgttcgtttgaatgccacatcgacgtcaaagataggggagtagttgaaatctagttctgcattgttggtacgcacctcaaatgtagtgttggatatcttcaacgtatagttgttgagtagtgatggttttctaaatagaattctcttcatatcattcttgcacgcgtacatttttagcatccatcttggaatcctagatccttgttctattcccaatggtttcatcaatagaagattaaacatatcgtacgaacacgatggagagtaatcgtagcaaaagtaagcatttcctttaatcttagatcccggatactggatatattttgcagccaacacgtgcatccatgcagcatttcctacatatacccggctatgcaccgcgtcatcatcgactgtacgatacataatgttaccgtgttgcttacattgctcgtaaaagactttcatcaatttgtctccttctccgtaaattccagtgggtcttaggcaacaagtatacaattttgctccattcatgattacggaattattggctttcataaccagttgctcggccatacgtttactttttgcgtatacatgtcctggtgatatatcataaagggtatgctcatggccgatgaatggatcaccgtgtttattgggtcctattgcttccatgctactagtatagatcaaatacttgattcctaggtccacacaagctgccaaaatagtctgtgttccataatagtttactttcatgatttcattatcggtgtattttccaaatacatccactagagcagccgtatgaataatcagatttaccccatctagcgcttctctcaccttatcaaagtcgtttatatcacattgtatatagtttataaccttaactttcgaggttattggttgtggatcttctacaatatctatgactctgatttcttgaacatcatctgcactaattaacagttttactatatacctgcctagaaatccggcaccaccagtaaccgcgtacacggccattgctgccactcataatatcagactacttattctattttactaaataatggctgtttgtataatagaccacgataatatcagaggagttatttactttgaaccagtccatggaaaagataaagttttaggatcagttattggattaaaatccggaacgtatagtttgataattcatcgttacggagatattagtcaaggatgtgattccataggcagtccagaaatatttatcggtaacatctttgtaaacagatatggtgtagcatatgtttatttagatacagatgtaaatatatttacaattattggaaaggcgttatctatttcaaaaaatgatcagagattagcgtgtggagttattggtatttcttacataaatgaaaagataatacattttcttacaattaacgagaatggcgtttgatatatcagttaatgcgtctaaaacaataaatgcattagtttacttttctactcagcaaaataaattagtcatacgtaatgaagttaatgatacacactacactgtcgaatttgatagggacaaagtagttgacacgtttatttcatataatagacataatgacaccatagagataagaggggtgcttccagaggaaactaatattggttgcgcggttagtatgacttacttgtataataagtatagttttaaactgattttagcagaatatataagacacagaaatactatatccggcaatatttattcggcattgatgacactagatgatttggctattaaacagtatggagacattgatctattatttaatgagaaacttaaagtagactccgattcgggactatttgactttgtcaactttgtaaaggatatgatatgttgtgattctagaatagtagtagctctatctagtctagtatctaaacattgggaattgacaaataaaaaatataggtgtatggcattagccgaacatatatctgatagtattccaatatctgagctatctagactacgatacaatctatgtaagtatctacgcggacacactgagagcatagaggataaatttgattattttgaagacgatgattcgtctacatgttctgccgtaaccgacagggaaacggatgtataattttttttatagcgtgaaggatatgataaaaaatataattgttgtatttatcccattccaatcaccttatatgattctgtaacacaataaaggagtcttatagatgtatagaggtcagatactggtttgataaactgtttattccacataagtatgtttgactttatggttagacccgcatactttaacaaatcactgaaaattggagttaggtattgacctctcagaatcagttgccgttctggaacattaaatgtattttttatgatatactccaacgcatttatgtgggcatacaacaagtcattactaatggaatattccaagagttttagttgtctagtatttaacaagagaagagatttcaacagactgtttatgaactcgaatgccgcctcattgtcgcttatattgatgatgtcgaattctcccaatatcatcaccgatgagtagctcatcttgttatcgggatccaagttttctaaagatgtcattaaaccctcgatcatgaatggatttatcatcatcgtttttatgttggacatgagcttagtccgtttgtccacatctatagaagatgatttctgaattatttcatatatctctctctttaactccaggaacttgtcaggatggtctactttaatatgttctcgtctaagagatgaaaatctttggatggttgcacgcgacttttctctaaaggatgacgttgcccaagatcctctcttaaatgaatccatcttatccttggacaagatggacagtctattttccttagatggtttaatatttttgttacccatgatctataaaggtagacctaatcgtctcggatgaccatatatttattttcagttttattatacgcataaattgtaaaaaatatgttaggtttacgaaaatgtctcgtggggcattaatcgtttttgaaggattggacaaatctggaaaaacaacacaatgtatgaacatcatggaatcaataccttcaaacacaataaaataccttaactttcctcagagatccactgtcactggaaagatgatagatgactatctaactcgtaaaaaaacctataatgatcatatagttaatctattattttgtgcaaatagatgggagtttgcatcttttatacaagaacaactagaacagggaattactttaatagttgatagatacgcattttctggagtagcgtatgccgccgctaaaggcgcgtcaatgactctcagtaagagttatgaatctggattgcctaaacccgacttagttatattcttggaatctggtagcaaagaaattaatagaaacgtcggtgaggaaatttatgaagatgttacattccaacaaaaggtattacaagaatataaaaaaatgattgaagaaggagatattcattggcaaattatttcttctgaattcgaggaagatgtaaagaaggagttgattaagaatatagttatagaggctatacacacggttactggaccagtggggcaactgtggatgtaatagtgaaattacattttttataaatagatgttagtacagtgttataaatggatgaagcatattactctggcaacttggaatcagtactcggatacgtgtccgatatgcataccgaactcgcatcaatatctcaattagttattgccaagatagaaactatagataatgatatattaaacaaggacattgtaaattttatcatgtgtagatcaaacttggataatccatttatctctttcctagatactgtatatactattatagatcaagagaactatcagactgagttgattaattcattagacgacaatgaaattatcgattgtatagttaataagtttatgagcttttataaggataacctagaaaatatagtagatgctatcattactctaaaatatataatgaataatccagattttaaaactacgtatgccgaagtactcggttccagaatagccgatatagatattaaacaagtgatacgtaagaatatactacaattgtctaataatatccgcgaacgatatttgtgaaaatattaaaaaaaaatactttttttattaaatgacgtcttttcgtgaatttagaaaattatgctgtgctatatatcacgcatcaggatataaagaaaaatctaaattaattagagactttataacagatagggatgataaatatttgatcattaagctattgcttcccggattagacgatagaatttataacatgaacgataaacaaattataaaattatatagtataatatttaaacaatctcaggaagatatgctacaagatttaggatacggatatataggagacactattaggactttcttcaaagagaacacagaaatccgtccacgagataaaagcattttaactttagaagaagtggatagttttttaactacgttatcatccgtaactaaagaatcgcatcaaataaaattattgactgatgtagcatctgtttgtacatgtaatgatttaaaatgtgtagtcatgcttattgataaagatctaaaaattaaagcgggtcctcggtacgtacttaacgctattagtcctaatgcctatgatgtgtttagaaaatctaataacttgaaagagataatagaaaattcatctaaacaaaatctagactctatatctatttctgttatgactccaattaatcccatgttagcggaatcgtgtgattctgtcaataaggcgtttaaaaaatttccatcaggaatgtttgcggaagtcaaatacgatggtgaaagagtacaagttcataaaaataataacgagtttgccttctttagtagaaacatgaaaccagtactctctcataaagtggattatctcaaagaatacataccgaaagcatttaaaaaagctacgtctatcgtattggattctgaaattgttcttgtagacgaacataatgtaccgctcccgtttggaagtttaggtatacacaaaaagaaagaatataaaaactctaacatgtgtttgttcgtgtttgactgtttgtactttgatggattcgatatgacggacattccattgtacgaacgaagatcttttctcaaagatgttatggttgaaatacccaatagaatagtattctcagagttgacgaatattagtaacgagtctcagttaactgacgtattggatgatgcactaacgagaaaattagaaggattggtcttaaaagatattaatggagtatacgaaccgggaaagagaagatggttaaaaataaagcgagactatttgaacgagggttccatggcagattctgccgatttagtagtactaggtgcctactatggtaaaggagcaaagggtggtatcatggcagtctttctaatgggttgttacgacgatgaatccggtaaatggaagacggttaccaagtgttcaggacacgatgataatacgttaagggagttgcaagaccaattaaagatgattaaaattaacaaggatcccaaaaaaattccagagtggttagtagttaataaaatctatattcccgattttgtagtagaggatccgaaacaatctcagatatgggaaatttcaggagcagagtttacatcttccaagtcccataccgcaaatggaatatccattagatttcctagatttactaggataagagaggataaaacgtggaaagaatctactcatctaaacgatttagtaaacttgactaaatcttaatagttacatacaaactgaaaattaaaataacactatttagttggtggtcgccatggatggtgttattgtatactgtctaaacgcgctagtaaaacatggcgaggaaataaatcatataaaaaatgatttcatgattaaaccatgttgtgaaagagtttgtgaaaaagtcaagaacgttcacattggcggacaatctaaaaacaatacagtgattgcagatttgccatatatggataatgcggtatccgatgtatgcaattcactgtataaaaagaatgtatcaagaatatccagatttgctaatttgataaagatagatgacgatgacaagactcctactggtgtatataattattttaaacctaaagatgccattcctgttatcatatctataggaaaggataaagatgtctgtgaactattaatctcatcagacatatcgtgtgcatgcgtggagttaaattcatatcacgtagccattcttcccatggatgtttccttttttaccaaaggaaatgcatcattgattattctcctgtttgatttctctatcgatgcggcacctctcttaagaagtgtaaccgataataatgttattatatctagacaccagcgtctacatgacgagcttccgagttccaattggttcaagttttacataagtataaagtccgactattgttctatattatatatggttgttgatggatctgtgatgcatgcgatagctgataatagaactcacgcaattattagcaaaaatatattagacaatactacgattaacgatgagtgtagatgctgttattttgaaccacagattaggattcttgatagagatgagatgctcaatggatcatcgtgtgatatgaacagacattgtattatgatgaatttacctgatgtaggcgaatttggatctagtatgttggggaaatatgaacctgacatgattaagattgctctttcggtggctggtaatttaataagaaatcgagactacattcccgggagacgaggatatagctactacgtttacggtatagcctctagataatttttttaagcacgaaataaaaaacataattttaaaccaatctatttcatactattttgtgtgatcaccatggacataaagatagatattagtatttctggtgataaatttacggtgactactaggagggaaaatgaagaaagaaaaaaatatctacctctccaaaaagaaaaaactactgatgttatcaaacctgattatcttgagtacgatgacttgttagatagagatgagatgtttactattctagaggaatattttatgtacagaggtctattaggcctcagaataaaatatggacgactctttaacgaaattaaaaaattcgacaatgatgcggaagaacaattcggtactatagaagaactcaagcagaaacttagattaaattctgaagagggagcagataactttatagattatataaaggtacaaaaacaggatatcgtcaaacttactgtatacgattgcatatctatgataggattgtgtgcatgcgtggtagatgtttggagaaatgagaaactgttttctagatggaaatattgtttacgagcgattaaactgtttattgatgatcacatgcttgataagataaaatctatactgcagaatagactagtatatgtggaaatgtcatagaaagttaaaagttaatgagagcaaaaatatataaggttgtattccatatttgttatttttttctgtaatagttagaaaaatacattcgatggtctatctatcagattattatgtgttataaggtactttttctcataataaactagagtatgagtaagatagtgtttttcaaaacatataaatctaaaattgatggatgagatatacagctattaatttcgaaaatatattttaatctgataactttaaacatggatttttaatggtggtttaacgttttaaaaaaagattttgttattgtagtatatgataatattaaaagatggatataaagaatttgctgactgcatgtactattttttacattactacattggctacggcagatatacctacttcgtcactgccacacgctccggtaaacggggcatgtgacgagggagaatatcttgataagaggcataatcaatgttgtaatcagtgtccacctggagaatttgccaaggttagatgtaatggtaacgataacacaaaatgtgaacgctgcccacctcatacatataccgcaatccccaattactctaatggatgtcatcaatgtagaaaatgcccaacaggatcatttgataaggtaaagtgtaccggaacacagaacagtaaatgttcgtgtcttcctggttggtattgcgctactgattcttcacagactgaagattgtcgagattgtataccaaaaaggagatgtccatgcggatactttggtggaatagatgaacaaggaaatcctatttgtaaatcgtgttgtgttggtgaatattgcgactacctacgtaattatagacttgatccatttcctccatgcaaactatctaaatgtaattaattatgattttgatgataatgttaccatacattatatcgctacttggttagtgtattattcagtatgaagacctattaataattacttatcttttgacgatcttgttataattataatataaaaatacttatggcatagtaactcataattgctgacgcgataaattcgtaataatctgttttgttcaaatttttataaggaatctacaggcataaaaataaaaatataatttataatatactcttacagcgcgccatcatgaataacagcagtgaattgattgctgttattaatggatttagaaatagtggacgattttgtgatattaatatagttattaatgatgaaaggataaacgctcacagactcatcctatctggagcctccgaatatttttccattctgttttccaataattttatcgattctaatgaatacgaagttaatctaagtcatttagattatcaaagtgttaacgatttgatcgattacatttatgggatacctttgagcctaactaacgataacgtgaaatatattctttcaaccgctgattttttacaaattggatctgctattacggagtgtgaaaattacatacttaaaaatctttgttctagaaactgtatcgatttctacatatacgctgataaatataataacaagaaaatagaatcagcgtcgtttaacacaatattacaaaatattttgagactcatcaacgatgaaaactttaaatacttaacagaggaatcaatgataaaaattttaagcgatgatatgttaaatataaaaaatgaggatttcgccccactaattctcattaaatggttagagagtactcaacaaccatgcaccgtcgagttacttaaatgcctcagaatatcattgctttccccacaagttataaaatcactttatagtcatcgactggttagttcaatctacgaatgtataacattcttaaacaatatagcattcttggatgaatcatttcctagataccatagcatcgagttgatatctatcggtataagtaattcgcatgataagatttccataaactgctacaatcataaaaaaaatacatgggaaatgatatcttcacgtagatataggtgtagtttcgcagtggccgtcctggataatattatctatatgatgggtggatatgatcagtccccgtatagaagttcaaaggttatagcgtacaatacatgtacaaattcttggatatatgatataccagagctaaaatatcctcgttctaattgtgggggactggctgatgacgaatacatttattgtataggcggcatacgcgatcaggattcatcgttgacatctagtattgatagatggaagccatcaaaaccatattggcagaagtatgctaaaatgcgcgaaccaaaatgtgatatgggggttgcgatgttaaacggattaatatatgttataggtggaatcgttaaaggtgacacgtgtaccgacgcactagagagtttatcagaagatggatggatgaagcatcaacgtcttccaataaaaatgtccaatatgtcgacgattgttcatgatggcaagatttatatatctggaggttacaacaatagtagtgtagttaatgtaatatcgaatctagtccttagctataattcgatatatgatgaatggaccaaattatcatcattaaacattcctagaattaatcccgctctatggtcagcgcataataaattatatgtaggaggaggaatatctgatgatgttcgaactaatacatctgagacatacgacaaagaaaaagattgttggacattggataatggtcacgtgttaccacgcaattatataatgtataaatgcgaaccgattaaacataaatatccattggaaaaaacacagtacacgaatgattttctaaagtatttggaaagttttataggtagttgatagaacaaaatacataattttgtaaaaataaatcactttttatactaatatgacacgattaccaatacttttgttactaatatcattagtatacgctacaccttttcctcagacatctaaaaaaataggtgatgatgcaactctatcatgtaatcgaaataatacaaatgactacgttgttatgagtgcttggtataaggagcccaattccattattcttttagctgctaaaagcgacgtcttgtattttgataattataccaaggataaaatatcttacgactctccatacgatgatctagttacaactatcacaattaaatcattgactgctagagatgccggtacttatgtatgtgcattctttatgacatcaactacaaatgacactgataaagtagattatgaagaatactccacagagttgattgtaaatacagatagtgaatcgactatagacataatactatctggatctacacattcaccggaaactagttctgagaaacctgattatatagataattctaattgctcgtcggtattcgaaatctaagctcttttttttttttttttttttggcatataaataagtcgaccaccatggtgggtgaggatagcgtgctgatcaccgagaacatgcacatgaaactgtacatggagggcaccgtgaacgaccaccacttcaagtgcacatccgagggcgaaggcaagccctacgagggcacccagaccatgaagatcaaggtggtcgagggcggccctctccccttcgccttcgacatcctggctaccagcttcatgtacggcagcaaaacctttatcaaccacacccagggcatccccgacttctttaagcagtccttccctgagggcttcacatgggagaggatcaccacatacgaagacgggggcgtgctgaccgctacccaggacaccagcctccagaacggctgcctcatctacaacgtcaagatcaacggggtgaacttcccatccaacggccctgtgatgcagaagaaaacactcggctgggaggccagcaccgagatgctgtaccccgctgacagcggcctgagaggccatagccagatggccctgaagctcgtgggcgggggctacctgcactgctccctcaagaccacatacagatccaagaaacccgctaagaacctcaagatgcccggcttctacttcgtggacaggagactggaaagaatcaaggaggccgacaaagagacctacgtcgagcagcacgagatggctgtggccaggtactgcgacctgcctagcaaactggggcacagctgattaattaatttttatcgatctaattcaacaatgtctggagagcttcgcaggatcccgactccggaaccaattactgataaagaagatcatacagttacagacactgtctcatacactacagtaagtacatcatctggaattgtcactactaaatcaaccaccgatgatgcggatctttatgatacgtacaatgataatgatacagtaccaccaactactgtaggcggtagtacaacctctattagcaattataaaaccaaggactttgtagaaatatttggtattaccgcattaattatattgtcggccgtggcaattttctgtattacatattatatatataataaacgttcacgtaaatacaaaacagagaacaaagtctagatttttgacttacataaatgtctgggatagtaaaatctatcatattgagcggaccatctggtttaggaaagacagccatagccaaaagactatgggaatatatttggatttgtggtgtcccataccactagatttcctcgtcctatggaacgagaaggtgttgattaccattacgttaacagagaggccatctggaagggaatagccgccggaaactttctagaacatactgagtttttaggaaatatttacggaacttctaaaacagctgtgaatacagcggctattaataatcgtatttgtgtgatggatctaaacatcgacggtgttagaagtcttaaaaatacgtacctaatgccttactcggtgtatataagacctacctctcttaaaatggttgagaccaagcttcgtcgtagaaacactgaagctaacgatgagattcatcgtcgtgtgatgttggcaaaaactgacatggatgaggcaggtgaagccggtctattcgacactattatcattgaagatgatgtgaatttagcatatagtaagttaattcagatactacaggaccgtattagaatgtattttaacactaattagagacttaagacttaaaacttgataattaataatataactcgtttttatatgtgtctatttcaacgtctaatgtattagttaaatattaaaacttaccacgtaaaacttaaaatttaaaatgatatttcattgacagatagatcacacattatgaactttcaaggacttgtgttaactgacaattgcaaaaatcaatgggtcgttggaccattaataggaaaaggtggattcggtagtatttatactactaatgacaataattatgtagtaaaaatagagcccaaagctaacggatcattatttaccgaacaggcattttatactagagtacttaaaccatccgttatcgaagaatggaaaaaatctcacaatataaagcacgtaggtcttatcacgtgcaaggcatttggtctatacaaatccattaatgtggaatatcgattcttggtaattaatagattaggtgcagatctagatgcggtgatcagagccaataataatagactaccaaaaaggtcggtgatgttgatcggaatcgaaatcttaaataccatacaatttatgcacgagcaaggatattctcacggagatattaaagcgagtaatatagtcttagatcaaatagataagaataaattatatctagtggattacggattggtttctaaattcatgtctaatggcgaacatgttccatttataagaaatccaaataaaatggataacggtactctagaatttacacctatagattcgcataaaggatacgttgtatctagacgtggagatctagaaacacttggatattgtatgattagatggttgggaggtatcttaccatggactaagatatctgaaacaaagaattgtgcattagtaagtgccacaaaacagaaatatgttaacaatactgcgactttgttaatgaccagtttgcaatatgcacctagagaattgctgcaatatattaccatggtaaactctttgacatattttgaggaacccaattacgacaagtttcggcacatattaatgcagggtgtatattattaagtgtggtgtttggtcgataaaaattaaaaaataacttaatttattattgatctcgtgtgtacaaccgaaatcatggcgatgttttacgcacacgctctcggtgggtacgacgagaatcttcatgcctttcctggaatatcatcgactgttgccaatgatgtcaggaaatattctgttgtgtcagtttataataacaagtatgacattgtaaaagacaaatatatgtggtgttacagtcaggtgaacaagagatatattggagcactgctgcctatgtttgagtgcaatgaatatctacaaattggaaatccgatccatgatcaagaaggaaatcaaatctctatcatcacatatcgccacaaaaactactatgctctaagcggaatcgggtacgagagtctagacttgtgtttggaaggagtagggattcatcatcacgtacttgaaacaggaaacgctgtatatggaaaagttcaacatgattattctactatcaaagagaaggccaaagaaatgagtgcacttagtccaggacctatcatcgattaccacgtctggataggagattgtatctgtcaagttactgctgtggacgtacatggaaaggaaattatgaaaatgagattcaaaaagggtgcggtgcttccgatcccaaatctggtaaaagttaaacttggggagaatgatacagaaaatctttcttctactatatcggcggcaccatcgaggtaaccacctctctggaagacagcgtgaatcatgtactcatgaaacgtttggaaactatacgccatatgtggtctgttgtatatgatcattttgatattgtgaatggtaaagaatgctgttatgtgcatacgcattcatctaatcaaaatcctataccgagtactgtaaaaacaaatttgtacatgaagactatgggatcatgcattcaaatggattccatggaagctctagagtatcttagcgaactgaaggaatcaggtggatggagtcccagaccagaaatgcaggaatttgaatatccagatggagtggaagacactgaatcaattgagagattggcagaggagttcttcaatagatcagaacttcaggctggtgaatcagtcaaatttggtaattctattaattgttaaacatacatctgtttcagctaagcaactaagaacacgtatacggcagcagcttccttctatactctcatcttttaccaacacaaagggtggatatttgttcattggagttgataataatacacacaaagtatttggattcacggtgggttacgactacctcagactgatagagaatgatatagaaaagcatatcaaaagacttcgtgttgtgcatttctgtgagaagaaagaggacatcaagtacgcgtgtcgattcatcaaggtatataaacctggggatgagactacctcgacatacgtgtgcgctatcaaagtggaaagatgctgttgtgctgtgtttgcagattggccagaatcatggtatatggatactaatggtatcaagaagtattctccagatgaatgggtgtcacatataaaattttaattaatgtaactatagagaacaaataataaggttgtaatatcatatagacaataactaacaattaattagtaactgttatctcttttttaactaaccaactaactatatacctattaatacatcgtaattatagttcttaacatctattaatcattaattcgcttctttaattttttataaactaacattgttaattgaaaagggataacatgttacagaatataaattatatatggatttttttaaaaaggaaatacttgactggagtatatatttatctcttcattatatagcacgcgtgttttccaatttttccacatcccatataatacaggattataatctcgttcgaacatacgagaaagtggataaaacaatagttgattttttatctaggttgccaaatttattccatattttagaatatggggaaaatattctacatatttattctatggatgatgctaatacgaatattataattttttttctagatagagtattaaatattaataagaacgggtcatttatacacaatctcgggttatcatcatccattaatataaaagaatatgtatatcaattagttaataatgatcatccagataataggataagactaatgcttgaaaatggacgtagaacaagacattttttgtcctatatatcagatacagttaatatctatatatgtattttaataaatcatggattttatatagatgccgaagacagttacggttgtacattattacatagatgtatatatcactataagaaatcagaatcagaatcatacaatgaattaattaagatattgttaaataatggatcagatgtagataaaaaagatacgtacggaaacacaccttttatcctattatgtaaacacgatatcaacaacgtggaattgtttgagatatgtttagagaatgctaatatagactctgtagactttaatagatatacacctcttcattatgtctcatgtcgtaataaatatgattttgtaaagttattaatttctaaaggagcaaatgttaatgcgcgtaataaattcggaactactccattttattgtggaattatacacggtatctcgcttataaaactatatttggaatcagacacagagttagaaatagataatgaacatatagttcgtcatttaataatttttgatgctgttgaatctttagattatctattatccagaggagttattgatattaactatcgtactatatacaacgaaacatctatttacgacgctgtcagttataatgcgtataatacgttggtctatctattaaacaaaaatggtgattttgagacgattactactagtggatgtacatgtatttcggaagcagtcgcaaacaacaacaaaataataatggaagtactattgtctaaacgaccatctttgaaaattatgatacagtctatgatagcaattactaaacataaacagcataatgcagatttattgaaaatgtgtataaaatatactgcgtgtatgaccgattatgatactcttatagatgtacagtcgctacagcaatataaatggtatattttaagatgtttcgatgaaatagatatcatgaagagatgttatataaaaaataaaactgtattccaattagttttttgtatcaaagacattaatactttaatgagatacggtaaacatccttctttcgtgaaatgcactagtctcgacgtatacggaagtcgtgtacgtaatatcatagcatctattagatatcgtcagagattaattagtctattatccaagaagctggatcctggagataaatggtcgtgttttcctaacgaaataaaatataaaatattggaaaactttaacgataacgaactatccacatatctaaaaatcttataaacattattaaaatataaaatctaagtaggataaaatcacactacatcattgtttccttttagtgctcgacagtgtatactatttttaacgctcataaataaaaatgaaaacgatttccgttgttacgttgttatgcgtactacctgctgttgtttattcaacatgtactgtacccactatgaataacgctaaattaacgtctaccgaaacatcgtttaatgataaccagaaagttacgtttacatgtgatcagggatatcattctttggatccaaatgctgtctgtgaaacagataaatggaaatacgaaaatccatgcaaaaaaatgtgcacagtttctgattatgtctctgaactatataataaaccgctatacgaagtgaattccaccatgacactaagttgcaacggcgaaacaaaatattttcgttgcgaagaaaaaaatggaaatacttcttggaatgatactgttacgtgtcctaatgcggaatgtcaacctcttcaattagaacacggatcgtgtcaaccagttaaagaaaaatactcatttggggaatatatgactatcaactgtgatgttggatatgaggttattggtgcttcgtacataagttgtacagctaattcttggaatgttattccatcatgtcaacaaaaatgtgatatgccgtctctatctaacggattaatttccggatctacattttctatcggtggcgttatacatcttagttgtaaaagtggttttacactaacggggtctccatcatccacatgtatcgacggtaaatggaatcccatactcccaatatgtgtacgaactaacgaaaaatttgatccagtggatgatggtcccgacgatgagacagatttgagcaaactctcgaaagacgttgtacaatatgaacaagaaatagaatcgttagaagcaacttatcatataatcatagtggcgttgacaattatgggcgtcatatttttaatctccgttatagtattagtttgttcctgtgacaaaaataatgaccaatataagttccataaattgctaccgtaaatataaatccgttaaaataattaataatttaataacaaacaagtatcaaaagattaaagacttatagctagaatcaattgagatgtcttcttcagtggatgttgatatctacgatgccgttagagcatttttactcaggcactattataacaagagatttattgtgtatggaagaagtaacgccatattacataatatatacaggctatttacaagatgcgccgttataccgttcgatgatatagtacgtactatgccaaatgaatcacgtgttaaacaatgggtgatggatacacttaatggtataatgatgaatgaacgcgatgtttctgtaagcgttggcaccggaatactattcatggaaatgtttttcgattacaataaaaatagtatcaacaatcaactaatgtatgatataattaatagcgtatctataattctagctaatgagagatatagaagcgcttttaacgacgatggtatatacatccgtagaaatatgattaacaagttgtacggatacgcatctctaactactattggcacgatcgctggaggtgtttgttattatctgttgatgcatctagttagtttgtataaataattatttcaatatactagttaaaattttaagattttaaatgtataaaaaactaataacgtttttatttgtaataggtgcattagcatcctattcgaataatgagtacactccgtttaataaactgagtgtaaaactctatatagatggagtagataatatagaaaattcatatactgatgataataatgaattggtgttaaattttaaagagtacacaatttctattattacagagtcatgcgacgtcggatttgattccatagatatagatgttataaacgactataaaattattgatatgtataccattgactcgtctactattcaacgcagaggtcacacgtgtagaatatctaccaaattatcatgccattatgataagtacccttatattcacaaatatgatggtgatgagcgacaatattctattactgcagagggaaaatgctataaaggaataaaatatgaaataagtatgatcaacgatgatactctattgagaaaacatactcttaaaattggatctacttatatatttgatcgtcatggacatagtaatacatattattcaaaatatgatttttaaaaatttaaaatatattatcacttcagtgacagtagtcaaataacaaacaacaccatgagatatattataattctcgcagttttgttcattaatagtatacatgctaaaataactagttataagtttgaatccgtcaattttgattccaaaattgaatggactggggatggtctatacaatatatcccttaaaaattatggcatcaagacgtggcaaacaatgtatacaaatgtaccagaaggaacatacgacatatccgcatttccaaagaatgatttcgtatctttctgggttaaatttgaacaaggcgattataaagtggaagagtattgtacgggactatgcgtcgaagtaaaaattggaccaccgactgtaacattgactgaatacgacgaccatatcaatttgtacatcgagcatccgtatgctactagaggtagcaaaaagattcctatttacaaacgcggtgacatgtgtgatatctacttgttgtatacggctaacttcacattcggagattctaaagaaccagtaccatatgatatcgatgactacgattgcacgtctacaggttgcagcatagactttgtcacaacagaaaaagtgtgcgtgacagcacagggagccacagaagggtttctcgaaaaaattactccatggagttcgaaagtatgtctgacacctaaaaagagtgtatatacatgcgcaattagatccaaagaagatgttcccaatttcaaggacaaaatggccagagttatcaagagaaaatttaatacacagtctcaatcttatttaactaaatttctcggtagcacatcaaatgatgttaccacttttcttagcatgcttaacttgactaaatattcataactaatttttattaatgatacaaaaacgaaataaaactgcatattatacactggttaacgcccttataggctctaaccattttcaagatgaggtccctgattatagtccttctgttcccctctatcatctactccatgtctattagacgatgtgagaagactgaagaggaaacatggggattgaaaatagggttgtgtataattgccaaagatttctatcccgaaagaactgattgcagtgttcatctcccaactgcaagtgaaggattgataactgaaggcaatggattcagggatatacgaaacaccgataaattataaaaaaagcaatgtgtccgctgtttccgttaataatactattttcgtaactggcggattattcataaataactctaatagcacgatcgtggttaacaatatggaaaaacttgacatttataaagacaaacaatggtcgattatagaaatgcctatggctagggtatatcacggcattgactcgacatttggaatgttatattttgccggaggtctatccgttaccgaacaatatggtaatttagagaaaaacaacgagatatcttgttacaatcctagaacgaataagtggtttgatatttcatatactatttataagatatccatatcatcattgtgtaaactaaataacgtcttctatgtatttagtaaggacattggatatgtggaaaagtatgatggtgcatggaagttagtacatgatcgtctccccgctataaaggcattatcaacttctccttattgattgaaaatgaaaatataaatagtttttatgtatagcagtattaccctatagttttattgcttactactaacatggatacagatgttacaaatgtagaagatatcataaatgaaatagatagagagaaagaagaaatactaaaaaatgtagaaattgaaaataataaaaacattaacaagaatcatcccaatgaatatattagagaagcactcgttattaataccagtagtaatagtgattccattgataaagaagttatagaatgtatcagtcacgatgtaggaatatagatcatatctactaatttttataatcgatacaaaacataaaaaacaactcgttattacatagcaggcatggaatccttcaagtattgttttgataacgatggcaagaaatggattatcggaaatactttatattctggtaattcaatactctataaggtcagaaaaaatttcactagttcgttctacaattacgtaatgaagatagatcacaaatcacacaagccattgttgtctgaaatacgattctatatatctgtattggatcctttgactatcgacaactggacacgggaacgtggtataaagtatttggctattccagatctgtatggaattggagaaaccgatgattatatgttcttcgttataaagaattcgggaagagtattcgccccaaaggatactgaatcagtcttcgaagcatgcgtcactatgataaacacgttagagtttatacactctcgaggatttacccatggaaaaatagaaccgaggaatatactgattagaaataaacgtctttcactaattgactattctagaactaacaaactatacaagagtggaaactcacatatagattacaacgaggacatgataacttcaggaaatatcaattatatgtgtgtagacaatcatcttggagcaacagtttcaagacgaggagatttagaaatgttgggatattgcatgatagaatggttcggtggcaaacttccatggaaaaacgaaagtagtataaaagtaataaaacaaaaaaaagaatataaaaaatttatagctactttctttgaggactgttttcctgaaggaaatgaacctctggaattagttagatatatagaattagtatacacgttagattattctcaaactcctaattatgacagactacgtaaactgtttatacaagattgaaattatattcttttttttatagagtgtggtagtgttacggatatctaatattaatattagactatctctatcgcgctacacgaccaatatcgattactatggatatcttctatgaaaggagagaatgtatttatttctccagcgtcaatctcgtcagtattgacaatactgtattatggagctaatggatccactgctgaacagctatcaaaatatgtagaaacggaggagaacacggataaggttagcgctcagaatatctcattcaaatccatgaataaagtatatgggcgatattctgccgtgtttaaagattcctttttgagaaaaattggcgataagtttcaaactgttgacttcactgattgtcgcactatagatgcaatcaacaagtgtgtagatatctttactgaggggaaaatcaatccactattggatgaaccattgtctcctagcaattagtgccgtatactttaaagcaaaatggttgacgccattcgaaaaggaatttaccagtgattatcccttttacgtatctccgacggaaatggtagacgtaagtatgatgtctatgtacggcaaggcatttaatcacgcatctgtaaaagaatcattcggcaacttttcaatcatagaactgccatatgttggagatactagtatgatggtcattcttccagacaagattgatggattagaatccatagaacaaaatctaacagatacaaattttaagaaatggtgtgactttatggatgctatgtttatagatgttcacattcccaagtttaaggtaacaggctcgtataatctggtggatactctagtaaagtcaggactgacagaggtgttcggttcaactggagattatagcaatatgtgtaatttagatgtgagtgtcgacgctatgatccacaaaacgtatatagatgtcaatgaagagtatacagaagcagctgcagcaacttctgtactagtggcagactgtgcatcaacaattacaaatgagttctgtgcagatcatccgttcatctatgtgattaggcatgttgatggaaaaattcttttcgttggtagatattgctctccgacaactaattgttaaccattttttttaaaaaaaatagaaaaaacatgtggtattagtgcaggtcgttgttcttccaattgcaattggtaagatgacggccaactttagtacccacgtcttttcaccacagcactgtggatgtgacagactgaccagtattgatgacgtcaaacaatgtttgactgaatatatttattggtcgtcctatgcataccgcaacaggcaatgcgctggacaattgtattccacactcctctcttttagagatgatgcggaattagtgttcatcgacattcgcgagctggtaaaaaatatgccgtgggatgatgtcaaagattgtacagaaatcatccgttgttatataccggatgagcaaaaaaccatcagagagatttcggccatcatcggactttgtgcatatgctgctacttactggggaggtgaagaccatcccactagtaacagtctgaacgcattgtttgtgatgcttgagatgctaaattacgtggattataacatcatattccggcgtatgaattgatgagttgtacatcttgacattttctttcttctcttctccctttcttctcttctcccttcctccctcttctccctttcccagaaacaaacttttttacccactataaaataaaatgagtatactacctattatatttcttcctatatttttttattcttcattcgttcagacttttaacgcgtctgaatgtatcgacaaagggcaatattttgcatcattcatggagttagaaaacgagccagtaatcttaccatgtcctcaaataaatacgctatcatccggatataatatattagatattttatgggaaaaacgaggagcggataatgatagaattataccgatagataatggtagcaatatgctaattctgaacccgacacaatcagactctggtatttatatatgcattaccacgaacgaaacctactgtgacatgatgtcgttaaatttgacaatcgtgtctgtctcagaatcaaatatagatcttatctcgtatccacaaatagtaaatgagagatctactggcgaaatggtatgtcccaatattaatgcatttattgctagtaacgtaaacgcagatattatatggagcggacatcgacgccttagaaataagagacttaaacaacggacacctggaattattaccatagaagatgttagaaaaaatgatgctggttattatacatgtgttttagaatatatatacggtggcaaaacatataacgtaaccagaattgtaaaattagaggtacgggatagaataataccttctactatgcaattaccagatggcattgtaacttcaataggtagtaatttgactattgcatgcagagtatcgttgagacctcccacaacggacaccgacgtcttttggataagtaatggtatgtattacgaagaagatgatggggacggaaacggtagaataagtgtagcaaataaaatctatatgaccgataagagacgtgttattacatcccggttaaacattaatcctgtcaaggaagaagatgctacaacgtttacgtgtatggcgtttactattcctagcatcagcaaaacagttactgttagtataacgtgaatgtatgttgttacatttccatgtcaattgagtttataagaatttttatacattatcttccaacaaacaattgacgaacgtattgctatgattaactcccacgatactatgcatattattaatcattaacttgcagactatacctagtgctattttgacatactcgtgttcttgtgtaattgcggtatctatattattaaagtacgtaaatctagctatagttttattatttaattttagataatataccgtctccttatttttaaaaattgccacatcctttattaaatcatgaatgggaatttctatgtcatcgttagtatattgtgaacaacaagagcagatatctataggaaagggtggaatgcgatacattgatctatgtagttttaaaacacacgcgaactttgaagaatttatataaatcattccatcgatacatccttctatgttgacatgtatatatccaggaattcttttattaatgtcaggaaatgtataaactaaaacattgcccgaaagcggtgcctctatctgcgttatatccgttcttaacttacaaaatgtaaccaatacctttgcatgacttgttttgttcggcaacgttagtttaaacttgacgaatggattaattacaatagcatgatccgcgcatctattaagtttttttactttaacgcccttgtatgtttttacagagactttatctaaatttctagtgcttgtatgtgttataaatataacgggatatagaaccgaatcacctaccttagatacccaattacattttatcagatccagataataaacaaattttgtcgccctaactaattctatattgttatatattttacaattggttatgatatcatgtaataacttggagtctaacgcgcatcgtcgtacgtttatacaattgtgatttagtgtagtatatctacacatgtatttttccgcactatagtattctggactagtgataaaactatcgttatatctgtcttcaatgaactcatcgagatattgctctctgtcatattcatacacctgcataaactttctagacatcttacaatccgtgttattttaggatcatatttacatatttacgggtatatcaaagatgttagattagttaatgggaatcgtctataataatgaatattaaacaattatatgaggacttttaccacaaagcatcataaaaatgagtcgtcgtctgatttatgttttaaatatcaaccgcaaatcaactcataaaatacaagagaatgaaatatatacatattttagtcattgcaatatagaccatacttctacagaacttgattttgtagttaaaaactatgatctaaacagacgacaacctgtaactgggtatactgcactacactgctatttgtataataattactttacaaacgatgtactgaagatattattaaatcatgacgtaaatgtaacgatgaaaaccagtagcggacgtatgcctgtttatatattgcttactagatgttgtaatatttcacatgatgtagtgatagatatgatagacaaagataaaaaccacttattacatagagactattccaacctattactagagtatataaaatctcgttacatgttattgaaggaagaggatatcgatgagaacatagtatccactttattagataagggaatcgatcctaactttaaacaagacggatatacagcgttacattattattatttgtgtctcgcacacgtttataaactaggtgagtgtagaaaaccgataacgataaaaaaggccaagcgaattatttctttgtttatacaacatggagctaatctaaacgcgttagataattgtggtaatacaccattccatttgtatcttagtattgaaatgtgtaataatattcatatgactaaaatgctgttgacttttaatccgaatttcaaaatatgtaataatcatggattaacgcctatactatgttatataacttccgactacatacaacacgatattcttgttatgttaatacatcactatgaaacaaatgttggagaaatgccgatagatgagcgtcgtatgatcgtattcgagtttatcaaaacatattctacacgtccggcagattcgataacttatttgatgaataggtttaaaaatataaatatttatacccgctatgaaggaaagacattattacacgtagcatgtgaatataataatacacaagtaatagattatcttatacgtatcaacggagatataaatgcgttaaccgacaataacaaacacgctacacaactcattatagataacaaagaaaattccccatataccattaattgtttactgtatatacttagatatattgtagataagaatgtgataagatcgttggtggatcaacttccatctctacctatcttcgatataaaatcatttgagaaattcatatcctactgtatacttttagatgacacattttacgataggcacgttaagaatcgcgattctaaaacgtatcgatacgcattttcaaaatacatgtcgtttgataaatacgatggtataataactaaatgtcacgacgaaacaatgttactcaaactgtccactgttctagacactacactatatgcagttttaagatgtcataattcgagaaagttaagaagatacctcaacgagttaaaaaaatataataacgataagtcctttaaaatatattctaatattatgaatgagagataccttaatgtatattataaagatatgtacgtgtcaaaggtatatgataaactatttcctgttttcacagataaaaattgtctactaacattactaccttcagaaattatatacgaaatattatacatgctgacaattaacgatctttataatatatcgtatccacctaccaaagtatagttgtatttttctcatgcgatgtgtgtaaaaaaactgatattatataaatattttagtgccgtataataaagatgacgatgaaaatgatggtacatatatatttcgtatcattattgttattgctattccacagttacgccatagacatcgaaaatgaaatcacagaattcttcaataaaatgagagatactctaccagctaaagactctaaatggttgaatccagcatgtatgttcggaggcacaatgaatgatatagccgctctaggagagccattcagcgcaaagtgtcctcctattgaagacagtcttttatcgcacagatataaagactatgtggttaaatgggagaggctagaaaagaatagacggcgacaggtttctaataaacgtgttaaacatggtgatttatggatagccaactatacatctaaattcagtaaccgtaggtatttgtgcaccgtaactacaaagaatggtgactgtgttcagggtatagttagatctcatattaaaaaacctccttcatgcattccaaaaacatatgaactaggtactcatgataagtatggcatagacttatactgtggaattctttacgcaaaacattataataatataacttggtataaagataataaggaaattaatatcgacgacattaagtattcacaaacgggaaaggaattaattattcataatccagagttagaagatagcggaagatacgactgttacgttcattacgacgacgttagaatcaagaatgatatcgtagtatcaagatgtaaaatacttacggttataccgtcacaagaccacaggtttaaactaatactagatccgaaaatcaacgtaacgataggagaacctgccaatataacatgcactgctgtgtcaacgtcattattgatcgacgatgtactgattgaatgggaaaatccatccggatggcttataggattcgattttgatgtatactctgttttaactagtagaggcggtatcaccgaggcgaccttgtactttgaaaatgttactgaagaatatataggtaatacatataaatgtcgtggacacaactattattttgaaaaaacccttacaactacagtagtattggagtaaatatacaatgcatttttatatacattactgaattattattactgaattattattactgaattattattaattatatcgtatttgtgctatagaatggatgaagatacgcgactatctaggtatttgtatctcaccgatagagaacatataaatgtagactctattaaacagttgtgtaaaatatcagatcctaatgcatgttatagatgtggatgtacggctttacatgagtacttttataattatagatcagtcaacggaaaatacaagtatagatacaacggttactatcaatattattcatctagcgattatgaaaattataatgaatattattatgatagaactggtatgaacagtgagagtgataatatatcaatcaaaacagaatatgaattctatgatgaaacacaagatcaaagtacacaactagtaggttacgacattaaactcaaaaccaatgaggatgattttatggctatgatagatcagtgggtgtccatgattatatagatgaatcaattaataaagtagtatatggaagagagtctcacgtaagatggcgggatatatggcaagaacataatgatggcgtatacagtataggaaaggagtgcatagataatatatacgaagacaaccataccgtagacgaattctacaagatagacagcgtatcagatgtagatgacgcggaacacatatctccgataactaaaaaaccatagaatcagttgatgataatacctacatttctaatcttccgtataccatcaaatacaaaatattcgagcaacaataagtattttttatacctttaaaactgataaataaattttttctagtgatattttggcaagatgagaatcctatttctcatcgctttcatgtatgggtgtgttcactcatatgttaacgcggttgaaaccaaatgtccaaatctagacattgtaacatcttctggagaatttcattgttcaggatgtgtggaacatatgcctgagtttagctatatgtattggttggcaaaggatatgaaatcggacgaggataccaagtttatagaacatctgggtgatggcatcaaagaagatgaaaccgttcgtaccacagatagtggaatcgtcactctacgtaaagtccttcatgtgactgatactaataaatttgataattataggttcacttgtgtcctcgctacgctagatggcatttataaaaagaatgtttgctgaagtagttgtgtgctactatttttatttatgatataatctaatggaattaatttgaattgatatttatccaatactaaagattatattagaatcaaattaatcttttatacgagaaaaaataacgacatacgtcgtcaacaaattaaactttttatttattagttaactagcttatagaacttgctcattgttatgtttctaaaacgggtacggcatataggacaattatccgacgcaccggtttctcttcgtgttctatgccatatattgatgcatgttatgcaaaatatatgagtacacgaatccaataaaccaaagtatctatcgttttgagtaaacaacttcatagcaaattccacattctttttctttacttactctatacacgtcctcgtatttatttagtattttgatgatatccaactcagaaatggttgttgtattattgggtgtatttggagtataggtattattagctatgtaccaatttaccaaccctcttaatattgattgataatcacatcggttatccaattaataactaaattgtagtgtatatatagaccatatatgtttctatttttttgacagttacgtatagtttcagtaagttttgattgttgtattcctgtatctctagataagttagtcatatagtcccttccggcgatacgttttttccaagcccgaaattgattagccaaatgtgtatttatttttgtgatattgatataatatttcggataatgcatactgttagtcttatatcatttggttcatctatgtattgtaatattgttacatgatctatagatgatgtattgattttggcaggatcgaattccatatccgcgactaaacagtgaaaaaaatgtaaatactttttaaattttaaattagtaaaacttttttttattttttatgattccaaaaatactgaatacaaagtcctaaattataaatatggagatcatactaccacaacttattattatgtatacaaggccggtgtaatagatagatatatataattctattacaccggcagacaattaccgaccggtatttgtcgttaccaacataccgtataatatgtaatatacaattccataacccattgacagttgttatacatcaaaattgcaattcttttgattacgatgttataagaatgtagttaattgatgtatgatgttaatgtgtcctctttcctcttataacatcgtaatcaaaaacttttttataatatatacctaataatgtgtcttaatagttctcgtgattcgtcaaacaatcattcttataaaatataataaagcaacgtaaaaacacataaaaataagcgtaactaataagacaatggatatttacgacgataaaggtctacagactattaaactgtttaataatgaatttgattgtataaggaatgacatcagagaattatttaaacatgtaactgattccgatagtatacaacttccgatggaagacaattctgatattatagaaaatatcagaaaaatactatatagacgattaaaaaatgtagaatgtgttgacatcgataacacaataacttttatgaaatacgatccaaatgatgataataagcgtacgtgttctaattgggtacccttaactaataactatatggaatattgtctagtaatatatttggaaacaccgatatgtggaggcaaaataaaattataccaccctacaggaaatataaagtcggataaggatattatgtttgcaaagactctagactttaaatcaacgaaagtgttaactggacgtaaaacaattgccgttctagacatatccgtttcatataatagatcaatgactactattcactacaacgacgacgttgatatagatatacatactgataaaaatggaaaagagttatgttattgttatataacaatagatgatcattacttggttgatgtggaaactataggagttatagtcaatagatctggaaaatgtctgttagtaaataaccatctaggtataggtatcgttaaagataaacgtataagcgatagttttggagatgtatgtatggatacaatatttgacttttctgaagcacgagagttattttcattaactaatgatgataacaggaatatagcatgggacactgataaactagacgatgatacagatatatggactcccgtcacagaagatgattacaaatttctttctagactagtattgtatgcaaaatctcaatcggatactgtatttgactattatgttcttactggtgatacggaaccacccactgtattcattttcaaggtaactagattttactttaatatgccgaaataaaaaatttttgtataatatctagaggtagaggtattgtttagataaatacaaataacatagatacatcgcatacttagcatttttataaatatacataagacatacactttatacatttttgtaaaaatactcataaaaaaatttataaaaattatggcacaaccatatcttgtataggtagtttagttcgtcgagtgaacctataaacagataatagacaacacataataatgcctactaatacaagcataataccgggagatgggatatatgacgttgtagtgtttgggttttctgaacgttgatagtctactaatactacatgctgacatctaatgcctgtataaccatgagagcatctacaatacataccgtcaatatctctagcgtggatacagtcaccgtgtaaacaatatccatctccctctggaccgcataatctgatagctggaatatctgttgtagcgtttgtaatttctggcaatgtcgtttcgatagcgttaccactatcggcgaatgatctgattatcatagcagcgaacaacaacatcagataatttatcaacatttttgatggattctgtgtttatgctgtttctcagtgtgtgtttatgacaagattgggaattttatattattaattcagtaatataaactaataatatattgttaattgtgtaaataatataaaaataacaatacaatattgaatgtgttgctgttaaaaatgtatgtgttaatataatagaataaaataaatgagtatgatcattttagataacgattgattttatcattaccgcttcattcttatattctttgcttacggaacctatatttagaaacatctactaacaattttttatgcttgcattattaatggtatgtaatatgattgattgtgtacgcaataccaatttgttaagtatgaatacggggtacaaacataaattgaaatttaacattatttatttatgatatatatcgttatcgttaggtctataccatggatatctttaaagaactaatcttaaaacaccctgatgaaaatgttttgatttctccagtttccattttatctactttatctattctaaatcatggagcagctggttctacagctgaacaactatcaaaatatatagagaatatgaatgagaatacacccgatgacaataatgatgacatggaggtagatattccgtattgtgcgacactagctaccgcaaataaaatatacggtagcgatagtatcgagttccacgcctccttcctacaaaaaataaaagacgattttcaaactgtaaactttaataatgctaaccaaacaaaggaactaatcaacgaatgggttaagacaatgacaaatggtaaaattaattccttattgactagtccgctatccattaatactcgtatgacagttgttagcgccgtccattttaaagcaatgtggaaatatccattttctaaacatcttacatatacagacaagttttatatttctaagaatatagttaccagcgttgatatgatggtgggtaccgagaataacttgcaatatgtacatattaatgaattattcggaggattctctattatcgatattccatacgagggaaactctagtatggtaattatactaccggacgacatagaaggtatatataacatagaaaaaaatataacagatgaaaaatttaaaaaatggtgtggtatgttatctactaaaagtatagacttgtatatgccaaagtttaaagtggaaatgacagaaccgtataatctggtaccgattttagaaaatttaggacttactaatatattcggatattatgcagattttagcaagatgtgtaatgaaactatcactgtagaaaaatttctacatacgacgtttatagatgttaatgaggagtatacagaagcatcggccgttacaggagtatttacgattaacttttcgatggtatatcgtacgaaggtctacataaaccatccattcatgtacatgattaaagacaccacaggacgtatactttttatagggaaatactgctatccgcaataaatataaacaaatagacttttataaagagtcttcaacgataagtatatcgacatactacttatgctgcgaaagattctgaacgagaacgactatctcaccctcttggatcatatccgcactgctaaatactaaatctccactacactttttatcatcttatgaggaatgattgccttcgtgaaataggaataattagcaccagaatagctatggattattgtggtagagagtgcactattctatgtcgtctactggatgaagatgtgacgtacaaaaaaataaaactagaaattgaaacgtgtcacaacttatcaaaacatatagatagacgaggaaacaatgcgctacattgttacgtctccaataaatgcgatacagacattaagattgttctctcgcggagtcgagagactttgtagaaacaacgaaggattaactccgctaggagtatacagtaagcatagatacgtaaaatctcagattgtgcatctactgatatccagctattcaaattcctctaacgaactcaagtcgaatataaatgatttcgatctgtattcggataatatcgacttacgtctgctaaaatacctaattgtggataaacggatacgtccgtccaagaatacgaattatgcaatcaatggtctcggattggtggatatatacgtaacgacgcctaatccgagaccagaagtattgctatggcttcttaaatcagaatgttacagcaccggttacgtatttcgtacctgtatgtacgacagtgatatgtgtaagaactctcttcattactatatatcgtctcatagagaatctcaatctctatccaaggatgtaattaaatgtttgatcgataacaatgtttccatccatggcagagacgaaggaggatctttacccatccaatactactggtctttctcaaccatagatatagagattgttaaattattattaataaaggatgtggacacgtgtagagtatacgacgtcagccctatattagaggcgtattatctaaacaagcgatttagagtaaccccatataatgtagacatggaaatcgttaatcttcttattgagagacgtcatactcttgtcgacgtaatgcgtagtattacttcgtacgattccagagaatataaccactacatcatcgataacattctaaagagatttagacaacaggatgaatccatcgtacaagccatactgataaactacttacattacggcgatatggtcgttcgatgcatgttagataacggacaacaactatcctctacacgactactttgttaataataatctcgtcgatgtaaacgtcgtaaggtttatcgtggaaaatatggacacgcggctgtaaatcacgtatcgaacaatggccgtctatgtatgtacggtctgatattatcgagatttaataattgcgggtatcactgttatgaaaccatactgatagatgtatttgatatactaagcaagtacatggatgatatagatatgatcgataactctactatattacgcggtcgatgtcaataatatacaatttgcaaagcggttattggaatatggagcgagtatcacgctcgataatcaatacggccatccagaaaagcagttacagaagagaaaacaaaacgaaatcgttgttctacaagatgtctctccctacgacgattactacgtaaaaaagatactagcctactgcctattaagggacgagtcattcgcggaactacatagtaaattctgtttaaacgaggactataaaagtgtatttatgaaaaatatatcattcgataagatagattccatcatcgtgacataagtcgcctcaaagagattcgaatctccgacaccgacctgtatacggtatcacagctatcttaaagccatacattcagacagtcacatttcatttcccatgtacgacgatctcatagaacagtgccatctatcgatggagcgtaaaagtaaactcgtcgacaaagcactcaataaattagagtctaccatcggtcaatctagactatcgtatttgcctccggaaattatgcgcaatatcatctaaacagtatgttgtacggaaagaaccattacaaatattatccatgatagaaagaaaatatctatatgattggagaagtaggaaacaggaacaagacaacgattactacattattaaatcatgaagtccgtattatactcgtatatattgtttctctcatgtataataataaacggaagagatatagcaccgcatgcaccatccgatggaaagtgtaaagacaacgaatacaaacgccataatttgtgtccgggaacatacgcttccagattatgcgatagcaagactaacacacgatgtacgccgtgtggttcgggtaccttcacatctcgcaataatcatttacccgcttgtctaagttgtaacggaagacgcgatcgtgtaacacgactcacaatagaatctgtgaatgctctcccggatattattgtcttctcaaaggatcatccggatgcaaggcatgtgtttcccaaacaaaatgtggaataggatacggagtatccggagacgtcatctgttctccgtgtggtctcggaacatattctcacaccgtctcttccgcagataaatgcgaacccgtacccagaaatacgtttaactatatcgatgtggaaattaacctgtatccagttaacgacacgtcgtgtactcggacgaccactaccggtctcagcgaatccatctcaacgtcggaactaactattactatgaatcataaagactgtaatcccgtatttcgtgatggatacttctccgttcttaataaggtagcgacttcaggtttctttacaggagaaaggtgtgcactctgaatttcgagattaaatgcaataacaaagattcttcctccaaacagttaacgaaagcaaagaatgatactatcatgccgcattcggagacagtaactctagtgggcgacatctatatactatatagtaataccaatactcaagactacgaaactgatacaatctcttatcatgtgggtaatgttctcgatgtcgatagccatatgcccggtagttgcgatatacataaactgatcactaattccaaacccacccactttttatagtaagtttttcacccataaataataaatacaataattaatttctcgtaaaagtagaaaatatattctaatttattgcacggtaaggaagtagaatcataaagaacagtactcaatcaatagcaattatgaaacaatatatcgtcctggcatgcatgtgcctggcggcagctgctatgcctgccagtcttcagcaatcatcctcatcctcctcctcgtgtacggaagaagaaaacaaacatcatatgggaatcgatgttattatcaaagtcacaaagcaagaccaaacaccgaccaatgataagatttgccaatccgtaacggaaattacagagtccgagtcagatccagatcccgaggtggaatcagaagatgattccacatcagtcgaggatgtagatcctcctaccacttattactccatcatcggtggaggtctgagaatgaactttggattcaccaaatgtcctcagattaaatccatctcagaatccgctgatggaaacacagtgaatgctagattgtccagcgtgtccccaggacaaggtaaggactctcccgcgatcactcatgaagaagctcttgctatgatcaaagactgtgaagtgtctatcgacatcagatgtagcgaagaagagaaagacagcgacatcaagacccatccagtactcgggtctaacatctctcataagaaagtgagttacgaagatatcatcggttcaacgatcgtcgatacaaaatgcgtcaagaatctagagtttagcgttcgtatcggagacatgtgcaaggaatcatctgaacttgaggtcaaggatggattcaagtatgtcgacggatcggcatctgaaggtgcaaccgatgatacttcactcatcgattcaacaaaactcaaagcgtgtgtctgaatcgataactctattcatctgaaattggatgagtagggttaatcgaacgattcaggcacaccacgaattaaaaaagtgtaccggacactatattccggtttgcaaaacaaaaatgttcttaactacattcacaaaaagttacctctcgcgacttcttctttttctgtctcaatagtgtgatacgattatgacactattcctattcctattcctatttcctttcagagtatcacaaaaatattaaacctctttctgatggtctcataaaaaaagttttacaaaaatatttttattctctttctctctttgatggtctcataaaaaaagttttacaaaaatatttttattctctttctctctttgatggtctcataaaaaaagttttacaaaaatatttttattctctttctctctttgatggtctcataaaaaaagttttacaaaaatatttttattctctttctctctttgatggtctcataaaaaaagttttacaaaaatatttttattctctttctctctttgatggtctcataaaaaaagttttacaaaaatatttttattctctttctctctttgatggtctcataaaaaaagttttacaaaaatatttttattctctttctctctttgatggtctcataaaaaaagttttacaaaaatatttttattctctttctctctttgatggtctcataaaaaaagttttacaaaaatatttttattctctttctctctttgatggtctcataaaaaaagttttacaaaaatatttttattctctttctctctttgatggtctcataaaaaaagttttacaaaaatatttttattctctttctctctttgatggtctcataaaaaaagttttacaaaaatatttttattctctttctctctttgatggtctcataaaaaagttttacaaaaatatttttattctctttctctctttgatggtctcataaaaaagttttacaaaaatatttttattctctttctctctttgatggtctcataaaaaaagttttacaaaaatatttttattctctttctctctttgatggtctcataa

SEQ ID NO: 6 - DNA, 199504 bp, Artificial Sequence
  GLV-1h253 genome
ttatgagaccatcaaagagagaaagagaataaaaatatttttgtaaaactttttttatgagaccatcaaagagagaaagagaataaaaatatttttgtaaaacttttttatgagaccatcaaagagagaaagagaataaaaatatttttgtaaaacttttttatgagaccatcaaagagagaaagagaataaaaatatttttgtaaaactttttttatgagaccatcaaagagagaaagagaataaaaatatttttgtaaaactttttttatgagaccatcaaagagagaaagagaataaaaatatttttgtaaaactttttttatgagaccatcaaagagagaaagagaataaaaatatttttgtaaaactttttttatgagaccatcaaagagagaaagagaataaaaatatttttgtaaaactttttttatgagaccatcaaagagagaaagagaataaaaatatttttgtaaaactttttttatgagaccatcaaagagagaaagagaataaaaatatttttgtaaaactttttttatgagaccatcaaagagagaaagagaataaaaatatttttgtaaaactttttttatgagaccatcaaagagagaaagagaataaaaatatttttgtaaaactttttttatgagaccatcaaagagagaaagagaataaaaatatttttgtaaaactttttttatgagaccatcaaagagagaaagagaataaaaatatttttgtaaaactttttttatgagaccatcaaagagagaaagagaataaaaatatttttgtaaaactttttttatgagaccatcagaaagaggtttaatatttttgtgatactctgaaaggaaataggaataggaataggaatagtgtcataatcgtatcacactattgagacagaaaaagaagaagtcgcgagaggtaactttttgtgaatgtagttaagaacatttttgttttgcaaaccggaatatagtgtccggtacacttttttaattcgtggtgtgcctgaatcgttcgattaaccctactcatccaatttcagatgaatagagttatcgattcagacacacgctttgagttttgttgaatcgatgagtgaagtatcatcggttgcaccttcagatgccgatccgtcgacatacttgaatccatccttgacctcaagttcagatgattccttgcacatgtctccgatacgaacgctaaactctagattcttgacgcattttgtatcgacgatcgttgaaccgatgatatcttcgtaactcactttcttatgagagatgttagacccgagtactggatgggtcttgatgtcgctgtctttctcttcttcgctacatctgatgtcgatagacacttcacagtctttgatcatagcaagagcttcttcatgagtgatcgcgggagagtccttaccttgtcctggggacacgctggacaatctagcattcactgtgtttccatcagcggattctgagatggatttaatctgaggacatttggtgaatccaaagttcattctcagacctccaccgatgatggagtaataagtggtaggaggatctacatcctcgactgatgtggaatcatcttctgattccacctcgggatctggatctgactcggactctgtaatttccgttacggattggcaaatcttatcattggtcggtgtttggtcttgctttgtgactttgataataacatcgattcccatatgatgtttgttttcttcttccgtacacgaggaggaggatgaggatgattgctgaagactggcaggcatagcagctgccgccaggcacatgcatgccaggacgatatattgtttcataattgctattgattgagtactgttctttatgattctacttccttaccgtgcaataaattagaatatattttctacttttacgagaaattaattattgtatttattatttatgggtgaaaaacttactataaaaagtgggtgggtttggaattagtgatcagtttatgtatatcgcaactaccgggcatatggctatcgacatcgagaacattacccacatgataagagattgtatcagtttcgtagtcttgagtattggtattactatatagtatatagatgtcgcccactagagttactgtctccgaatgcggcatgatagtatcattctttgctttcgttaactgtttggaggaagaatctttgttattgcatttaatctcgaaattcagagtgcacacctttctcctgtaaagaaacctgaagtcgctaccttattaagaacggagaagtatccatcacgaaatacgggattacagtctttatgattcatagtaatagttagttccgacgttgagatggattcgctgagaccggtagtggtcgtccgagtacacgacgtgtcgttaactggatacaggttaatttccacatcgatatagttaaacgtatttctgggtacgggttcgcatttatctgcggaagagacggtgtgagaatatgttccgagaccacacggagaacagatgacgtctccggatactccgtatcctattccacattttgtttgggaaacacatgccttgcatccggatgatcctttgagaagacaataatatccgggagagcattcacagattctattgtgagtcgtgttacacgatcgcgtcttccgttacaacttagacaagcgggtaaatgattattgcgagatgtgaaggtacccgaaccacacggcgtacatcgtgtgttagtcttgctatcgcataatctggaagcgtatgttcccggacacaaattatggcgtttgtattcgttgtctttacactttccatcggatggtgcatgcggtgctatatctcttccgtttattattatacatgagagaaacaatatatacgagtataatacggacttcatgatttaataatgtagtaatcgttgtcttgttcctgtttcctacttctccaatcatatagatattttctttctatcatggataatatttgtaatggttctttccgtacaacatactgtttagatgatattgcgcataatttccggaggcaaatacgatagtctagattgaccgatggtagactctaatttattgagtgctttgtcgacgagtttacttttacgctccatcgatagatggcactgttctatgagatcgtcgtacatgggaaatgaaatgtgactgtctgaatgtatggctttaagatagctgtgataccgtatacaggtcggtgtcggagattcgaatctctttgaggcgacttatgtcacgatgatggaatctatcttatcgaatgatatatttttcataaatacacttttatagtcctcgtttaaacagaatttactatgtagttccgcgaatgactcgtcccttaataggcagtaggctagtatcttttttacgtagtaatcgtcgtagggagagacatcttgtagaacaacgatttcgttttgttttctcttctgtaactgcttttctggatggccgtattgattatcgagcgtgatactcgctccatattccaataaccgctttgcaaattgtatattattgacatcgaccgcgtaatatagtagagttatcgatcatatctatatcatccatgtacttgcttagtatatcaaatacatctatcagtatggtttcataacagtgatacccgcaattattaaatctcgataatatcagaccgtacatacatagacggccattgttcgatacgtgatttacagccgcgtgtccatattttccacgataaaccttacgacgtttacatcgacgagattattattaacaaagtagtcgtgtagaggatagttgttgtccgttatctaacatgcatcgaacgaccatatcgccgtaatgtaagtagtttatcagtatggcttgtacgatggattcatcctgttgtctaaatctctttagaatgttatcgatgatgtagtggttatattctctggaatcgtacgaagtaatactacgcattacgtcgacaagagtatgacgtctctcaataagaagattaacgatttccatgtctacattatatggggttactctaaatcgcttgtttagataatacgcctctaatatagggctgacgtcgtatactctacacgtgtccacatcctttattaataataatttaacaatctctatatctatggttgagaaagaccagtagtattggatgggtaaagatcctccttcgtctctgccatggatggaaacattgttatcgatcaaacatttaattacatccttggatagagattgagattctctatgagacgatatatagtaatgaagagagttcttacacatatcactgtcgtacatacaggtacgaaatacgtaaccggtgctgtaacattctgatttaagaagccatagcaatacttctggtctcggattaggcgtcgttacgtatatatccaccaatccgagaccattgattgcataattcgtattcttggacggacgtatccgtttatccacaattaggtattttagcagacgtaagtcgatattatccgaatacagatcgaaatcatttatattcgacttgagttcgttagaggaatttgaatagctggatatcagtagatgcacaatctgagattttacgtatctatgcttactgtatactcctagcggagttaatccttcgttgtttctacaaagtctctcgactccgcgagagaacaatcttaatgtctgtatcgcatttattggagacgtaacaatgtagcgcattgtttcctcgtctatctatatgttttgataagttgtgacacgtttcaatttctagttttatttttttgtacgtcacatcttcatccagtagacgacatagaatagtgcactctctaccacaataatccatagctattctggtgctaattattcctatttcacgaaggcaatcattcctcataagatgataaaaagtgtagtggagatttagtatttagcagtgcggatatgatccaagagggtgagatagtcgttctcgttcagaatctttcgcagcataagtagtatgtcgatatacttatcgttgaagactctttataaaagtctatttgtttatatttattgcggatagcagtatttccctataaaaagtatacgtcctgtggtgtctttaatcatgtacatgaatggatggtttatgtagaccttcgtacgatataccatcgaaaagttaatcgtaaatactcctgtaacggccgatgcttctgtatactcctcattaacatctataaacgtcgtatgtagaaatttttctacagtgatagtttcattacacatcttgctaaaatctgcataatatccgaatatattagtaagtcctaaattttctaaaatcggtaccagattatacggttctgtcatttccactttaaactttggcatatacaagtctatacttttagtagataacataccacaccattttttaaatttttcatctgttatatttttttctatgttatatataccttctatgtcgtccggtagtataattaccatactagagtttccctcgtatggaatatcgataatagagaatcctccgaataattcattaatatgtacatattgcaagttattctcggtacccaccatcatatcaacgctggtaactatattcttagaaatataaaacttgtctgtatatgtaagatgtttagaaaatggatatttccacattgctttaaaatggacggcgctaacaactgtcatacgagtattaatggatagcggactagtcaataaggaattaattttaccatttgtcattgtcttaacccattcgttgattagttcctttgtttggttagcattattaaagtttacagtttgaaaatcgtcttttattttttgtaggaaggaggcgtggaactcgatactatcgctaccgtatattttatttgcggtagctagtgtcgcacaatacggaatatctacctccatgtcatcattattgtcatcgggtgtattctcattcatattctctatatattttgatagttgttcagctgtagaaccagctgctccatgatttagaatagataaagtagataaaatggaaactggagaaatcaaaacattttcatcagggtgttttaagattagttctttaaagatatccatggtatagacctaacgataacgatatatatcataaataaataatgttaaatttcaatttatgtttgtaccccgtattcatacttaacaaattggtattgcgtacacaatcaatcatattacataccattaataatgcaagcataaaaaattgttagtagatgtttctaaatataggttccgtaagcaaagaatataagaatgaagcggtaatgataaaatcaatcgttatctaaaatgatcatactcatttattttattctattatattaacacatacatttttaacagcaacacattcaatattgtattgttatttttatattatttacacaattaacaatatattattagtttatattactgaattaataatataaaattcccaatcttgtcataaacacacactgagaaacagcataaacacagaatccatcaaaaatgttgataaattatctgatgttgttgttcgctgctatgataatcagatcattcgccgatagtggtaacgctatcgaaacgacattgccagaaattacaaacgctacaacagatattccagctatcagattatgcggtccagagggagatggatattgtttacacggtgactgtatccacgctagagatattgacggtatgtattgtagatgctctcatggttatacaggcattagatgtcagcatgtagtattagtagactatcaacgttcagaaaacccaaacactacaacgtcatatatcccatctcccggtattatgcttgtattagtaggcattattatgtgttgtctattatctgtttataggttcactcgacgaactaaactacctatacaagatatggttgtgccataatttttataaatttttttatgagtatttttacaaaaatgtataaagtgtatgtcttatgtatatttataaaaatgctaagtatgcgatgtatctatgttatttgtatttatctaaacaatacctctacctctagatattatacaaaaattttttatttcggcatattaaagtaaaatctagttaccttgaaaatgaatacagtgggtggttccgtatcaccagtaagaacataatagtcaaatacagtatccgattgagattttgcatacaatactagtctagaaagaaatttgtaatcatcttctgtgacgggagtccatatatctgtatcatcgtctagtttatcagtgtcccatgctatattcctgttatcatcattagttaatgaaaataactctcgtgcttcagaaaagtcaaatattgtatccatacatacatctccaaaactatcgcttatacgtttatctttaacgatacctatacctagatggttatttactaacagacattttccagatctattgactataactcctatagtttccacatcaaccaagtaatgatcatctattgttatataacaataacataactcttttccatttttatcagtatgtatatctatatcaacgtcgtcgttgtagtgaatagtagtcattgatctattatatgaaacggatatgtctagaacggcaattgttttacgtccagttaacactttcgttgatttaaagtctagagtctttgcaaacataatatccttatccgactttatatttcctgtagggtggtataattttattttgcctccacatatcggtgtttccaaatatattactagacaatattccatatagttattagttaagggtacccaattagaacacgtacgcttattatcatcatttggatcgtatttcataaaagttattgtgttatcgatgtcaacacattctacattttttaatcgtctatatagtatttttctgatattttctataatatcagaattgtcttccatcggaagttgtatactatcggaatcagttacatgtttaaataattctctgatgtcattccttatacaatcaaattcattattaaacagtttaatagtctgtagacctttatcgtcgtaaatatccattgtcttattagttacgcttatttttatgtgtttttacgttgctttattatattttataagaatgattgtttgacgaatcacgagaactattaagacacattattaggtatatattataaaaaagtttttgattacgatgttataagaggaaagaggacacattaacatcatacatcaattaactacattcttataacatcgtaatcaaaagaattgcaattttgatgtataacaactgtcaatgggttatggaattgtatattacatattatacggtatgttggtaacgacaaataccggtcggtaattgtctgccggtgtaatagaattatatatatctatctattacaccggccttgtatacataataataagttgtggtagtatgatctccatatttataatttaggactttgtattcagtatttttggaatcataaaaaataaaaaaaagttttactaatttaaaatttaaaaagtatttacatttttttcactgtttagtcgcggatatggaattcgatcctgccaaaatcaatacatcatctatagatcatgtaacaatattacaatacatagatgaaccaaatgatataagactaacagtatgcattatccgaaatattatatcaatatcacaaaaataaatacacatttggctaatcaatttcgggcttggaaaaaacgtatcgccggaagggactatatgactaacttatctagagatacaggaatacaacaatcaaaacttactgaaactatacgtaactgtcaaaaaaatagaaacatatatggtctatatatacactacaatttagttattaattggataaccgatgtgattatcaatcaatattaagagggttggtaaattggtacatagctaataatacctatactccaaatacacccaataatacaacaaccatttctgagttggatatcatcaaaatactaaataaatacgaggacgtgtatagagtaagtaaagaaaaagaatgtggaatttgctatgaagttgtttactcaaaacgatagatactttggtttattggattcgtgtactcatatattttgcataacatgcatcaatatatggcatagaacacgaagagaaaccggtgcgtcggataattgtcctatatgccgtacccgttttagaaacataacaatgagcaagttctataagctagttaactaataaataaaaagtttaatttgttgacgacgtatgtcgttattttttctcgtataaaagattaatttgattctaatataatctttagtattggataaatatcaattcaaattaattccattagattatatcataaataaaaatagtagcacacaactacttcagcaaacattctttttataaatgccatctagcgtagcgaggacacaagtgaacctataattatcaaatttattagtatcagtcacatgaaggactttacgtagagtgacgattccactatctgtggtacgaacggtttcatcttctttgatgccatcacccagatgttctataaacttggtatcctcgtccgatttcatatcctttgccaaccaatacatatagctaaactcaggcatatgttccacacatcctgaacaatgaaattctccagaagatgttacaatgtctagatttggacatttggtttcaaccgcgttaacatatgagtgaacacacccatacatgaaagcgatgagaaataggattctcatcttgccaaaatatcactagaaaaaatttatttatcagttttaaaggtataaaaaatacttattgttgctcgaatattttgtatttgatggtatacggaagattagaaatgtaggtattatcatcaactgattctatggttttatgtattctatcatgtttcactattgcgttggaaataatatcatatgcttccacatatattttattttgttttaactcataatactcacgtaattctggattattggcatatctatgaataattttagctccatgatcagtaaatattaatgagaacatagtattaccacctaccattatttttttcatctcattcaattcttaattgcaaagatctatataatcattatagcgttgacttatggactctggaatcttagacgatgtacagtcatctataatcatggcatatttaatacattgttttatagcatagtcgttatctacgatgttagatatttctctcaatgaatcaatcacacaatctaatgtaggtttatgacataatagcattttcagcagttcaatgtttttagattcgttgatggcaatggctatacatgtatatccgttatttgatctaatgttgacatctgaaccggattctagcagtaaagatactagagattgtttattatatctaacagccttgtgaagaagtgtttctcctcgtttgtcaatcatgttaatgtctttaagataaggtaggcaaatgtttatagtactaagaattgggcaagcataagacatgtcacaaagacccttttttgtatgtataagtgtaaaaattataacatccatagttggatttacataggtgtccaatcgggatctctccatcatcgagataattgatggcatctcccttccttttttagtagatatttcatcgtgtaagaatcaatattaatatttctaaagtatccgtgtatagcctctttatttaccacagctccatattccactagagggatatcgccgaatgtcatatactcaattagtatatgttggaggacatccgagttcattgttttcaatatcaaagagatggtttccttatcatttctccatagtggtacaatactacacattattccgtgcggctttccattttccaaaaacaatttgaccaaatctaaatctacatctttattgtatctataatcactatttagataatcagccataattcctcgagtgcaacatgttagatcgtctatatatgaataagcagtgttatctattcctttcattaacaatttaacgatgtctatatctatatgagatgacttaatataatattgaagagctgtacaatagtttttatctataaaagacggcttgattccgtgattaattagacatttaacaacttccggacgcacatatgctctcgtatccgactctgaatacagatgagagatgatatacagatgcaatacggtaccgcaatttcgtagttgataatcatcatacgcgtatcagtactcgtcctcataaagaacactgcagccattttctatgaacaaatcaataattttagaaacaggatcattgtcattacataattttctataactgaacgatggttttcacatttaacactcaagtcaaatccatgttctaccaacacctttatcaagtcaacgtctacatttttggatttcatatagctgaatatattaaagttatttatgttgctaaatccagtggcttctagtagagccatcgctatatccttattaactttaacatgtctactatttgtgtattcttctaatggggtaagctgtctccaatttttgcgtaatggattagtgccactgtctagtagtagtttgacgacctcgacattattacaatgctcattaaaaaggtatgcgtgtaaagcattattcttgaattggttcctggtatcattaggatctctgtctttcaacatctgtttaagttcatcaagagccacctcctcattttccaaatagtcaaacattttgactgaatgagctactgtgaactctatacacccacacaactaatgtcattaaatatcatgtcaaaaacttgtacaattattaataaaaataatttagtgtttaaattttaccagttccagattttacacctccgttaatacctccattaaccccactggacgatcctcctccccacattccaccgccaccagatgtataagttttagatcctttattactaccatcatgtccatggataaagacactccacatgccgccactaccccctttagaagacatattaataagacttaaggacaagtttaacaataaaattaatcacgagtaccctactaccaacctacactattatatgattatagtttctatttttacagtaccttgactaaagtttctagtcacaagagcaatactaccaacctacactattatatgattatagtttctatttttataggaacgcgtacgagaaaatcaaatgtctaatttctaacggtagtgttgataaacgattgttatccgcggatacctcctctatcatgtcgtctattttcttactttgttctattaacttattagcattatatattatttgattataaaacttatattgcttattagcccaatctgtaaatatcggattattaacatatcgtttctttgtaggtttatttaacatgtacatcactgtaagcatgtccttaccatttattttaatttgacgcatatccgcaatttctttttcgcagtcggttataaattctatatatgatggatacatgctacatgtgtacttataatcgactaatatgaagtacttgatacatattttcagtaacgatttattattaccacctatgaataagtacctgtgatcgtctaggtaatcaactgttttcttaatacattcgatggttggtaatttactcagaataatttccaatatcttaatatataattctgctatttctgggatatatttatctgccagtataacacaaatagtaatacatgtaaacccatattttgttattatattaatgtctgcgccattatctattaaccattctactaggctgacactatgcgactcaatacaatgataaagtatactacatccatgtttatctattttgtttatatcatcaatatacggcttacaaagttttagtatcgataacacatccaactcacgcatagagaaggtagggaataatggcataatatttattaggttatcatcattgtcattatctacaactaagtttccattttttaaaatatactcgacaactttaggatctctattgccaaatttttgaaaatatttatttatatgcttaaatctatataatgtagctccttcatcaatcatacatttaataacattgatgtatactgtatgataagatacatattctaacaatagatcttgtatagaatctgtatatcttttaagaattgtggatattaggatattattacataaactattacacaattctaaaatataaaacgtatcacggtcgaataatagttgatcaactatataattatcgattttgtgatttttcttcctaaactgtttacgtaaatagttagatagaatattcattagttcatgaccactatagttactatcgaataacgcgtcaaatatttcccgtttaatatcgcatttgtcaagataataatagagtgtggtatgttcacgataagtataataacgcatctctttttcgtgtgaaattaaatagtttattacgtccaaagatgtagcataaccatcttgtgacctagtaataatataataatagagaactgttttacccattctatcatcataatcagtggtgtagtcgtaatcgtaatcgtctaattcatcatcccaattataatattcaccagcacgtctaatctgttctattttgatcttgtatccatactgtatgttgctacatgtaggtattcctttatccaataatagtttaaacacatctacattgggatttgatgttgtagcgtatttttctacaatattaataccatttttgatactatttatttctatacctttcgaaattagtaatttcaataagtctatattgatgttatcagaacatagatattcgaatatatcaaaatcattgatatttttatagtcgactgacgacaataacaaaatcacaacatcgtttttgatattattatttttcttggtaacgtatgcctttaatggagtttcaccatcatactcatataatggatttgcaccactttctatcaatgattgtgcactgctggcatcgatgttaaatgttttacaactatcatagagtatcttatcgttaaccatgattggttgttgatgctatcgcattttttggtttctttcatttcagttatgtatggatttagcacgtttgggaagcatgagctcatatgatttcagtactgtagtgtcagtactattagtttcaataagatcaatctctagatctatagaatcaaaacacgataggtcagaagataatgaatatctgtaggcttcttgttgtactgtaacttctggttttgttagatggttgcatcgtgctttaacgtcaatggtacaaattttatcctcgctttgtgtatcatattcgtccctactataaaattgtatattcagattatcatgcgatgtgtatacgctaacggtatcaataaacggagcacaccatttagtcataaccgtaatccaaaaatttttaaagtatatcttaacgaaagaagttgtgtcattgtctacggtgtatggtactagatcctcataagtgtatatatctagagtaatgtttaatttattaaatggttgataatatggatcctcgtgacaatttccgaagatggaaataagacataaacacgcaataaatctaattgcggacatggttactccttaaaaaaatacgaataatcaccttggctatttagtaagtgtcatttaacactatactcatattaatccatggactcataatctctatacgggattaacggatgttctatatacggggatgagtagttctcttctttaactttatactttttactaatcatatttagactgatgtatgggtaatagtgtttgaagagctcgttctcatcatcagaataaatcaatatctctgtttttttgttatacagatgtattacagcctcatatattacgtaatagaacgtgtcatctaccttattaactttcaccgcatagttgtttgcaaatacggttaatcctttgacctcgtcgatttccgaccaatctgggcgtataatgaatctaaactttaattgcttgtaatcattcgaaataatttttagtttgcatccgtagttatcccctttatgtaactgtaaatttctcaacgcgatatctccattaataatgatgtcgaattcgtgctgtatacccatactgaatggatgaacgaataccgacggcgttaatagtaatttactttttcatctttacatattgggtactagttttactatcataagtttataaattccacaagctactatggaataagccaaccatcttagtataccacacatgtcttaaagtttattaattaattacatgttgttttatatatatcgctacgaatttaaagagaaattagtttaggaagaaaaattatctatctacatcatcacgtctctgtattctacgatagagtgctactttaagatgcgacagatccgtgtcatcaaatatatactccattaaaatgattattccggcagcgaacttgatattggatatatcacaacctttgttaatatctacgacaatagacagcagtcccatggttccataaacagtgagtttatctttctttgaagagatattttgtagagatcttataaaactgtcgaatgacatcgcatttatatctttagctaaatcgtatatgttaccatcgtaatatctaaccgcgtctatcttaaacgtttccatcgctttaaagacgtttccgatagatggtctcatttcatcagtcatactgagccaacaaatataatcgtgtataacatctttgatagaatcagactctaaagaaaacgaatcggctttattatacgcattcatgataaacttaatgaaaaatgtttttcgttgtttaagttggatgaatagtatgtcttaataattgttattatttcattaattaatatttagtaacgagtacactctataaaaacgagaatgacataactaatcataactagttatcaaagtgtctaggacgcgtaattttcatatggtatagatcctgtaagcattgtctgtattctggagctattttctctatcgcattagtgagttcagaatatgttataaatttaaatcgaataacgaacataactttagtaaagtcgtctatattaactcttttattttctagccatcgtaataccatgtttaagatagtatattctctagttactacgatctcatcgttgtctagaatatcacatactgaatctacatccaattttagaaattggtctgtgttacatatctcttctatattattgttgatgtattgtcgtagaaaactattacgtagaccattttctttataaaacgaatatatagtactccaattatctttaccgatatatttgcacacataatccattctctcaatcactacatctttaagattttcgttgttaagatatttggctaaactatataattctattagatcatcaacagaatcagtatatatttttctagatccaaagacgaactctttggcgtcctctataatattcccagaaaagatattttcgtgttttagtttatcgagatctgatctgttcatatacgccatgattgtacggtacgttatgataaccgcataaaataaaaatccattttcatttttaaccaatactattcataattgagattgatgtaatactttgttactttgaacgtaaagacagtacacggatccgtatctccaacaagcacgtagtaatcaaatttggtgttgttaaacttcgcaatattcatcaatttagatagaaacttatactcatcatctgttttaggaatccatgtattattaccactttccaacttatcattatcccaggctatgtttcgtccatcatcgttgcgcagagtgaataattcttttgtattcggtagttcaaatatatgatccatgcatagatcggcaaagctattgtagatgtgatttttcctaaatctaatataaaactcgtttactagcaaacactttcctgatttatcgaccaagacacatatggtttctaaatctatcaagtggtggggatccatagttatgacgcagtaacatatattattacattcttgactgtcgctaatatctaaatatttattgttatcgtattggattctgcatatagatggcttgtatgtcaaagatatagaacacataaccaatttatagtcgcgctttacattctcgaatctaaagttaagagatttagaaaacattatatcctcggatgatgttatcactgtttctggagtaggatatattaaagtctttacagatttcgtccgattcaaataaatcactaaataatatcccacattatcatctgttagagtagtatcattaaatctattatattttatgaaagatatatcactgctcacctctatatttcgtacatttttaaactgtttgtataatatctctctgatacaatcagatatatctattgtgtcggtagacgataccgttacatttgaattaatggtgttccattttacaacttttaacaagttgaccaattcatttctaatagtatcaaactctccatgattaaatattttaatagtatccattttatatcactacggacacaaagtagctgacataaaccattgtataatttttatgttttatgtttattagcgtacacattttggaagttccggcttccatgtatttcctggagagcaagtagatgatgaggaaccagatagtttatatccgtacttgcacttaaagtctacattgtcgttgtatgagtatgatcttttaaacccgctagacaagtatccgtttgatattgtaggatgtggacatttaacaatctgacacgtgggtggatcggaccattctcctcctgaacacaggacactagagttaccaatcaacgaatatccactattgcaactataagttacaacgctcccatcggtataaaaatcctcgtatccgttatgtcttccgttggatatagatggaggggattggcatttaacagattcacaaataggtgcctcgggattccataccatagatccagtagatcctaattcacaatacgatttagattcaccgatcaactgatatccgctattacaagagtacgttatactagagccaaagtctactccaccaatatcaagttggccattatcgatatctcgaggcgatgggcatctccgtttaatacattgattaaagagtgtccatccagtacctgtacatttagcatatataggtcccattttttgctttctgtatccaggtagacatagatattctatagtgtctcctatgttgtaattagcattagcatcagtctccacactattcttaaatttcatattaatgggtcgtgacggaatagtacagcatgatagaacgcatcctattcccaacaatgtcaggaacgtcacgctctccaccttcatatttatttatccgtaaaaatgttatcctggacatcgtacaaataataaaaagcccatatatgttcgctattgtagaaattgtttttcacagttgctcaaaaacgatggcagtgacttatgagttacgttacactttggagtctcatctttagtaaacatatcataatattcgatattacgagttgacatatcgaacaaattccaagtatttgattttggataatattcgtattttgcatctgctataattaagatataatcaccgcaagaacacacgaacatctttcctacatggttaaagtacatgtacaattctatccatttgtcttccttaactatatatttgtatagataattacgagtctcgtgagtaattccagtaattacatagatgtcgccgtcgtactctacagcataaactatactatgatgtctaggcatgggagacttttttatccaacgatttttagtgaaacattccacatcgtttaatactacatatttctcatacgtggtataaactccacccattacatatatatcatcgtttacgaataccgacgcgcctgaatatctaggagtaattaagtttggaagtcttatccatttcgaagtgccgtgtttcaaatattctgccacacccgttgaaatagaaaattctaatcctcctattacatataactttccatcgttaacacaagtactaacttctgattttaacgacgacatattagtaaccgttttccattttttcgttttaagatctacccgcgatacggaataaacatgtctattgttaatcatgccgccaataatgtatagacaattatgtaaaacatttgcattatagaattgtctatctgtattaccgactatcgtccaatattctgttctaggagagtaatgggttattgtggatatataatcagagtttttaatgactactatattatgttttataccatttcgtgtcactggctttgtagatttggatatagttaatcccaacaatgatatagcattgcgcatagtattagtcataaacttgggatgtaaaatgttgatgatatctacatcgtttggatttttatgtatccactttaataatatcatagctgtaacatcctcatgatttacgttaacgtcttcgtgggataagatagttgtcagttcatcctttgataattttccaaattctggatcggatgtcaccgcagtaatattgttgattatttctgacatcgacgcattatatagttttttaattccatatcttttagaaaagttaaacatccttatacaatttgtgaaattaatattatgaatcatagtttttacacatagatctactacaggcggaacatcaattattatggcagcaactagtatcatttctacattgtttatggtgatgtttatcttcttccagcgcatatagtctaatagcgattcaaacgcgtgatagtttataccattcaatataatcgcttcatcctttagatggtgatcctgaatgcgtttaaaaaaattatacggagacgccgtaataatttccttattcacttgtataatttccccattgatagaaaatattacgctttccattcttaaagtactataagtaattatagtataatgtaaacgtttatatattcaatatttttataaaaatcattttgacattaattcctttttaaatttccgtctatcatctatagaaacgtattctatgaatttataaaatgcttttacgtgtcctatcgtaggcgatagaaccgctaaaaagcctatcgaatttctacaaaagaatctgttatatggtatagggagagtataaaacattaaatgtccgtacttattaaagtattcagtagccaatcctaactctttcgaatacttattaatggctcttgttctgtacgaatctatttttttgaacaacggacctagtggtatatcttgttctatgtatctaaaataatgtctgactagatccgttagtttaatatccgcagtcatcttgtctagaatggcaaatctaactgcgggtttaggctttagtttagtttctatatctacatctatgtctttatctaacaccaaaaatataatagctaatattttattacaatcatccggatattcttctacgatctcactaactaatgtttctttggttatactagtatagtcactatcggacaaataaagaaaatcagatgatcgatgaataatacatttaaattcatcatctgtaagatttttgagatgtctcattagaatattattagggttagtactcattatcattcggcagctattacttattttattatttttcaccatatagatcaatcattagatcatcaaaatatgtttcaatcatcctaaagagtatggtgaatgactcttcccatctaatttctgaacgttcaccaatgtctctagccactttggcactaatagcgatcattcgcttagcgtcttctatattattaactggttgatttaatctatctagcaatggaccgtcggacagcgtcattctcatgttcttaatcaatgtacatacatcgccgtcatctaccaattcatccaacaacataagctttttaaaatcatcattataataggtttgatcgttgtcatttctccaaagaatatatctaataagtagagtcctcatgcttagttaacaactattttttatgttaaatcaattagtacaccgctatgtttaatacttattcatattttagtttttaggattgagaatcaatacaaaaattaatgcatcattaattttagaaatacttagtttccacgtagtcaatgaaacatttgaactcatcgtacaggacgttctcgtacaggacgtaactataaaccggtttatatttgttcaagatagatacaaatccgataactttttttacgaattctacgggatccactttaaaagtgtcataccgggttctttttatttttttaaacagatcaatggtgtgatgttgattaggtcttttacgaatttgatatagaatagcgtttacatattctccataatggtcaatcgccatttgttcgtatgtcataaattctttaattatatgacactgtgtattatttagttcatccttgttcattgttaggaatctatccaaaatggcaattatactagaactataggtgcgttgtatacacatattgatgtgtctgtttatacaatccatgatatttggatccatgctactaccttcgggtaaaattgtagcatcatataccatttctagtactttaggttcattattatccattgcagaggacgtcatgatcgaatcataaaaaaatatattatttttatgttattttgttaaaaataatcatcgaatacttcgtaagatactccttcatgaacataatcagttacaaaacgtttatatgaagtaaagtatctacgatttttacaaaagtccggatgcataagtacaaagtacgcgataaacggaataataatagatttatctagtctatctttttctatagctttcatagttagatacatggtctcagaagtaggattatgtaacatcagcttcgataaaatgactgggttatttagtcttacacattcgctcatacatgtatgaccgttaactacagagtctacactaaaatgattgaacaatagatagtctaccattgtttcgtattcagatagtacagcgtagtacatggcatcttcacaaattatatcattgtctaatagatatttgacgcatcttatggatcccacttcaacagccatcttaaaatcatattgctttcctttatcattaataatttctagaacatcatctctatcataaaagatacaaatattaactgtttgatccgtaataacattgctagtcaatagcaatttgttaataagatgcgctgggctcaatgtcttaataagaagtgtaagaggactatctccgaatttgttttgtttattaacatccgttgatggaagtaaaagatctataatgtctacattcttgactgttttagagcatacaatatggagaggtgtatttccatcatgatctggttttgagggactaattcctagtttcatcatccatgagattgtagaagcttttggattgtctgacataagatgtctatgaatatgatttttgccaaatttatccactatcctggcttcgaatccgatggacattatttttttaaacactctttctgaaggatctgtacacgccaacaacggaccacatccttcttcatcaaccgagttgttaatcttggctccatactgtaccaataaatttattctctctatgacttcatcatctgttcccgagagataatatagaggtgttttatgctgtttatcacacgcgtttggatctgcgccgtgcgtcagcagcatcgcgactattctattattattaattttagaagctatatgcaatggataatttccatcatcatccgtctcatttggagagtatcctctatgaagaagttcttcgacaaatcgttcatctagtcctttaattccacaatacgcatgtagaatgtgataattatttccagaaggttcgatagcttgtagcatattcctaaatacatctaaatttttactattatatttggcataaagagatagataatactcggccgacataatgttgtccattgtagtataaaaattaatatttctatttctatttctgtatatttgcaacaatttactctctataacaaatatcataacttagtttttttatgtcaagaaggcactggtttagttcatctataaatgtcacgccataactaccacgcatgccatactcagaattatgataaagatatttatccttggggtgtaggtaatggggattaatctttgttggatcagtctctaagttaacacatgtcacacatgatccatttatagttatatcacacgatgatgatttatgaattgattccggaagatcgctatcgtattttgtggttccacaattcatttccatacatgttattgtcacactaatattatgatgaactttatctagccgctgagtggtaaacaacagaacagatagtttattatctttaccaacaccctcagccgctgccacaaatctctgatccgtatccatgatggtcatgtttatttctagtccgtatccagtcaacactatgttagcatttctgtcgatatagctttcactcatatgacactcaccaataatagtagaattaatgtcgtaatttacaccaatagtgagttcggcggcaaagtaccaataccggtaatcttgtcgaggaggacatatagtattcttgtattctaccgaatacccgagagatgcgatacaaaagagcaagactaatttgtaaaccatcttactcaaaatatgtaacaatagtacgatgcaatgagtaagacaataggaaatctatcttatatacacataattattctatcaattttaccaattagttagtgtaatgttaacaaaaatgtgggagaatctaattagtttttctttacacaattgacgtacatgagtctgagttccttgtttttgctaattatttcatccaatttattattcttgacgatatcgagatcttttgtataggagtcaaacttgtattcaacatgcttttctataatcattttagctatttcggcatcatccaatagtacattttccagattagcagaatagatattaatgtcgtatttgaacagagcctgtaacatctcaatgtctttattatctatagccaatttaatgtccggaatgaagagaagggaattattggtgtttgtcgacgtcatatagtcgagcaagagaatcatcatatccacgtgtccattttttatagtgatgtgaatacaactaaggagaatagccagatcaaaagtagatggtatctctgaaagaaagtaggaaacaatacttacatcattaagcatgacggcatgataaaatgaagttttccatccagttttcccatagaacatcagtctccaatttttcttaacaaacagttttaccgtttgcatgttaccactatcaaccgcataatacaatgcggtgtttcccttgtcatcaaattgtgaatcatccagtccactgaatagcaaaatctttactattttggtatcttccaatgtggctgcctgatgtaatggaaattcattctctagaagatttttcaatgctccagcgttcaacaacgtacatactagacgcacgttattatcagctattgcataatacaaggcactatgtccatggacatccgccttaaatgtatctttactagagagaaagcttttcagctgcttagacttccaagtattaattcgtgacagatccatgtctgaaacgagacgctaattagtgtatattttttcattttttataattttgtcatattgcaccagaattaataatatctttaatagatctgattagtagatacatggctatcgcaaaacaacatatacacatttaataaaaataatatttattaagaaaattcagatttcacgtacccatcaatataaataaaataatgattccttacaccgtacccatattaaggagattccaccttacccataaacaatataaatccagtaatatcatgtctgatgatgaacacaaatggtgtattaaattccagtttttcaggagatgatctcgccgtagctaccataatagtagatgcctctgctacagttccttgttcgtcgacatctatctttgcattctgaaacattttataaatatataatgggtccctagtcatatgtttaaacgacgcattatctggattaaacatactaggagccatcatttcggctatcgacttaatatccctcttattttcgatagaaaatttagggagtttaagattgtacactttattccctaattgagacgaccaatagtctaattttgcagccgtgatagaatctgtgaaatgggtcatattatcacctattgccaggtacatactaatattagcatccttatacggaaggcgtaccatgtcatattctttgtcatcgattgtgattgtatttccttgcaatttagtaactacgttcatcatgggaaccgttttcgtaccgtacttattagtaaaactagcattgcgtgttttagtgatatcaaacggatattgccatatacctttaaaatatatagtattaatgattgcccatagagtattattgtcgagcatattagaatctactacattagacataccggatctacgttctactatagaattaattttattaaccgcatctcgtctaaagtttaatctatataggccgaatctatgatattgttgataatacgacggtttaatgcacacagtattatctacgaaactttgataagttagatcagtgtacgtatatttagatgttttcagcttagctaatcctgatattaattctgtaaatgctggacccagatctctttttctcaaatccatagtcttcaataattctattctagtattacctgatgcaggcaatagcgacataaacatagaaaacgaataaccaaacggtgagaagacaatattatcatcttgaatatttttatacgctactataccggcattggtaaatccttgtagacgataggcggacgctgaacacgctaacgatagtatcaataacgcaatcatgattttatggtattaataattaaccttatttttatgttcggtataaaaaaattattgatgtctacacatccttttgtaattgacatctatatatccttttgtataatcaactctaatcactttaacttttacagttttccctaccagtttatccctatattcaacatatctatccatatgcatcttaacactctctgccaagatagcttcagagtgaggatagtcaaaaagataaatatatagagcataatcattctcgtatactctgccctttattacatcacccgcattgggcaacgaataacaaaatgcaagcatcttgttaacgggctcgtaaattgggataaaaattatgtttttattgtcttatatctattttattcaagagaatattcaggaatttctttttccggttgtatctcgtcgcagtatatatcatttgtacattgtttcatattttttaatagtttacaccttttagtaggactagtatcgtacaattcatagctgtattttgaattccaatcacgcataaaaatatcttccaattgttgacgaagacctaatccatcatccggtgtaatattaatagatgctccacatgtatccgtaaagtaatttcctgtccaatttgaggtacctatataggccgttttatcggttaccatatatttggcatggtttaccctagaatacggaatgggaggatcagcatctggtacaataaatagctttacttctatatttatgtttttagattttagcatagcgatagatcttaaaaagtttctcatgataaacgaagatcgttgccagcaactaatcaatagcttaacggatacttgtctgtctatagcggatcttcttaattcatcttctatataaggccaaaacaaaattttacccgccttcgaataaataatagggataaagttcataacagatacataaacgaatttactcgcatttctaatacatgacaataaagcggttaaatcattggttctttccatagtacatagttgttgcggtgcagaagcaataaatacagagtgtggaacgccgcttacgttaatactaagaggatgatctgtattataatacgacggataaaagtttttccaattatatggtagattgttaactccaagataccagtatacctcaaaaatttgagtgagatccgctgccaagttcctattattgaagatcgcaatacccaattccttgacctgagttagtgatctccaatccatgttagcgcttcctaaataaatatgtgtattatcagatatccaaaattttgtatgaagaactcctcctaggatatttgtaatatctatgtatcgtacttcaactccggccatttgtagtctttcaacatcctttaatggtttgttagatttattaacggctactctaactcgtactcctcttttgggtaattgtacaatctcgtttaatattatcgtgccgaaattcgtacccacttcatccgataaactccaataaaaagatgatatatctagtgtttttgtggtattggatagaatttccctccacatgttaaatgtagacaaatatactttatcaaattgcatacctataggaatagtttctgtaatcactgcgattgtattatccggattcattttatttgttaaaagaataatcctatatcacttcactctattaaaaatccaagtttctatttctttcatgactgattttttaacttcatccgtttccttatgaagatgatgtttggcaccttcataaatttttatttctctattacaatttgcatgttgcatgaaataatatgcacctaaaacatcgctaatcttattgtttgttccctggagtatgagagtcggggggtgttaatcttggaaattatttttctaaccttgttggtagccttcaagacctgactagcaaatccagccttaattttttcatgattgactaatgggtcgtattggtatttataaactttatccatatctctagatactgattctggacatagctttccgactggcgcatttggtgtgatggttcccataagtttggcagctagcagattcagtcttgaaacagcatctgcattaactagaggagacattagaatcattgctgtaaacaagtttggattatcgtaagaggctagctcccatggaatgacccaataagtagatttaatagttaccacgtgctgtaccaaagtcatcaatcatcattttttcaccattacttcttccatgtccaatatgatcatgtgagaatactaaaattcctaacgatgatatgttttcagctagttcgtcataacgtccagaatgtttaccagctccatgacttatgaatactaatgccttaggatatgtaataggtttccaatatttacaatatatgtaatcattgtccagattgaacatacagtttgcactcatgattcacgttatataactatcaatattaacagttcgtttgatgatcatattatttttatgttttattgataattgtaaaaacatacaattaaatcaatatagaggaaggagacggctactgtcttttgtaagatagtcatggcgactaaattagattatgaggatgctgttttttactttgtggatgatgataaaatatgtagtcgcgactccatcatcgatctaatagatgaatatattacgtggagaaatcatgttatagtgtttaacaaagatattaccagttgtggaagactgtacaaggaattgatgaagttcgatgatgtcgctatacggtactatggtattgataaaattaatgagattgtcgaagctatgagcgaaggagaccactacatcaattttacaaaagtccatgatcaggaaagtttattcgctaccataggaatatgtgctaaaatcactgaacattggggatacaaaaagatttcagaatctagattccaatcattgggaaacattacagatttgatgaccgacgataatataaacatcttgatactttttctagaaaaaaaattgaattgatgatataggggtcttcataacgcataattattacgttagcattctatatccgtgttaaaaaaaattatcctatcatgtatttgagagttttatatgtagcaaacatgatagctgtgatgccaataagctttagatattcacgcgtgctagtgttagggatggtattatctggtggtgaaatgtccgttatataatctacaaaacaatcatcgcatatagtatgcgatagtagagtaaacatttttatagtttttactggattcatacatcgtctacccaattcggttataaatgaaattgtcgccaatcttacacccaaccccttgttatccattagcatagtattaacttcgttatttatgtcataaactgtaaatgattttgtagatgccatatcatacatgatattcatgtccctattataatcattactaactttatcacaatatatgttgataatatctatatatgatctagtctttgtgggcaactgtctatacaagtcgtctaaacgttgtttactcatatagtatcgaacagccatcattacatggtcccgttccgttgatagataatcgagtatgttagtggacttgtcaaatctatataccatattttctggaagtggatatacatagtcgtgatcaacattattgctagcctcatcttctatatcctgtactataccattatctatatcatctacataatctatgatattattacacataaacatcgacaacatactattgtttattatctaagtcctgttgatccaaacccttgatctcctctatttgtactatctagagattgtacttcttccagttctggataatatatacgttgatagattagctgagctattctatctccagtatttacattaaacgtacattttccattattaataagaatgactcctatgtttcccctataatcttcgtctattacaccacctcctatatcaatgccttttagtgacagaccagacctaggagctattctaccatagcagaacttaggcatggacatactaatatctgtcttaattaactgtctttctcctggagggatagtataatcgtaagcgctatacaaatcatatccggcagcacccggcgattgcctagtaggagatttagctctgttagtttccttaacaaatctaactggtgagttaatattcatgttgaacataaaactaatattttatttcaaaattatttaccatcccatatattccatgaataagtgtgatgattgtacacttctatagtatctatatacgatccacgataaaatcctcctatcaatagcagtttattatccactatgatcaattctggattatccctcggataaataggatcatctatcagagtccatgtattgctggattcacaataaaattccgcatttctaccaaccaagaataaccttctaccgaacactaacgcgcatgatttataatgaggataataagtggatggtccaaactgccactgatcatgattgggtagcaaatattctgtagttgtatcagtttcagaatgtcctcccattacgtatataacattgtttatggatgccactgctggattacatctaggtttcagaagactcggcatattaacccaagcagcatccccgtggaaccaacgctcaacagatgtgggatttggtagacctcctactacgtataatttattgttagcgggtatcccgctagcatacagtctggggctattcatcggaggaattggaatccaattgtttgatatataatttacagctatagcattgttatgtatttcattgttcatccatccaccgatgagatatactacttctccaacatgagtacttgtacacatatggaatatatctataatttgatccatgttcataggatactctatgaatggatacttgtatgatttgcgtggttgtttatcacaatgaaatattttggtacagtctagtatccattttacattatttatacctctgggagaaagataatttgacctgattacatttttgataaggagtagcagatttcctaatttatttcttcgcctcatataccacttaatgacaaaatcaactacataatcctcatctggaacatttagttcatcgctttctagaataagtttcatagatagataatcaaaattgtctatgatgtcatcttccagttccaaaaagtgtttggcaataaagtttttagtatgacataagagattggatagtccgtattctatacccatcatgtaacactcgacacaatattcctttctaaaatctcgtaagataaagtttatacaagtgtagatgataaattctacagaggttaatatagaagcacgtaataaattgacgacgttatgactatctatatatacctttccagtatatgagtaaataactatagaagttaaactgtgaatgtcaaggtctagacaaacccttgtaactggatctttatttttcgtgtatttttgacgtaaatgtgtgcgaaagtaaggagataactttttcaatatcgtagaattgactattatattgcctcctatggcatcaataattgttttgaatttcttagtcatagacaatgctaatatattcttacagtacacagtattgacaaatatcggcatttatgtttctttaaaagtcaacatctagagaaaaatgattatctttttgagacataactcccattttttggtattcacccacacgtttttcgaaaaaattagtttttccttccaatgatatattttccatgaaatcaaacggattggtaacattataaatttttttaaatcccaattcagaaatcaatctatccgcgacgaattctatatatgttttcatcatttcacaattcattcctataagtttaactggaagagccgcagtaagaaattcttgttcaatggatactgcatctgttataatagatctaacggtttcttcactcggtggatgcaataaatgtttaaacatcaaacatgcgaaatcgcagtgcagaccctcgtctctactaattagttcgttggaaaacgtgagtccgggcattaggccacgctttttaagccaaaatatggaagcgaatgatccagaaaagaaaattccttctactgcagcaaaggcaataagtctctctccataaccggcgctgtcatgtatccacttttgagcccaatcggccttcttttttacacaaggcatcgtttctatggcattaaagagatagtttttttcattactatctttaacataagtatcgatcaaaagactatacatttccgaatgaatgttttcaatggccatctgaaatccgtagaaacatctagcctcggtaatctgtacttctgtacaaaatcgttccgccaaattttcattcactattccgtcactggctgcaaaaaacgccaatacatgttttataaaatatttttcgtctggtgttagtttattccaatcattgatatctttagatatatctacttcttccactgtccaaaatgatgcctctgcctttttatacatgttccagatgtcatgatattggattgggaaaataacaaatctatttggatttggtgcaaggatgggttccataactaaattaacaataacaataaattttttttcagttatctatatgcctgtacttggattttttgtacatcgatatcgccgcaatcactacaataattacaagtattattgatagcattgttattagtactatcataattaaattatctacattcatgggtgctgaataatcgttattatcatcattatcattttgtaattgtgacatcatactagataaatcgtttgcgagattgttgtgggaagcgggcatggaggatgcattatcattattatttaacgccttccatttggattcacaaatgttacgcacattcaacattttatggaaactataattttgtgaaaacaaataacaagaaaactcgtcatcgttcaaatttttaacgatagtaaaccgattaaacgtcgagctaatttctaacgctagcgactctgttggatatgggtttccagatatatatcttttcagttcccctacgtatctataatcatctgtaggaaatggaagatatttccatttatctactgttcctaatatcatatgtggtggtgtagtagaaccattaagcgcgaaagatgttatttcgcatcgtattttaacttcgcaataatttctggttagataacgcactctaccagtcaagtcaatgatattagcctttacagatatattcatagtagtcgtaacgatgactccatcttttagatgcgatactcctttgtatgtaccagaatcttcgtacctcaaactcgatatatttaaacaagttaatgagatattaacgcgttttatgaatgatgatatataaccagaagttttatcctcggtggctagcgctataaccttatcattataataccaactagtgtgattaatatgtgacacgtcagtgtgggtacaaatatgtacattatcgtctacgtcgtattcgatacatccgcatacagccaacaaatataaaatgacaaatactctaacgccgttcgtacccatcttgatgcggtttaataaatgttttgatttcaatttattgtaaaaaaagattcggttttatactgttcgatattctcattgcttatattttcatctatcatctccacacagtcaaatccgtggttagcatgcacctcatcaaccggtaaaagactatcggactcttctatcattataactctagaatatttaatttggtcattattaatcaagtcaattatcttatttttaacaaacgtgagtattttactcattttttataaaaacttttagaaatatacagactctatcgtgtgtctatatcttctttttatatccaatgtatttatgtctgatttttcttcatttatcatatataatggtccaaattctacacgtgcttcggattcatccagatcattaaggttcttataattgtaacatccttctcttccctcttctacatcttccttcttattcttattcttagcgtcacagaatctaccacagcaggatcccatgacgagcgtcatattaaactaatccattttcaattataatatatgattagtaatgaccattaaaataaaaaatattcttcataaccggcaagaaagtgaaaagttcacattgaaactatgtcagtagtatacatcatgaaatgatgatatatatatactctattttggtggaggattatatgatataattcgtggataatcatttttaagacacatttctttattcgtaaatcttttcacgttaaatgagtgtccatattttgcaatttcttcatatgatggcggtgtacgtggacgaggctgctcctgttcttgttgtggtcgccgactgtcgtgtctgcgtttagatccctccattatcgcgattgcgtagatggagtactattttataccttgtaattaaatttttttattaattaaacgtataaaaacgttccgtatctgtatttaagagccagatttcgtctaatagaacaaatagctacagtaaaaataactagaataattgctacacccactagaaaccacggatcgtaatacggcaatcggttttcgataataggtggaacgtatattttatttaaggacttaacaattgtctgtaaaccacaatttgcttccgcggatcctgtattaactatctgtaaaagcatatgttgaccgggcggagccgaacattctccgatatctaatttctgtatatctataatattattaacctccgcatacgcattacagttcttttctagcttggataccgcactaggtacatcgtctagatctattcctatttcctcagcgatagctcttctatccttttccggaagcaatgaaatcacttcaataaatgattcaaccatgagtgtgaaactaagtcgagaattactcatgcatttgttagttattcggagcgcgcaatttttaaactgtcctataacctctcctatatgaatagcacaagtgacattagtagggatagaatgttgagctaatttttgtaaataactatctataaaaagattatacaaagttttaaactctttagtttccgccatttatccagtctgagaaaatgtctctcataataaatttttccaagaaactaattgggtgaagaatggaaacctttaatctatatttatcacagtctgttttggtacacatgatgaattcttccaatgccgtactaaattcgatatctttttcgatttctggatatgtttttaataaagtatgaacaaagaaatggaaatcgtaataccagttatgtttaactttgaaattgttttttattttcttgttaatgattccagccacttgggaaaagtcaaagtcgtttaatgccgatttaatacgttcattaaaaacaaactttttatcctttagatgaattattattggttcattggaatcaaaaagtaagatattatcgggtttaagatctgcgtgtaaaaagttgtcgcaacagggtagttcgtagattttaatgtataacagagccatctgtaaaaagataaactttatgtattgtaccaaagatttaaatcctaatttgatagctaactcggtatctactttatctgccgaatacagtgctaggggaaaaattataatgtttcctctttcatattcgtagttagttctcttttcatgttcgaaaaagtgaaacatgcggttaaaatagtttataacattaatattactgttaataactgccggataaaagtgggatagtaatttcacgaatttgatactgtcctttctctcgttaaacgcctttaaaaaaactttagaagaatatctcaatgagagttcctgaccatccatagtttgtatcaataatagcaacatatgaagaacacgtttatacagagtatgtaaaaatgttaatttatagtttaatcccatggcccacgcacacacgattaattttttttcatctccctttagattgttgtatagaaatttgggtactgtgaactccgccgtagtttccatgggactatataattttgtggcctcgaatacaaattttactacatagttatctatcttaaagactataccatatcctcctgtagatatgtgataaaaatcgtcgtttataggataaaatcgtttatccttttgttggaaaaaggatgaattaatgtaatcattctcttctatctttagtagtgtttccttattaaaattcttaaaataatttaacaatctaactgacggagcccaattttggtgtaaatctaattgggacattatattgttaaaatacaaacagtctcctaatataacagtatctgataatctatggggagacatccattgatattcaggggatgaatcattggcaacacccatttattgtacaaaaagccccaatttacaaacgaaagtccaggtttgatagagacaaacaattaactattttgtctctgtttttaacacctccacagtttttaatttctttagtaatgaaattattcacaatatcagtatcttctttatctaccagagattttactaacttgataaccttggctgtctcattcaatagggtagtaatatttgtatgtgtgatattgatatctttttgaattgtttcttttagaagtgattctttgatggtgccagcatacgaattacaataatgcagaaactcggttaacatgcaggaattatagtaagccaattccaattgttgcctgtgttgtattagagtgtcaatatgagcaatggtgtccttgcgtttctctgatagaatgcgagcagcgattttggcgttatcatttgacgatatttctggaatgacgaatcctgtttctactaactttttggtaggacaaagtgaaacaatcaagaagatagcttctcctcctatttgtggaagaaattgaactcctctagatgatctactgacgatagtatctccttgacagatattggaccgaattacagaagtacctggaatgtaaagccctgaaaccccctcattttttaagcagattgttgccgtaaatcctgcactatgcccaagatagagagctcctttggtgaatccatctctatgtttcagtttaaccaagaaacagtcagctggtctaaaatttccatctctatctaatacagcatctaacttgatgtcaggaactatgaccggtttaatgttatatgtaacattgagtaaatccttaagttcataatcatcactgtcatcagttatgtacgatccaaacaatgtttctaccggcatagtggatacgaagatgctatccatcagaatgtttccctgattagtattttctatatagctattcttctttaaacgattttccaaatcagtaactatgttcatttttttaggagtaggacgcctagccagtatggaagaggattttctagatcctctcttcaacatctttgatctcgatggaatgcaaaaccccatagtgaaacaaccaacgataaaaataatattgtttttcactttttataattttaccatctgactcatggattcattaatatctttataagagctactaacgtataattctttataactgaactgagatatatacaccggatctatggtttccataattgagtaaatgaatgctcggcaataactaatggcaaatgtatagaacaacgaaattatactagagttgttaaagttaatattttctatgagctgttccaataaattatttgttgtgactgcgttcaagtcataaatcatcttgatactatccagtaaaccgtttttaagttctggaatattatcatcccattgtaaagcccctaattcgactatcgaatatcctgctctgatagcagtttcaatatcgacggacgtcaatactgtaataaaggtggtagtattgtcatcatcgtgataaactacgggaatatggtcgttagtaggtacggtaactttacacaacgcgatatataactttccttttgtaccatttttaacgtagttgggacgtcctgcagggtattgttttgaagaaatgatatcgagaacagatttgatacgatatttgttggattcctgattattcactataatataatctagacagatagatgattcgataaatagagaaggtatatcgttggtaggataatacatccccattccagtattctcggatactctattgatgacactagttaagaacatgtcttctattctagaaaacgaaaacatcctacatggactcattaaaacttctaacgctcctgattgtgtctcgaatgcctcgtacaaggatttcaaggatgccatagattctttgaccaacgatttagaattgcgtttagcatctgatttttttattaaatcgaatggtcggctctctggtttgctaccccaatgataacaatagtcttgtaaagataaaccgcaagaaaatttatacgcatccatccaaataaccctagcaccatcggatgatattaatgtattattatagattttccatccacaattattgggccagtatactgttagcaacggtatatcgaatagattactcatgtaacctactagaatgatagttcgtgtactagtcataatatctttaatccaatctaaaaaatttaaaattagattttttacactgttaaagttaacaaaagtattacccgggtacgtggatatcatatatggcattggtccattatcagtaatagctccataaactgatacggcgatggtttttatatgtgtttgatctaacgaggaagaaattcgcgcccacaattcatctctagatatgtatttaatatcaaacggtaacacatcaatttcgggacgcgtatatgtttctaaatttttaatccaaatataatgatgacctatatgccctattatcatactgtcaactatagtacacctagggaacttacgatacatctgtttcctataatcgttaaattttacaaatctataacatgctaaaccttttgacgacagccattcattaatttctgatatggaatctgtattctcgataccgtatcgttctaaagccagtgctatatctccctgttcgtgggaacgctttcgtataatatcgatcaacggataatctgaagtttttggagaataatatgactcatgatctatttcgtccataaacaatctagacataggaattggaggcgatgatcttaattttgtgcaatgagtcgtcaatcctataacttctaatcttgtaatattcatcatcgacataatactatctatgttatcatcgtatattagtataccatgaccttcttcatttcgtgccaaaatgatatacagtcttaaatagttacgcaatatctcaatagtttcataattgttagctgttttcatcaaggtttgtatcctgtttaacatgatggcgttctataacgtctctattttctatttttaattttttaaatttttaacgatttactgtggctagatacccaatctctctcaaatatttttttagcctcgcttacaagctgtttatctatactattaaaactgacgaatccgtgattttggtaatgggttccgtcgaaatttgccgaagtgatatgaacatattcgtcgtcgactatcaacaattttgtattattctgaatagtgaaaaccttcacagatagatcattttgaacacacaacgcatctagacttttggcggttgccatagaatatacgtcgttcttatcccaattaccaactagaagtctgatcttaactcctctattaatggctgcttctataatggagttgtaaatgtcgggccaatagtagctattaccgtcgacacgtgtagtgggaactatggccaaatgttcaatatctatactagtcttagctgacctgagtttatcaataactacatcggtatctagatctctagaatatcccaataggtgttccggagaatcagtaaagaacactccacctataggattcttaatatgatacgcagtgctaactggcaaacaacaagccgcagagcataaattcaaccatgaattttttgcgctattaaaggctttaaaagtatcaaatcttctacgaagatctgtggccagcgggggataatcagaatatacacctaacgttttaatcgtatgtatagatcctccagtaaatgacgcgtttcctacataacatctttcatcatctgacacccaaaaacaaccgagtagtagtcccacattattttttttatctatattaacggttataaaatttatatccgggcagtgactttgtagctctcccagatttcttttccctcgttcatctagcaaaactattattttaatccctttttcagatgcctcttttagtttatcaaaaataagcgctcccctagtcgtactcagaggattacaacaaaaagatgctatgtatatatatttcttagctagagtgataatttcgttaaaacattcaaatgttgttaaatgatcggatctaaaatccatattttctggtagtgtttctaccagcctacattttgctcccgcaggtaccgatgcaaatggccacatttagttaacataaaaacttatacatcctgttctatcaacgattctagaatatcatcggctatatcgctaaaattttcatcaaagtcgacatcacaacctaactcagtcaatatattaagaagttccatgatgtcatcttcgtctatttctatatccgtatccattgtagattgttgaccgattatcgagtttaaatcattactaatactcaatccttcagaatacaatctgtgtttcattgtaaatttataggcggtgtatttaagttggtagattttcaattatgtattaatatagcaacagtagttcttgctcctccttgattctagcatcctcttcattattttcttctacgtacataaacatgtccaatacgttagacaacacaccgacgatggcggccgcaggatcctgcgaagcttacagacacgaatatgactaaaccgatgaccatttaaaaacccctctctagctttcacttaaactgtatcgatcattcttttagcacatgtataatataaaaacattattctatttcgaatttaggcttccaaaaatttttcatccgtaaaccgataataatatatatagacttgttaatagtcggaataaatagattaatgcttaaactatcatcatctccacgattagagatacaatatttacattctttttgctgtttcgaaactttatcaatacacgttaatacaaacccaggaaggagatattgaaactgaggctgttgaaaatgaaacggtgaatacaataattcagataatgtaaaatcatgattccgtattctgatgatattagaactgctaatggatgtcgatggtatgtatctaggagtatctattttaacaaagcatcgatttgctaatatacaattatccttttgattaattgttattttattcatattcttaaaaggtttcatatttatcaattcttctacattaaaaatttccatttttaatttatgtagccccgcaatactcctcattacgtttcattttttgtctataatatccattttgttcatctcggtacatagattatccaattgagaagcgcatttagtagttttgtacattttaagtttattgacgaatcgtcgaaaactagttatagttaacattttattatttgataccctgatattaatacccctgccgttactattatttataactgatgtaatccacgtaacattggaattaactatcgatagtaatgcatcgacgcttccaaaattgtctattataaactcaccgataatttttttattgcatgttttcatattcattaggattatcaaatctttaatcttattacgattgtatgcgttgatattacaagacgtcattctaaaagacggaggatctccatcaaatgccagacaatcacgtacaaagtacatggaaataggttttgttctattgcgcatcatagatttatatagaacacccgtagaaatactaatttgttttactctataaaatactaatgcatctatttcatcgttttgtataacgtctttccaagtgtcaaattccaaatttttttcattgatagtaccaaattcttctatctctttaactacttgcatagataggtaattacagtgatgcctacatgccgttttttgaaactgaatagatgcgtctagaagcgatgctacgctagtcacaatcaccactttcatatttagaatatatatatgtaaaaatatagtagaatttcattttgtttttttctatgctataaatgaattctcattttgcatctgctcatactccgttttatattaataccaaagaaggaagatatctggttctaaaagccgttaaagtatgcgatgttagaactgtagaatgcgaaggaagtaaagcttcctgcgtactcaaagtagataaaccctcatcgcccgcgtgtgagagaagaccttcgtccccgtccagatgcgagagaatgaataaccctggaaaacaagttccgtttatgaggacggacatgctacaaaatatgttcgcggctaatcgcgataatgtagcttctagacttttgtcctaaaatactattatatccttttcgatattaataaatccgtgtcgtccaggttttttatctctttcagtatgtgaatagataggtattttatctctattcatcatcgaatttaagagatccgataaacattgtttgtattctccagatgtcagcatctgatacaacaatatatgtgcacataaacctctggcacttatttcatgtaccttccccttatcactaaggagaatagtatttgagaaatatgtatacatgatattatcatgaattagatatacagaatttgtaacactctcgaaatcacacgatgtgtcggcgttaagatctaatatatcactcgataacacattttcatctagatacactagacattttttaaagctaaaatagtctttagtagtaacagtaactatgcgattattttcatcgatgatacatttcatcggcatattattacgcttaccatcaaagactataccatgtgtatatctaacgtattctagcatggttgccatacgcgcattaaacttttcaggatctttggatagatcttccaatctatctatttgagaaaacatttttatcatgttcaatagttgaaacgtcggatccactatatagatattatctataaagattttaggaactacgttcatggtatcctggcgaatattaaaactatcaatgatatgattatcgttttcatcttttatcaccatatagtttctaagatatgggattttacttaatataatattatttcccgtgataaattttattagaaaggccaaatctataagaaaagtcctagaattagtctgaagaatatctatatcgccgtatagtatatttggattaattagatatagagaatatgatccgtaacatatacaacttttattatggcgtctaagatattcttccatcaacttattaacatttttgactagggaagatacattatgacgtcccattacttttgccttgtctattactgcgacgttcatagaatttagcatatctcttgccaattcttccattgatgttacattataagaaattttagatgaaattacatttggagctttaatagtaagaactcctaatatgtccgtgtatgtggtcactaatacagattgtagttctataatcgtaaataatttacctatattatatgtttgagtctgtttagaaaagtagctaagtatacgatcttttatttctgatgcagatgtattaacatcggaaaaaaatctttttttattcttttttactaaagatacaaatatgtctttgttaaaaacagttattttctgaatatttctagcttgtaattttaacatatgatattcgttcacactaggtactctgcctaaataggtttctataatctttaatgtaatattaggaaaagtattctgatcaggattcctattcattttgaggatttaaaactctgattattgtctaatatggtctctacgcaaactttttcacagagcgatagagtttttgataactcgtttttcttaagaaatataaaactactgtctccagagctcgctctatcttttattttatctaattcgatacaaactcctgatactggttcagaaagtaattcattaattttcagtcctttatagaagatatttaatatagataatacaaaatcttcagtttttgatatcgatctgattgatcctagaactagatatattaataacgtgctcattaggcagtttatggcagcttgataattagatatagtatattccagttcatatttattagataccgcattgcccagattttgatattctatgaattcctctgaaaataaatccaaaataactagacattctattttttgtggattagtgtactctcttccctctatcatgttcactactggtgtccacgatgataaatatctagagggaatataatatagtccataggatgccaatctagcaatgtcgaataactgtaattttattcttcgctcttcattatgaattgattcttgaggtataaacctaacacaaattatattattagacttttcgtatgtaatgtctttcatgttataagtttttaatcctggaatagaatctattttaatgaggcttttaaacgcagagttctccaacgagtcaaagcataatactctgttgtttttcttatatacgatgttacgattttcttctttgaatggaataggtttttgaattagtttataattacaacataatagataaggaagtgtgcaaatagtacgcggaaaaaacataatagctcccctgttttcatccatggttttaagtaaatgatcactggcttctttagtcaatggatattcgaacattaaccgtttcatcatcattggacagaatccatatttcttaatgtaaagagtgatcaaatcattgtgtttattgtaccatcttgttgtaaatgtgtattcggttatcggatctgctcctttttctattaaagtatcgatgtcaatctcgtctaagaattcaactatatcgacatatttcatttgtatacacataaccattactaacgtagaatgtataggaagagatgtaacgggaacagggtttgttgattcgcaaactattctaatacataattcttctgttaatacgtcttgcacgtaatctattatagatgccaagatatctatataattattttgtaagatgatgttaactatgtgatctatataagtagtgtaataattcatgtattttgatatatgttccaactctgtctttgtgatgtctagtttcgtaatatctatagcatcctcaaaaaatatattcgcatatattcccaagtcttcagttctatcttctaaaaaatcttcaacgtatggaatataataatctattttacctcttctgatatcattaatgatatagtttttgacactatcttctgtcaattgattcttattcactatatctaagaaacggatagcgtccctaggacgaactactgccattaatatctctattatagcttctggacataattcatctattataccagaattaatgggaactattccgtatctatctaacatagttttaagaaagtcagaatctaagacttgatgttcatatattggttcatacatgaaatgatctctattgatgatagtgactatttcattctctgaaaattggtaactcattctatatatgctttccttgttgatgaaggatagaatatactcaatagaatttgtaccaacaaactgttctcttatgaatcgtatatcatcatctgaaataatcatgtaaggcatacatttaacaattagagacttgtctcctgttatcaatatactattcttgtgataatttatgtgtgaggcaaatttgtccacgttctttaattttgttatagtagatatcaaatccaatggagctacagttcttggcttaaacagatatagtttttctggaacaaattctacaacattattataaaggactttgggtagataagtgggatgaaatcctattttaattaatgcgatagccttgtcctcgtgcagatatccaaacgcttttgtgatagtatggcattcattgtctagaaacgctctacgaatatctgtgacagatatcatctttagagaatatactagtcgcgttaatagtactacaatttgtattttttaatctatctcaataaaaaaattaatatgtatgattcaatgtataactaaactactaactgttattgataactagaatcagaatctaatgatgacgtaaccaagaagtttatctactgccaatttagctgcattatttttagcatctcgtttagattttccatcggccttatcgaatactcttccgtcgatgtctacacaggcataaaatgtaggagagttactaggcccaactgattcaatacgaaaagaccaatctctcctagtaatttggcagtactcattaataacggtgacagggttagcatctttccaatcaataatttttttagccggaataacatcatcaaaagacttatgatcctctctcattgatttttcgcgggatacatcatctattatgacgtcagccatagcatcagcatccggcttatccgcctccgttgtcataaaccaacgaggaggaatatcgtcggagctgtacaccatagcactacgttgaagatcgtacagagctttattaacttctcgcttctccatattaagttgtctagttagttgtgcagcagtagctccttcgattccaatgtttttaatagccgcacacacaatctctgcgtcagaacgctcgtcaatatagatcttagacatttttagagagaactaacgcaaccagcaataaaactgaacctactttatcatttttttattcatcatcctctggtggttcgtcgttcctatcaaatgtagctctgattaacccgtcatctataggtgatgctggttctggagattctggaggagatggattattatctggaagaatctctgttatttccttgttttcatgtatcgattgcgttgtaacattaagattgcgaaatgctctaaatttgggaggcttaaagtgttgtttgcaatctctacacgcgtgtctaactagtggaggttcgtcagctgctctagtttgaatcatcatcggcgtagtattcctacttttacagttaggacacggtgtattgtatttctcgtcgagaacgttaaaataatcgttgtaactcacatcctttattttatctatattgtattctactcctttcttaatgcattttataccgaataagagatagcgaaggaattctttttcggtgccgctagtacccttaatcatatcacatagtgttttatattccaaatttgtggcaatagacggtttatttctatacgatagtttgtttctggaatcctttgagtattctataccaatattattctttgattcgaatttagtttcttcgatattagattttgtattacctatattcttgatgtagtactttgatgatttttccatggcccattctattaagtcttccaagttggcatcatccacatattgtgatagtaattctcggatatcagtagcggctaccgccattgatgtttgttcattggatgagtaactactaatgtatacattttccatttataacacttatgtattaactttgttcatttatattttttcattattatgttgatattaacaaaagtgaatatatatatgttaataattgtattgtggttatacggctacaattttataatgagtgaaagtcagtgtccgatgatcaatgacgatagctttactctgaaaagaaagtatcaaatcgatagtgcggagtcaacaataaaaatggataagaagaggataaagtttcagaatagagccaaaatggtaaaagaaataaatcagacaataagagcagcacaaactcattacgagacattgaaactaggatacataaaatttaagagaatgattatgactactactctagaagatatagcaccatctattccaaataatcagaaaacttataaactattctcggacatttcagccatcggcaaagcatcacagaatccgagtaagatggtatatgctctgctgctttacatgtttcccaatttgtttggagatgatcatagattcattcgttatagaatgcatccaatgagtaaaatcaaacacaagatcttctctcctttcaaacttaatcttattagaatattagtggaagaaagattctataataatgaatgcagatctaataaatggagaataattggaacacaagttgataaaatgttgatagctgaatctgataaatatacaatagatgcaaggtataacctaaaacccatgtatagaatcaagggagaatctgaagaagataccctctttatcaaacagatggtagaacaatgtgtgacatcccaggaattggtggaaaaagtgttgaagatactgtttagagatttgttcaagagtggagaatacaaagcgtacagatacgatgatgatgtagaaaatggatttattggattggatacactaaaattaaacattgttcatgatatagttgaaccatgtatgcctgttcgtaggccagtggctaagatactgtgtaaagaaatggtaaataaatactttgagaatccgctacatattattggtaaaaatcttcaagagtgcattgactttgttagtgaataggcatttcatctttctccaatactaattcaaattgttaaattaataatggatagtataaatagttattagttataagatagtaaaaataattattagaataagagtgtagtatcatagataactctcttctataaaaatggattttattcgtagaaagtatcttatatacacagtagaaaataatatagattttttaaaggatgatacattaagtaaagtaaacaattttaccctcaatcatgtactagctctcaagtatctagttagcaattttcctcaacacgttattactaaggatgtattagctaataccaatttttttgttttcatacatatggtacgatgttgtaaagtgtacgaagcggttttacgacacgcatttgatgcacccacgttgtacgttaaagcattgactaagaattatttatcgtttagtaacgcaatacaatcgtacaaggaaaccgtgcataaactaacacaagatgaaaaatttttagaggttgccgaatacatggacgaattaggagaacttataggcgtaaattatgacttagttcttaatccattatttcacggaggggaacccatcaaagatatggaaatcatttttttaaaactgtttaagaaaacagacttcaaagttgttaaaaaattaagtgttataagattacttatttgggcatacctaagcaagaaagatacaggcatagagtttgcggataatgatagacaaaatatatacactctatttcaacaaactggtagaatcgtccatagcaatctaacagaaacgtttagagattatatctttcccggagataagactagctattgggtgtggttaaacgaaagtatagctaatgatgcggatatcgttcttaatagacacgccattaccatgtatgataaaattcttagttatatatactctgagataaaacaaggacgcgttaataaaaacatgcttaagttagtttatatctttgagcctgaaaaagatatcagagaacttctgctagaaatcatatatgatattcctggagatatcctatctattattgatgcaaaaaacgacgattggaaaaaatattttattagtttttataaagctaattttattaacggtaatacatttattagtgatagaacgtttaacgaggacttattcagagttgttgttcaaatagatcccgaatatttcgataatgaacgaattatgtctttattctctacgagtgctgcggacattaaacgatttgatgagttagatattaataacagttatatatctaatataatttatgaggtgaacgatatcacattagatacaatggatgatatgaagaagtgtcaaatctttaacgaggatacgtcgtattatgttaaggaatacaatacatacctgtttttgcacgagtcggatcccatggtcatagagaacggaatactaaagaaactgtcatctataaaatccaagagtagacggctgaacttgtttagcaaaaacattttaaaatattatttagacggacaattggctcgtctaggtcttgtgttagatgattataaaggagacttgttagttaaaatgataaaccatcttaagtctgtggaggatgtatccgcattcgttcgattttctacagataaaaaccctagtattcttccatcgctaatcaaaactattttagctagttataatatttccatcatcgtcttatttcaaaggtttttgagagataatctatatcatgtagaagaattcttggataaaagcatccatctaaccaagacggataagaaatatatacttcaattgataagacacggtagatcatagaacagaccaaatatattattaataatttgtatatacatagatataattatcacacatttttgataaatgggaactgctgcaacaattcagactcccaccaaattaatgaataaagaaaatgcagaaatgattttggaaaaaattgttgatcatatagttatgtatattagtgacgaatcaagtgattcagaaaataatcctgaatatattgattttcgtaacagatacgaagactatagatctctcattataaaaagtgatcacgagtttgtaaagctatgtaaaaatcatgcggagaaaagttctccagaaacgcaacaaatgattatcaaacacatatacgaacaatatcttattccagtatctgaagtactattaaaacctataatgtccatgggtgacataattacatataacggatgtaaagacaatgaatggatgctagaacaactctctaccctaaactttaacaatctccgcacatggaactcatgtagcataggcaatgtaacgcgtctgttttatacattttttagttatctgatgaaagataaactaaatatataagtataatcccattctaatactttaacctgatgtattagcatcttattagaatattaacctaactaaaagacataacataaaaactcattacatagttgataaaaagcggtaggatataaatattatggctgccaccgttccgcgttttgacgacgtgtacaaaaatgcacaaagaagaattctagatcaagaaacattttttagtagaggtctaagtagaccgttaatgaaaaacacatatctatttgataattacgcgtatggatggataccagaaactgcaatttggagtagtagatacgcaaacctagatgctagtgactattatcccatttcgttgggattacttaaaaagttcgagtttctcatgtctctatataaaggtcctattcccgtatatgaagaaaaagtaaatactgaattcatagccaatggatcgttctctggtagatacgtatcatatcttcgaaagttttctgcccttccaacaaacgagtttattagttttttgttactgacttccattccaatctataatatcttgttctggtttaaaaacacacagtttgatattactaaacacacattattcagatacgtctatacagataatgccaaacacctggcgttggctaggtatatgcatcaaacaggagactataagcctttgtttagtcgtctcaaagagaattatatatttaccggtcccgttccaataagtatcaaagatatagatcaccctaatcttagtagagcaagaagtccatccgattatgagacattagctaatattagtactatattgtactttaccaagtatgatccggtattaatgtttttattgttttacgtacctgggtattcaattactacaaaaattactccagccgtagaatatctaatggataaactgaatctaacaaagagcgacgtacaactgttgtaaattattttatgcttcgtaaaatgtaggttttgaaccaaacattctttcaaagaatgagatgcataaaactttattatccaatagattgactatttcggacgtcaatcgtttaaagtaaacttcgtaaaatattctttgatcactgccgagtttaaaacttctatcgataattgtctcatatgttttaatatttacaagttttttggtccatggtacattagccggacaaatatatgcaaaataatatcgttctccaagttctatagtttctggattatttttattatattcagtaactaaatacatattagggttatctgcggatttataatttgagtgatgcattctactcaacataaataattctagaggagacgatctactatcaaattcggatcgtaaatctgtttctaaagaacggagaatatctatacatacctgattagaattcatccgtccttcagacaacatctcagacagtctggttttgtacatcttaatcatattcttatgaaacttggaaacatctcttctagtttcactagtacctttattaattctctcaggtacagattttgaattcgacgatgctgagtatttcatcgttgtatatttcttcttcgattgcataatcagattcttatataccgcctcaaactctattttaaaattattaaacaatactctattattaatcagtcgttctaactctttcgctatttctatagacttatctacatcttgactgtctatctctgtaaacacggagtcggtatctccatacacgctacgaaaacgaaatctgtaatctataggcaacgatgttttcacaatcggattaatatctctatcgtccatataaaatggattacttaatggattggcaaaccgtaacataccgttagataactctgctccatttagtaccgattctagatacaagatcattctacgtcctatggatgtgcaactcttagccgaagcgtatgagtatagagcactatttctaaatcccatcagaccatatactgagttggctactatcttgtacgtatattgcatggaatcatagatggccttttcagttgaactggtagcctgttttagcatctttttatatctggctctctctgccaaaaatgttcttaatagtctaggaatggttccttctatcgatctatcgaaaattgctatttcagagatgaggttcggtagtctaggttcacaatgaaccgtaatatatctaggaggtggatatttctgaagcaatagctgattatttatttcttcttccaatctattggtactaacaacgacaccgactaatgtttccggagatagatttccaaagatacacacattaggatacagactgttataatcaaagattaatacattattactaaacattttttgttttggagcaaataccttaccgccttcataaggaaacttttgttttgtttctgatctaactaagatagttttagtttccaacaatagctttaacagtggacccttgatgactgtactcgctctatattcgaataccatggattgaggaagcacatatgttgacgcacccgcgtctgtttttgtttctactccataatactcccacaaatactgacacaaacaagcatcatgaatacagtatctagccatatctaaagctatgtttagattataatccttatacatctgagctaaatcaacgtcatcctttccgaaagataatttatatgtatcattaggtaaagtaggacataatagtacgactttaaatccattttcccaaatatctttacgaattactttacatataatatcctcatcaacagtcacataattacctgtggttaaaacctttgcaaatgcagcggctttgcctttcgcgtctgtagtatcgtcaccgatgaacgtcatttctctaactcctctatttaatactttacccatgcaactgaacgcgttcttggatatagaatccaatttgtacgaatccaatttttcaaatttttgaatgaatgaatatagatcgaaaaatatagttccattattgttattaacgtgaaacgtagtattggccatgccgcctactcccttatgactagactgatttctctcataaatacagagatgtacagcttcctttttgtccggagatctaaagataattttctctcctgttaataactctagacgattagtaatatatctcagatcaaagttatgtccgttaaaggtaacgacgtagtcgaacgttagttccaacaattgtttagctattcgtaacaaaactatttcagaacatagaactagttctcgttcgtaatccatttccattagtgactgtatcctcaaacatcctctatcgacggcttcttgtatttcctgttccgttaacatctcttcattaatgagcgtaaacaataatcgtttaccacttaaatcgatataacagtaacttgtatgcgagattgggttaataaatacagaaggaaacttcttatcgaagtgacactctatatctagaaataagtacgatcttgggatatcgaatctaggtatttttttagcgaaacagttacgtggatcgtcacaatgataacatccattgttaatctttgtcaaatattgctcgtccaacgagtaacatccgtctggagatatcccgttagaaatataaaaccaactaatattgagaaattcatccatggtggcattttgtatgctgcgtttctttggctcttctatcaaccacatatctgcgacggagcattttctatctttaatatctagattataacttattgtctcgtcaatgtctatagttctcatctttcccaacggcctcgcattaaatggaggaggagacaatgactgatatatttcgtccgtcactacgtaataaaagtaatgaggaaatcgtataaatacggtctcgccatttcgacatctggatttcagatataaaaatctgttttcaccgtgactttcaaaccaattaatgcaccgaacatccatttatagaatttagaaatatattttcatttaaatgaatcccaaacattggggaagagccgtatggaccattatttttatagtactttcgcaagcgggtttagacggcaacatagaagcgtgtaaacgaaaactatatactatagttagcactcttccatgtcctgcatgtagacggcacgcgactatcgctatagaggacaataatgtcatgtctagcgatgatctgaattatatttattattttttcatcagattatttaacaatttggcatctgatcccaaatacgcgatcgatgtgacaaaggttaaccctttataaacttaacccattataaaacttatgattagtcacaactgaaataaccgcgtgattattttttggtataattctacacggcatggtttctgtgactatgaattcaacccccgttacattagtgaaatctttaacaaacagcaagggttcgtcaaagacataaaactcattgtttacaatcgaaatagaccccctatcacacttaaaataaaaaatatccttatcctttaccaccaaataaaattctgattggtcaatgtgaatgtattcacttaacagttccacaaatttatttattaactccgaggcacatacatcgtcggtattttttatggcaaactttactcttccagcatccgtttctaaaaaaatattaacgagttccatttatatcatccaatattattgaaatgacgttgatggacagatgatacaaataagaaggtacggtacctttgtccaccatctcctccaattcatgctctattttgtcattaactttaatgtatgaaaacagtacgccacatgcttccatgacagtgtgtaacactttggatacaaaatgtttgacattagtataattgtccaagactgtcaatctataatagatagtagctataatatattctatgatggtattgaagaagatgacaaccttggcatattgatcatttaacacagacatggtatcaacagatagcttgaatgaaagagaatcagtaattggaataagcgtcttctcgatagagtgtccgtataccaacatgtctgatattttgatgtattccattaaattatttagttttttctttttattctcgttaaacagcatttctgtcaacggaccccaacatcgttgaccgattaagttttgattgatttttccgtgtaaggcgtatctagtcagatcgtatagcctatccaataatccatcgtctgtgtgtagatcacatcgtacactttttaattctctatagaagagcgacagacatctggagcaattacagacagcaatttctttattctctacagatgtaagatacttgaagacattcctatgatgatgcagaattttggataacacggtattgatggtatctgttaccataattcctttgatggctgatagtgtcagagcacaagatttccaatctttgacaatttttagcaccattatctttgttttgatatctatatcagacagcatggtgcgtctgacaacacagggattaagacggaaagatgaaatgattctctcaacatcttcaatagataccttgctattttttctggcattatctatatgtgcgagaatatcctctagagaatcagtatcctttttgatgatagtggatctcaatgacatgggacgtttaaaccttcttattctatcaccagattgcatggtgatttgtcttctttcttttatcataatgtaatctctaaattcatcggcaaattgtctatatctaaaatcataatatgagatgtttacctctacaaatatctgttcgtccaatgttagagtatttacatcagttttgtattccaaattaaacatggcaacggatttaattttatattcctctattaagtcctcgtcgataataacagaatgtagataatcatttaatccgtcgtacatggttggaagatgcttgttgacaaaatctttaattgtcttgatgaaggtgggactatatctaacatcttgattaataaaatttataacattgtccataggatactttgtaactagttttatacacatctcttcatcggtaagtttagacagaatatcgtgaacaggtggtatattatattcatcagatatacgaagaacaatgtccaaatctatattgtttaatatattatatagatgtagcgtagctcctacaggaatatctttaactaagtcaatgatttcatcaaccgttagatctattttaaagttaatcatataggcattgatttttaaaaggtatgtagccttgactacattctcattaattaaccattccaagtcattgtgtgtaagaagattatattctatcataagcttgactacatttggtcccgataccattaaagaattcttatgatataaggaaacagattttaggtactcatctactctacaagaattttggagagccttaacgatatcagtgacgtttattatttcaggaggaaagaatctaacattgagaatatcggaattaatagcttccagatacagtgattttggcaatagtccgtgtaatccataatccagtaacacgagctggtgcttgctagacaccttttcaatgtttaatttttttgaaataagctttgataaagccttcctcgcaaattccggatacatgaacatgtcggcgacatgattaagtattgttttttcattatttttatattttctcaacaagttctcaataccccaatagatgatagaatatcacccaatgcgtccatgttgtctatttccaacaggtcgctatatccaccaatagaagtttttccaaaaaagattctaggaacagttctaccaccagtaatttgttcaaaataatcccgcaattcattttcgggtttaaattctttaatatcgacaatttcatacgctcctcttttgaaactaaacttatttagaatatccagtgcatttctacaaaaaggacatgtatacttgacaaaaattgtcactttgttattggccaacctttgttgtacaaattcctcggccattttaatatttaagtgatataaaactatctcgacttatttaactctttagtcgagatatatggacgcagatagctatatgatagccaactacagaaggcaaacgctataaaaaacataattacgacgagcatatttataaatatttttattcagcattacttgatatagtaatattaggcacagtcaaacattcaaccactctcgatacattaactctctcattttctttaacaaattctgcaatatcttcgtaaaaagattcttgaaactttttagaatatctatcgactctagatgaaatagcgttcgtcaacatactatgttttgtatacataaaggcgcccattttaacagtttctagtgacaaaatgctagcgatcctaggatcctttagaatcacatagattgacgattcgtctctcttagtaactctagtaaaataatcatacaatctagtacgcgaaataatattatccttgacttgaggagatctaaacaatctagttttgagaacatcgataagttcatcgggaatgacatacatactatctttaatagaactcttttcatccagttgaatggattcgtccttaaccaactgattaatgagatcttctattttatcattttccagatgatatgtatgtccattaaagttaaattgtgtagcgcttctttttagtctagcagccaatactttaacatcactaatatcgatatacaaaggagatgatttatctatggcattaagaattcgtttttcgacatccgtcaaaaccaattcctttttgcctgtatcatccagttttccatcctttgtaaagaaattattttctactagactattaataagactgataaggattcctccataattgcacaatccaaactttttaacaaaactagactttacgagatctacaggaatgcgtacttcaggttttttagcttgtgattttttcttttgcggacattttctagtaaccaactcatctaccatttcattgattttagcagtgaaataagctttcaatgcacgggcactgatactattgaaaacgagttgatcttcaaattccgccatttaagttcaccaaacaacttttaaatacaaatatatcaatagtagtagaataagaactataaaaaaaataataattaaccaaccccaacaaccggtattattagttgatgtggtagttttctcatcacttagaacagatttaacaatttctataaagtctgtcaaatcatcttccggagaccccataaatacaccaaatatagcggcgtacaacttatccatttatacattgaatattggcttttctttatcgctatcttcatcatattcatcatcaatatcaacaagtcccagattacgagccagatcttcttctacattttcagtcattgatacacgttcactatctccagagagtccgataacgttagccaccacttctctatcaatgattagtttcttgagcgcgaaagtaatttttgtttccgttccggatctatagaagacgataggtgtgataattgccttggccaattgtctttctcttttactgagtgattctagttcaccttctatagatctgagaatggatgattctccagtcgaaacatattctaccatggatccgtttaatttgttgatgaagatggattcatccttaaatgttttctctgtaatagtttccaccgaaagactatgcaaagaatttggaatgcgttccttgtgcttaatgtttccatagacggcttctagaagttgatacaacataggactagccgcggtaacttttatttttagaaagtatccatcgcttctatcttgtttagatttatttttataaagtttagtctctccttccaacataataaaagtggaagtcatttgactagataaactatcagtaagttttatagagatagacgaacaattagcgtattgagaagcatttagtgtaacgtattcgatacattttgcattagatttactaatcgattttgcatactctataacacccgcacaagtctgtagagaatcgctagatgcagtaggtcttggtgaagtttcaactctcttcttgattaccttactcatgattaaacctaaataattgtactttgtaatataatgatatatattttcactttatctcatttgagaataaaaatgtttttgtttaaccactgcatgatgtacagatttcggaatcgcaaaccaccagtggttttattttatccttgtccaatgtgaattgaatgggagcggatgcgggtttcgtacgtagatagtacattcccgtttttagaccgagactccatccgtaaaaatgcatactcgttagtttggaataactcggatctgctatatggatattcatagattgactttgatcgatgaaggctcccctgtctgcagccatttttatgatcgtcttttgtggaatttcccaaatagttttataaactcgcttaatatcttctggaaggtttgtattctgaatggatccaccatctgccataatcctattcttgatctcatcattccataattttctctcggttaaaactctaaggagatgcggattaactacttgaaattctccagacaatactctccgagtgtaaatattactggtatacggttccaccgactcattatttcccaaaatttgagcagttgatgcagtcggcataggtgccaccaataaactatttctaagaccgtatgttctgattttatcttttagaggttcccaattccaaagatccgacggtacaacattccaaagatcatattgtagaataccgttactggcgtacgatcctacatatgtatcgtatggtccttccttctcagctagttcacaactcgcctctaatgcaccgtaataaatggtttcgaagatcttcttatttagatcttgtgcttccaggctatcaaatggataatttaagagaataaacgcgtccgctaatccttgaacaccaataccgataggtctatgtctcttattagagatttcagcttctggaataggataataattaatatctataattttattgagatttctgacaattactttgaccacatccttcagtttgagaaaatcaaatcgcccatctattacaaacatgttcaaggcaacagatgccagattacaaacggctacctcattagcatccgcatattgtattatctcagtgcaaagattactacacttgatagttcctaaattttgttgattactctttttgttacacgcatccttataaagaatgaatggagtaccagtttcaatctgagattctataatcgctttccagacgactcgagcctttattatagatttgtatctcctttctctttcgtatagtgtatacaatcgttcgaactcgtctccccaaacattgtccaatccaggacattcatccggacacatcaacgaccactctccgtcatccttcactcgtttcataaagagatcaggaatccaaagagctataaatagatctctggttctatgttcctcgtttcctgtattctttttaagatcgaggaacgccataatatcagaatgccacggttccaagtatatggccataactccaggccgtttgtttcctccctgatctatgtatctagcggtgttattataaactctcaacattggaataataccgtttgatataccattggtaccggagatatagcttccactggcacgaatattactaattgatagacctattccccctgccattttagagattaatgcgcatcgttttaacgtgtcatagataccctctatgctatcatcgatcatgttaagtagaaaacagctagacatttggtgacgactagttcccgcattaaataaggtaggagaagcgtgcgtaaaccatttttcagaaagtagattgtacgtctcaatagctgagtctatatcccattgatgaattcctactgcgacacgcattaacatgtgctgaggtctttcaacgatcttgttgtttattttcaacaagtaggatttttccaaagttttaaaaccaaaatagttgtatgaaaagtctcgttcgtaaataataaccgagttgagtttatccttatatttgttaactatatccatggtgatacttgaaataatcggagaatgtttcccatttttaggattaacatagttgaataaatcctccatcacttcactaaatagtttttttgtttccttgtgtagatttgatacggctattctggcggctagaatggcataatccggatgttgtgtagtacaagtggctgctatttcggctgccagagtgtccaattctaccgttgttactccattatatattccttgaataaccttcatagctattttaataggatctatatgatccgtgtttaagccataacataattttctaatacgagacgtgattttatcaaacatgacattttccttgtatccatttcgtttaatgacaaacatttttgttggtgtaataaaaaaattatttaacttttcattaatagggatttgacgtatgtagcgtacaaaatgattgttcctggtatatagataaagagtcctatatatttgaaaatcgttacggctcgattaaactttaatgattgcatagtgaatatatcattaggatttaactccttgactatcatggcggcgccagaaattaccatcaaaagcattaatacagttataccgatcgcagttagaacggttatagcatccaccatttatatctaaaaattagatcaaagaatatgtgacaaagtcctagttgtatactgagaattgacgaaacaatgtttcttacatatttttttcttattagtaaccgacttaatagtaggaactggaaaactagacttgattattctataagtatagatacccttccaaataatattctctttgataaaagttccagaaaatgtagaattttttaaaaagttatcttttgctattaccaagattgtgtttagacgcttattattaatatgagtgatgaaatccacaccgcctctagatatcgcctttatttccacattagatggtaaatccaatagtgaaactatctttttaggaatgtatggactcgcgtttagaggagtaaacgtcttaggcgtcggaaaggatgattcatcaaacgaataaacaatttcacaaatggatgttaatgtattagtaggaaattttttgacgctattggaattgaagattctaatggatgatgttctacctatttcatccgataacatgttaatttccgacaccaacggttttaatatttcgatgatatacggtagtctctctttcggacttatatagcttattccacaatacgagtcattatatactccaaaaaacaaaataactagtataaaatctgtatcgaatgggaaaaacgaaattatcgacataggtatagaatccggaacattgaacgtattaatacttaattctttttctgtggtaagtaccgataggttattgacattgtatggttttaaatattctataacttgagacttgatagatattagtgatgaattgaaaattatttttatcaccacgtgtgtttcaggatcatcgtcgacgcccgtcaaccaaccgaacggagtaaaataaatatcattaatatatgctctagatattagtatttttatcaatcctttgattatcatcttctcgtaggcgaatgattccatgatcaagagtgatttaagaacatcctccggagtattaatgggcttagtaaacagtccatcgttgcaataataaaagttatccaagttaaaggatattatgcattcgtttaaagatatcacctcatctgacggagacaattttttggtaggttttagagactttgaagctacttgtttaacaaagttattcatcgtcgtctactattctatttaattttgtagttaatttatcacatatcacattaattgactttttggtccacttttccatacgtttatattcttttaatcctgcgttatccgtttccgttatatccagggatagatcttgcaagttaaatagaatgctcttaaataatgtcattttcttatccgctaaaaatttaaagaatgtataaacctttttcagagatttgaaactcttaggtggtgtcctagtacacaatatcataaacaaactaataaacattccacattcagattccaacagctgattaacttccacattaatacagcctattttcgctccaaatgtacattcgaaaaatctgaataaaacatcgatgtcacaatttgtattatccaatacagaatgtttgtgattcgtgttaaaaccatcggagaaggaatagaaataaaaattattatagtggtggaattcagttggaatattgcctccggagtcataaaaggatactaaacattgttttttatcataaattacacatttccaatgagacaaataacaaaatccaaacattacaaatctagaggtagaacttttaattttgtctttaagtatatacgataagatatgtttattcataaacgcgtcaaatttttcatgaatcgctaaggagtttaagaatctcatgtcaaattgtcctatataatccacttcggatccataagcaaactgagagactaagttcttaatacttcgattgctcatccaggctcctctctcaggctctattttcatcttgacgacctttggattttcaccagtatgtattcctttacgtgataaatcatcgattttcaaatccatttgtgagaagtctatcgccttagatactttttcccgtagtcgaggtttaaaaaaatacgctaacggtatactagtaggtaactcaaagacatcatatatagaatggtaacgcgtctttaactcgtcggttaactctttcttttgatcgagttcgtcgctactattgggtctgctcaggtgccccgactctactagttccaacatcataccgataggaatacaagacactttgccggcggttgtagatttatcatatttttccactacatatccgttacaatttgttaaaaatttagatacatctatattgctacataatccagctagtgaatatatatgacataataaattggtaaatcctagttctggtattttactaattactaaatctgtatatctttccatttatcatggaaaagaatttaccagatatcttcttttttccaaactgcgttaatgtattctcttacaaatattcacaagatgaattcagtaatatgagtaaaacggaacgtgatagtttctcattggccgtgtttccagttataaaacatagatggcataacgcacacgttgtaaaacataaaggaatatacaaagttagtacagaagcacgtggaaaaaaagtatctcctccatcactaggaaaacccgcacacataaacctaaccgcgaagcaatatatatacagtgaacacacaataagctttgaatgttatagttttctaaaatgtataacaaatacagaaatcaattcgttcgatgagtatatattaagaggactattagaagctggtaatagtttacagatattttccaattccgtaggtaaacgaacagatactataggtgtactagggaataagtatccatttagcaaaattccattggcctcattaactcctaaagcacaacgagagatattttcagcgtggatttctcatagacctgtagttttaactggaggaactggagtgggtaagacgtcacaggtacccaagttattgctttggtttaattatttatttggtggattctctactctagataaaatcactgactttcacgaaagaccagtcattctatctcttcctaggatagctttagttagattgcatagcaataccattttaaaatcattgggatttaaggtactagatggatctcctatttctttacggtacggatctataccggaagaattaataaacaaacaaccaaaaaaatatggaattgtattttctacccataagttatctctaacaaaactatttagttatggcactcttattatagacgaagttcatgagcatgatcaaataggagatattattatagcagtagcgagaaagcatcatacgaaaatagattctatgtttttaatgactgccacgttagaggatgacagggaacggctaaaagtatttttacctaatcccgcatttatacatattcctggagatacactgtttaaaattagcgaggtatttattcataataagataaatccatcttccagaatggcatacatagaagaagaaaagagaaatttagttactgctatacagatgtatactcctcctgatggatcatccggtatagtctttgtggcatccgttgcacagtgtcacgaatataaatcatatttagaaaaaagattaccgtatgatatgtatattattcatggtaaggtcttagatatagacgaaatattagaaaaagtgtattcatcacctaatgtatcgataattatttctactccttatttggaatccagcgttactatacgcaatgttacacacatttatgatatgggtagagtttttgtccccgctccttttggaggatcgcaacaatttatttctaaatctatgagagatcaacgaaaaggaagagtaggaagagttaatcctggtacatacgtctatttctatgatctgtcttatatgaagtctatacagcgaatagattcagaatttctacataattatatattgtacgctaataagtttaatctaacactccccgaagatttgtttataatccctacaaatttggatattctatggcgtacaaaggaatatatagactcgttcgatattagtacagaaacatggaataaattattatccaattattatatgaagatgatagagtatgctaaactttatgtactaagtcctattctcgctgaggagttggataactttgagaggacgggagaattaactagtattgtacgagaagccattttatctctaaatttacaaattaagattttaaattttaaacataaagatgatgatacgtatatacacttttgtaaaatattattcggtgtctataacggaacaaacgctactatatattatcatagacctctaacgggatatatgaatatgatttcagatactatatttgttcctgtagataataactaaaaatcaaactctaatgaccacatctttttttagagatgaaaaattttccacatctccttttgtagacacgactaaacattttgcagaaaaaagtttattagtgtttagataatcgtatacttcatcagtgtagatagtaaatgtgaacagataaaaggtattcttgctcaatagattggtaaattccatagaatatattaatcctttcttcttgagatcccacatcatttcaaccagagacgttttatccaatgatttacctcgtactataccacatacaaaactagattttgcagtgacgtcgtacctggtattcctaccaaacaaaattttacttttagttcttttagaaaattctaaggtagaatctctatttgccaatatgtcatctatggaattaccactagcaaaaaatgatagaaatatatattgatacatcgcagctggttttgatctactatactttaaaaacgaatcagattccataattgcctgtatatcatcagctgaaaaactatgttttacacgtattccttcggcatttctttttaatgatatatcttgtttagacaatgataaagttatcatgtccatgagagacgcgtctccgtatcgtataaatatttcattagatgttagacgcttcattaggggtatacttctataaggtttcttaatcagtccatcattggttgcgtcaagaactactatcggatgttgttgggtatctctagtgttacacatggccttactaaagtttgggtaaataactatgatatctctattaattatagatgcatatatttcattcgtcaaggatattagtatcgacttgctatcgtcattaatacgtgtaatgtaatcatataaatcatgcgatagccaaggaaaatttaaatagatgttcatcatataatcgtcgctataattcatattaatacgttgacattgactaatttgtaatatagcctcgccacgaagaaagctctcgtattcagtttcatcgataaaggataccgttaaatataactggttgccgatagtctcatagtctattaagtggtaagtttcgtacaaatacagaatccctaaaatattatctaatgttggattaatctttaccataactgtataaaatggagacggagtcataactattttaccgtttgtacttactggaatagatgaaggaataatctccggacatgctggtaaagacccaaatgtctgtttgaagaaatccaatgttccaggtcctaatctcttaacaaaaattacgatattcgatcccgatatcctttgcattctatttaccagcatatcacgaactatattaagattatctatcatgtctattctcccaccgttatataaatcgcctccgctaagaaacgttagtatatccatacaatggaatacttcatttctaaaatagtattcgttttctaattctttaatgtgaaatcgtatactagaaagggaaaaattatctttgagttttccgttagaaaagaaccacgaaactaatgttctgattgcgtccgattccgttgctgaattaatggatttacaccaaaaactcatataacttctagatgtagaagcattcgctaaaaaattagtagaatcaaaggatataagtagatgttccaacaagtgagcaattcccaagatttcatctatatcattctcgaatccgaaattagaaattcccaagtagatatcctttttcatccgatcgttgatgaaaatacgaactttattcggtaagacaatcatttactaaggagtaaaataggaagtaatgttcgtatgtcgttatcatcgtataaattaaaggtgtgttttttaccattaagtgacattataattttaccaatattggaattataatataggtgtatttgcgcactcgcgacggttgatgcatcggtaaatatagctgtatctaatgttctagtcggtatttcatcatttcgctgtctaataatagcgttttctctatctgtttccattacagctgcctgaagtttattggtcggataatatgtaaaataataagaaatacatacgaataacaaaaataaaataagatataataaagatgccatttagagatctaattttgtttaacttgtccaaattcctacttacagaagatgaggaatcgttggagatagtgtcttccttatgtagaggatttgaaatatcttataatgacttgataacttactttccagataggaaataccataaatatatttataaagtatttgaacatgtagatttatcggaggaattaagtatggaattccatgatacaactctgagagatttagtctatcttagattgtacaagtattccaagtgtatacggccgtgttataaattaggagataatctaaaaggcatagttgttataaaggacaggaatatttatattagggaagcaaatgatgacttgatagaatatctcctcaaggaatacactcctcagatttatacatattctaatgagcgcgtccccataactggttcaaaattaattctttgtggattttctcaagttacatttatggcgtatacaacgtcgcatataacaacaaataaaaaggtagatgttctcgtttccaaaaaatgtatagatgaactagtcgatccaataaattatcaaatacttcaaaatttatttgataaaggaagcggaacaataaacaaaatactcaggaagatattttattcggtaacaggtggccaaactccataggtagctttttctatttcggattttagaatttccaaattcaccagcgatttatcggttttggtgaaatccaaggatttattaatgtccacaaatgccatttgttttgtctgtggattgtatttgaaaatggaaacgatgtagttagatagatgcgctgcgaagtttcctattagggttccgcgcttcacgtcacccagcatacttgaatcaccatcctttaaaaaaaatgataagatatcaacatggagtatatcatactcgaattttaattcttctactgactcactgacattttcacaaatactacaatacggtttaccgaaaataatcagtacgttcttcatttatgggtatcaaaaacttaaaatcgttactgctggaaaataaatcactgacgatattagatgataatttatacaaagtatacaatggaatatttgtggatacaatgagtatttatatagccgtcgccaattgtgtcagaaacttagaagagttaactacggtattcataaaatacgtaaacggatgggtaaaaaagggagggcatgtaaccctttttatcgatagaggaagtataaaaattaaacaagacgttagagacaagagacgtaaatattctaaattaaccaaggacagaaaaatgttagaattagaaaagtgtacatccgaaatacaaaatgttaccggatttatggaagaagaaataaaggcagaaatgcaattaaaaatcgataaactcacatttcaaatatatttatctgattctgataacataaaaatatcattgaatgagatactaacacatttcaacaataatgagaatgttacattattttattgtgatgaacgagacgcagaattcgttatgtgtctcgaggctaaaacacatttctctaccacaggagaatggccgttgataataagtaccgatcaggatactatgctatttgcatctgctgataatcatcctaagatgataaaaaacttaactcaactgtttaaatttgttccctcggcagaggataactatttagcaaaattaacggcgttagtgaatggatgtgatttctttcctggactctatggggcatctataacacccaccaacttaaacaaaatacaattgtttagtgattttacaatcgataatatagtcactagtttggcaattaaaaattattatagaaagactaactctaccgtagacgtgcgtaatattgttacgtttataaacgattacgctaatttagacgatgtctactcgtatattcctccttgtcaatgcactgttcaagaatttatattttccgcattagatgaaaaatggaatgaatttaaatcatcttatttagaaagcgtgccgttaccctgccaattaatgtacgcgttagaaccacgcaaggagattgatgtttcagaagttaaaactttatcatcttatatagatttcgaaaatactaaatcagatatcgatgttataaaatctatatcctcgatcttcggatattctaacgaaaactgtaacacgatagtattcggcatctataaggataatttactactgagtataaataattcattttactttaacgatagtctgttaataaccaatactaaaagtgataatataataaatataggttactagattaaaaatggtgttccaactcgtgtgctctacatgcggtaaagatatttctcacgaacgatataaattgattatacgaaaaaaatcattaaaggatgtactcgtcagtgtaaagaacgaatgttgtaggttaaaattatctacacaaatagaacctcaacgtaacttaacagtgcaacctctattggatataaactaatatggatccggttaattttatcaagacatatgcgcctagaggttctattatttttattaattataccatgtcattaacaagtcatttgaatccatcgatagaaaaacatgtgggtatttattatggtacgttattatcggaacacttggtagttgaatctacctatagaaaaggagttcgaatagtcccattggatagtttttttgaaggatatcttagtgcaaaagtatacatgttagagaatattcaagttatgaaaatagcagctgatacgtcattaactttattgggtattccgtatggatttggtcatgatagaatgtattgttttaaattggtagctgactgttataaaaatgccggtattgatacatcgtctaaacgaatattgggcaaagatatttttctgagccaaaacttcacagacgataatagatggataaagatatatgattctaataatttaacattttggcaaattgattaccttaaagggtgagttaatatgcataactactcctccgttgttttttccctcgttctttttcttaacgttgtttgccatcactctcataatgtaaagatattctaaaatggtaaacttttgcatatcggacgcagaaattggtataaatgttgtaattgtattatttcccgtcaatggactagtcacagctccatcagttttatatcctttagagtatttctcactcgtgtctaacattctagagcattccatgatctgtttatcgttgatattggccggaaagatagattttttattttttattatattactattggcaattgtagatataacttctggtaaatatttttctaccttttcaatctcttctattttcaagccggctatatattctgctatattgttgctagtatcaataccttttctggctaagaagtcatatgtggtattcactatatcagttttaactggtagttccattagcctttccacttctgcagaataatcagaaattggttctttaccagaaaatccagctactataataggctcaccgatgatcattggcaaaatcctatattgtaccagattaatgagagcatatttcatttccaataattctgctagttcttgagacattgatttatttgatgaatctagttggttctctagatactctaccatttctgccgcatacaataacttgttagataaaatcagggttatcaaagtgtttagcgtggctagaatagtgggcttgcatgtattaaagaatgcggtagtatgagtaaaccgttttaacgaattatatagtctccagaaatctgtggcgttacatacatgagccgaatgacatcgaagattgtccaatatttttaatagctgctctttgtccattatttctatatttgactcgcaacaattgtagataccattaatcaccgattcctttttcgatgccggacaatagcacaattgtttagctttggactctatgtattcagaattaatagatatatctctcaatacagattgcactatacattttgaaactatgtcaaaaattgtagaacgacgctgttctgcagccatttaactttaaataatttacaaaaatttaaaatgagcatccgtataaaaatcgataaactgcgccaaattgtggcatatttttcagagttcagtgaagaagtgtctataaatgtagactcgacggatgagttaatgtatatttttgccgccttgggcggatctgtaaacatttgggcaattatacctctaagtgcatcagtgttttaccgaggagccgaaaatattgtgtttaatcttcctgtgtccaaggtaaaatcgtgtttgtgtagttttcacaatgatgccatcatagatatagaacctgatctggaaaataatctagtaaaactttctagttatcatgtagtaagtgtcgattgtaacaaggaactgatgcctattaggacagatactactatttgtctaagtatagatcaaaagaaatcttacgtgtttaattttcacaagtatgaagaaaaatgttgtggtagaaccgtcattcatctagaatggttgttgggctttatcaagtgtattagtcagcatcagcatctggctattatgtttaaagatgacaatattattatgaagactcctggtaatactgatgcgttttccagggaatattctatgactgaatgttctcaagaactacaaaagttttctttcaaaatagctatctcgtctctcaacaaactacgaggattcaaaaagagagtcaatgtttttgaaactagaatcgtaatggataatgacgataacattttaggaatgttgttttcggatagagttcaatcctttaagatcaacatctttatggcgtttttagattaatactttcaatgagataaatatgggtggcggagtaagtgttgagctccctaaacgggatccgcctccgggagtacccactgatgagatgttattaaacgtggataaaatgcatgacgtgatagctcccgctaagcttttagaatatgtgcatataggaccactagcaaaagataaagaggataaagtaaagaaaagatatccagagtttagattagtcaacacaggacccggtggtctttcggcattgttaagacaatcgtataatggaaccgcacccaattgctgtcgcacttttaatcgtactcattattggaagaaggatggaaagatatcagataagtatgaagagggtgcagtattagaatcgtgttggccagacgttcacgacactggaaaatgcgatgttgatttattcgactggtgtcagggggatacgttcgatagaaacatatgccatcagtggatcggttcagcctttaataggagtaatagaactgtagagggtcaacaatcgttaataaatctgtataataagatgcaaacattatgtagtaaagatgctagtgtaccaatatgcgaatcatttttgcattatttacgcgcacacaatacagaagatagcaaagagatgatcgattatattctaagacaacagtctgcggactttaaacagaaatatatgagatgtagttatcccactagagataagttagaagagtcattaaaatatgcggaacctcgagaatgttgggatccagagtgttcgaatgccaatgttaatttcttactaacacgtaattataataatttaggactttgcaatattgtacgatgtaataccagcgtgaacaacttacagatggataaaacttcctcattaagattgtcatgtggattaagcaatagtgatagattttctactgttcccgtcaatagagcaaaagtagttcaacataatattaaacactcgttcgacctaaaattgcatttgatcagtttattatctctcttggtaatatggatactaattgtagctatttaaatgggtgccgcggcaagcatacagacgacggtgaatacactcagcgaacgtatctcgtctaaattagaacaagaagcgaacgctagtgctcaaacaaaatgtgatatagaaatcggaaatttttatatccgacaaaaccatggatgtaacctcactgttaaaaatatgtgctctgcggacgcggatgctcagttggatgctgtgttatcagccgctacagaaacatatagtggattaacaccggaacaaaaagcatacgtgccagctatgtttactgctgcgttaaacattcagacgagtgtaaacactgttgttagagattttgaaaattatgtgaaacagacttgtaattctagcgcggtcgtcgataacaaattaaagatacaaaacgtaatcatagatgaatgttacggagccccaggatctccaacaaatttggaatttattaatacaggatctagcaaaggaaattgtgccattaaagcgttgatgcaattgacgactaaggccactactcaaatagcacctagacaagttgctggtacaggagttcagttttatatgattgttatcggtgttataatattggcagcgttgtttatgtactatgccaagcgtatgttgttcacatccaccaatgataaaatcaaacttattttagccaataaggaaaacgtccattggactacttacatggacacattctttagaacttctccgatggttattgctaccacggatatgcaaaactgaaaatatattgataatattttaatagattaacatggaagttatcgctgatcgtctagacgatatagtgaaacaaaatatagcggatgaaaaatttgtagattttgttatacacggtctagagcatcaatgtcctgctatacttcgaccattaattaggttgtttattgatatactattatttgttatagtaatttatatttttacggtacgtctagtaagtagaaattatcaaatgttgttggtggtgctagtcatcacattaactattttttattactttatactataatagtactagactgacttctaacaaacatctcacctgccataaataaatgcttgatattaaagtcttctatttctaacactattccatctgtggaaaataatactctgacattatcgctaattgacacatcggtgagtgatatgcctataaagtaataatcttctttgggcacatataccagtgtaccaggttctaacaacctatttactggtgctcctgtagcatactttttctttaccttgagaatatccatcgtttgcttggtcaatagcgatatgtgattttttatcaaccactcaaaaaagtaattggagtgttcatatcctctacgggctattgtctcatggccgtgtatgaaatttaagtaacacgactgtggtagatttgttctatagagccgattgccgcaaatagatagaactaccaatatgtctgtacaaatgttaaacattaattgattaacagaaaaaacaatgttcgttctgggaatagaaaccagatcaaaacaaaattcgttagaatatatgccacgtttatacatggaatataaaataactacagtttgaaaaataacagtatcatttaaacatttaacttgcggggttaatctcacaactttactgtttttgaactgttcaaaatatagcatcgatccgtgagaaatacgtttagccgcctttaatagaggaaatcccaccgcctttctggatctcaccaacgacgatagttctgaccagcaactcatttcttcatcatccacctgttttaacatataataggcaggagatagatatccgtcattgcaatattccttctcgtaggcacacaatctaatattgataaaatctccattctcttctctgcatttattatcttgtctcggtggctgattaggctgtggtcttggtttaggccttggtctatcgttgttgaatctattttggtcattaaatctttcatttcttcctggtatatttctatcacctcgtttggttggatttttgtctatattatcgtttgtaacatcggtacgggtattcatttatcacaaaaaaaacttctctaaatgagtctactgctagaaaacctcatcgaagaagataccatattttttgcaggaagtatatctgagtatgatgatttacaaatggttattgccggcgcaaaatccaaatttccaagatctatgctttctatttttaatatagtacctagaacgatgtcaaaatatgagttggagttgattcataacgaaaatatcacaggagcaatgtttaccacaatgtataatataagaaacaatttgggtctaggagatgataaactaactattgaagccattgaaaactatttcttggatcctaacaatgaagttatgcctcttattattaataatacggatatgactgccgtcattcctaaaaaaagtggtaggagaaagaataagaacatggttatcttccgtcaaggatcatcacctatcttgtgcattttcgaaactcgtaaaaagattaatatttataaagaaaatatggaatccgcgtcgactgagtatacacctatcggagacaacaaggctttgatatctaaatatgcgggaattaatgtcctgaatgtgtattctccttccacatccataagattgaatgccatttacggattcaccaataaaaataaactagagaaacttagtactaataaggaactagaatcgtatagttctagccctcttcaagaacccattaggttaaatgattttctgggactattggaatgtgttaaaaagaatattcctctaacagatattccgacaaaggattgattactataaatggagaatgttcctaatgtatactttaatcctgtgtttatagagcccacgtttaaacattctttattaagtgtttataaacacagattaatagttttatttgaagtattcgttgtattcattctaatatatgtattttttagatctgaattaaatatgttcttcatgcctaaacgaaaaatacccgatcctattgatagattacgacgtgctaatctagcgtgtgaagacgataaattaatgatctatggattaccatggatgacaactcaaacatctgcgttatcaataaatagtaaaccgatagtgtataaagattgtgcaaagcttttgcgatcaataaatggatcacaaccagtatctcttaacgatgttcttcgcagatgatgattcattttttaagtatttggctagtcaagatgatgaatcttcattatctgatatattgcaaatcactcaatatctagactttctgttattattattgatccaatcaaaaaataaattagaagctgtgggtcattgttatgaatctctttcagaggaatacagacaattgacaaaattcacagactttcaagattttaaaaaactgtttaacaaggtccctattgttacagatggaagggtcaaacttaataaaggatatttgttcgactttgtgattagtttgatgcgattcaaaaaagaatcctctctagctaccaccgcaatagatcctgttagatacatagatcctcgtcgcaatatcgcattttctaacgtgatggatatattaaagtcgaataaagtgaacaataattaattctttattgtcatcatgaacggcggacatattcagttgataatcggccccatgttttcaggtaaaagtacagaattaattagacgagttagacgttatcaaatagctcaatataaatgcgtgactataaaatattctaacgataatagatacggaacgggactatggacgcatgataagaataattttgaagcattggaagcaactaaactatgtgatgtcttggaatcaattacagatttctccgtgataggtatcgatgaaggacagttctttccagacattgttgaattagatcgataaaaattaattaattacccgggtaccaggcctagatctgtcgagatccggtggtggtgcaaatcaaagaactgctcctcagtggatgttgcctttacttctaggcctgtacggaagtgttacttctgctctaaaagctgctgcagggggggggggggggtgggggggccggttagggccgccatcccctcagagcgtcgggatatcgggtggcggctcgggacggaggacgcgctagtgttcttctgtgtggcagttcagaatgatggatcaagctagatcagcattctctaacttgtttggtggagaaccattgtcatatacccggttcagcctggctcggcaagtagatggcgataacagtcatgtggagatgaaacttgctgtagatgaagaagaaaatgctgacaataacacaaaggccaatgtcacaaaaccaaaaaggtgtagtggaagtatctgctatgggactattgctgtgatcgtctttttcttgattggatttatgattggctacttgggctattgtaaaggggtagaaccaaaaactgagtgtgagagactggcaggaaccgagtctccagtgagggaggagccaggagaggacttccctgcagcacgtcgcttatattgggatgacctgaagagaaagttgtcggagaaactggacagcacagacttcaccagcaccatcaagctgctgaatgaaaattcatatgtccctcgtgaggctggatctcaaaaagatgaaaatcttgcgttgtatgttgaaaatcaatttcgtgaatttaaactcagcaaagtctggcgtgatcaacattttgttaagattcaggtcaaagacagcgctcaaaactcggtgatcatagttgataagaacggtagacttgtttacctggtggagaatcctgggggttatgtggcgtatagtaaggctgcaacagttactggtaaactggtccatgctaattttggtactaaaaaagattttgaggatttatacactcctgtgaatggatctatagtgattgtcagagcagggaaaatcacctttgcagaaaaggttgcaaatgctgaaagcttaaatgcaattggtgtgttgatatacatggaccagactaaatttcccattgttaacgcagaactttcattctttggacatgctcatctggggacaggtgacccttacacacctggattcccttccttcaatcacactcagtttccaccatctcggtcatcaggattgcctaatatacctgtccagacaatctccagagctgctgcagaaaagctgtttgggaatatggaaggagactgtccctctgactggaaaacagactctacatgtaggatggtaacctcagaaagcaagaatgtgaagctcactgtgagcaatgtgctgaaagagataaaaattcttaacatctttggagttattaaaggctttgtagaaccagatcactatgttgtagttggggcccagagagatgcatggggccctggagctgcaaaatccggtgtaggcacagctctcctattgaaacttgcccagatgttctcagatatggtcttaaaagatgggtttcagcccagcagaagcattatctttgccagttggagtgctggagactttggatcggttggtgccactgaatggctagagggatacctttcgtccctgcatttaaaggctttcacttatattaatctggataaagcggttcttggtaccagcaacttcaaggtttctgccagcccactgttgtatacgcttattgagaaaacaatgcaaaatgtgaagcatccggttactgggcaatttctatatcaggacagcaactgggccagcaaagttgagaaactcactttagacaatgctgctttccctttccttgcatattctggaatcccagcagtttctttctgtttttgcgaggacacagattatccttatttgggtaccaccatggacacctataaggaactgattgagaggattcctgagttgaacaaagtggcacgagcagctgcagaggtcgctggtcagttcgtgattaaactaacccatgatgttgaattgaacctggactatgagaggtacaacagccaactgctttcatttgtgagggatctgaaccaatacagagcagacataaaggaaatgggcctgagtttacagtggctgtattctgctcgtggagacttcttccgtgctacttccagactaacaacagatttcgggaatgctgagaaaacagacagatttgtcatgaagaaactcaatgatcgtgtcatgagagtggagtatcacttcctctctccctacgtatctccaaaagagtctcctttccgacatgtcttctggggctccggctctcacacgctgccagctttactggagaacttgaaactgcgtaaacaaaataacggtgcttttaatgaaacgctgttcagaaaccagttggctctagctacttggactattcagggagctgcaaatgccctctctggtgacgtttgggacattgacaatgagttttaaatgtgatacccatagcttccatgagaacagcagggtagtctggtttctagacttgtgctgatcgtgctaaattttcagtagggctacaaaacctgatgttaaaattccatcccatcatcttggtactactagatgtctttaggcagcagcttttaatacagggtagataacctgtacttcaagttaaagtgaataaccacttaaaaaatgtccatgatggaatattcccctatctctagaattttaagtgctttgtaatgggaactgcctctttcctgttgttgttaatgaaaatgtcagaaaccagttatgtgaatgatctctctgaatcctaagggctggtctctgctgaaggttgtaagtggtcgcttactttgagtgatcctccaacttcatttgatgctaaataggagataccaggttgaaagaccttctccaaatgagatctaagcctttccataaggaatgtagctggtttcctcattcctgaaagaaacagttaactttcagaagagatgggcttgttttcttgccaatgaggtctgaaatggaggtccttctgctggataaaatgaggttcaactgttgattgcaggaataaggccttaatatgttaacctcagtgtcatttatgaaaagaggggaccagaagccaaagacttagtatattttcttttcctctgtcccttcccccataagcctccatttagttctttgttatttttgtttcttccaaagcacattgaaagagaaccagtttcaggtgtttagttgcagactcagtttgtcagactttaaagaataatatgctgccaaattttggccaaagtgttaatcttaggggagagctttctgtccttttggcactgagatatttattgtttatttatcagtgacagagttcactataaatggtgtttttttaatagaatataattatcggaagcagtgccttccataattatgacagttatactgtcggttttttttaaataaaagcagcatctgctaataaaacccaacagatactggaagttttgcatttatggtcaacacttaagggttttagaaaacagccgtcagccaaatgtaattgaataaagttgaagctaagatttagagatgaattaaatttaattaggggttgctaagaagcgagcactgaccagataagaatgctggttttcctaaatgcagtgaattgtgaccaagttataaatcaatgtcacttaaaggctgtggtagtactcctgcaaaattttatagctcagtttatccaaggtgtaactctaattcccattttgcaaaatttccagtacctttgtcacaatcctaacacattatcgggagcagtatcttccataatgtataaagaacaaggtagtttttacctaccacagtgtctgtatcggagacagtgatctccatatgttacactaagggtgtaagtaattatcgggaacagtgtttcccataattttcttcatgcaatgacatcttcaaagcttgaagatcgttagtatctaacatgtatcccaactcctataattccctatcttttagttttagttgcagaaacattttgtggtcattaagcattgggtgggtaaattcaaccactgtaaaatgaaattactacaaaatttgaaatttagcttgggtttttgttacctttatggtttctccaggtcctctacttaatgagatagtagcatacatttataatgtttgctattgacaagtcattttaactttatcacattatttgcatgttacctcctataaacttagtgcggacaagttttaatccagaattgaccttttgacttaaagcagagggactttgtatagaaggtttgggggctgtggggaaggagagtcccctgaaggtctgacacgtctgcctacccattcgtggtgatcaattaaatgtaggtatgaataagttcgaagctccgtgagtgaaccatcattataaacgtgatgatcagctgtttgtcatagggcagttggaaacggcctcctagggaaaagttcatagggtctcttcaggttcttagtgtcacttacctagatttacagcctcacttgaatgtgtcactactcacagtctctttaatcttcagttttatctttaatctcctcttttatcttggactgacatttagcgtagctaagtgaaaaggtcatagctgagattcctggttcgggtgttacgcacacgtacttaaatgaaagcatgtggcatgttcatcgtataacacaatatgaatacagggcatgcattttgcagcagtgagtctcttcagaaaacccttttctacagttagggttgagttacttcctatcaagccagtacgtgctaacaggctcaatattcctgaatgaaatatcagactagtgacaagctcctggtcttgagatgtcttctcgttaaggagatgggccttttggaggtaaaggataaaatgaatgagttctgtcatgattcactattctagaacttgcatgacctttactgtgttagctctttgaatgttcttgaaattttagactttctttgtaaacaaatgatatgtccttatcattgtataaaagctgttatgtgcaacagtgtggagattccttgtctgatttaataaaatacttaaacactgaaaaaaaaaaaaaaaaaaaaaaaaaaaaaaaaaaaaaaaaaaaaaaaaaaaaaaaaaaaaaaaaaaaaaaaaaaaaaaaaagtaccttctgaggcggaaagaaccagccggatctcgacttcgagcttatttatattccaaaaaaaaaaaataaaatttcaatttttaagctttcactaattccaaacccacccgctttttatagtaagtttttcacccataaataataaatacaataattaatttctcgtaaaagtagaaaatatattctaatttattgcacggtaaggaagtagatcataactcgagcatgggagatcccgtcgttttacaacgtcgtgactgggaaaaccctggcgttacccaacttaatcgccttgcagcacatccccctttcgccagctggcgtaatagcgaagaggcccgcaccgatcgcccttcccaacagttgcgcagcctgaatggcgaatggcgctttgcctggtttccggcaccagaagcggtgccggaaagctggctggagtgcgatcttcctgaggccgatactgtcgtcgtcccctcaaactggcagatgcacggttacgatgcgcccatctacaccaacgtgacctatcccattacggtcaatccgccgtttgttcccacggagaatccgacgggttgttactcgctcacatttaatgttgatgaaagctggctacaggaaggccagacgcgaattatttttgatggcgttaactcggcgtttcatctgtggtgcaacgggcgctgggtcggttacggccaggacagtcgtttgccgtctgaatttgacctgagcgcatttttacgcgccggagaaaaccgcctcgcggtgatggtgctgcgctggagtgacggcagttatctggaagatcaggatatgtggcggatgagcggcattttccgtgacgtctcgttgctgcataaaccgactacacaaatcagcgatttccatgttgccactcgctttaatgatgatttcagccgcgctgtactggaggctgaagttcagatgtgcggcgagttgcgtgactacctacgggtaacagtttctttatggcagggtgaaacgcaggtcgccagcggcaccgcgcctttcggcggtgaaattatcgatgagcgtggtggttatgccgatcgcgtcacactacgtctgaacgtcgaaaacccgaaactgtggagcgccgaaatcccgaatctctatcgtgcggtggttgaactgcacaccgccgacggcacgctgattgaagcagaagcctgcgatgtcggtttccgcgaggtgcggattgaaaatggtctgctgctgctgaacggcaagccgttgctgattcgaggcgttaaccgtcacgagcatcatcctctgcatggtcaggtcatggatgagcagacgatggtgcaggatatcctgctgatgaagcagaacaactttaacgccgtgcgctgttcgcattatccgaaccatccgctgtggtacacgctgtgcgaccgctacggcctgtatgtggtggatgaagccaatattgaaacccacggcatggtgccaatgaatcgtctgaccgatgatccgcgctggctaccggcgatgagcgaacgcgtaacgcgaatggtgcagcgcgatcgtaatcacccgagtgtgatcatctggtcgctggggaatgaatcaggccacggcgctaatcacgacgcgctgtatcgctggatcaaatctgtcgatccttcccgcccggtgcagtatgaaggcggcggagccgacaccacggccaccgatattatttgcccgatgtacgcgcgcgtggatgaagaccagcccttcccggctgtgccgaaatggtccatcaaaaaatggctttcgctacctggagagacgcgcccgctgatcctttgcgaatacgcccacgcgatgggtaacagtcttggcggtttcgctaaatactggcaggcgtttcgtcagtatccccgtttacagggcggcttcgtctgggactgggtggatcagtcgctgattaaatatgatgaaaacggcaacccgtggtcggcttacggcggtgattttggcgatacgccgaacgatcgccagttctgtatgaacggtctggtctttgccgaccgcacgccgcatccagcgctgacggaagcaaaacaccagcagcagtttttccagttccgtttatccgggcaaaccatcgaagtgaccagcgaatacctgttccgtcatagcgataacgagctcctgcactggatggtggcgctggatggtaagccgctggcaagcggtgaagtgcctctggatgtcgctccacaaggtaaacagttgattgaactgcctgaactaccgcagccggagagcgccgggcaactctggctcacagtacgcgtagtgcaaccgaacgcgaccgcatggtcagaagccgggcacatcagcgcctggcagcagtggcgtctggcggaaaacctcagtgtgacgctccccgccgcgtcccacgccatcccgcatctgaccaccagcgaaatggatttttgcatcgagctgggtaataagcgttggcaatttaaccgccagtcaggctttctttcacagatgtggattggcgataaaaaacaactgctgacgccgctgcgcgatcagttcacccgtgcaccgctggataacgacattggcgtaagtgaagcgacccgcattgaccctaacgcctgggtcgaacgctggaaggcggcgggccattaccaggccgaagcagcgttgttgcagtgcacggcagatacacttgctgatgcggtgctgattacgaccgctcacgcgtggcagcatcaggggaaaaccttatttatcagccggaaaacctaccggattgatggtagtggtcaaatggcgattaccgttgatgttgaagtggcgagcgatacaccgcatccggcgcggattggcctgaactgccagctggcgcaggtagcagagcgggtaaactggctcggattagggccgcaagaaaactatcccgaccgccttactgccgcctgttttgaccgctgggatctgccattgtcagacatgtataccccgtacgtcttcccgagcgaaaacggtctgcgctgcgggacgcgcgaattgaattatggcccacaccagtggcgcggcgacttccagttcaacatcagccgctacagtcaacagcaactgatggaaaccagccatcgccatctgctgcacgcggaagaaggcacatggctgaatatcgacggtttccatatggggattggtggcgacgactcctggagcccgtcagtatcggcggaattccagctgagcgccggtcgctaccattaccagttggtctggtgtcaaaaataataataaccgggcaggggggatccaattctgtgagcgtatggcaaacgaaggaaaaatagttatagtagccgcactcgatgggacatttcaacgtaaaccgtttaataatattttgaatcttattccattatctgaaatggtggtaaaactaactgctgtgtgtatgaaatgctttaaggaggcttccttttctaaacgattgggtgaggaaaccgagatagaaataataggaggtaatgatatgtatcaatcggtgtgtagaaagtgttacatcgactcataatattatattttttatctaaaaaactaaaaataaacattgattaaattttaatataatacttaaaaatggatgttgtgtcgttagataaaccgtttatgtattttgaggaaattgataatgagttagattacgaaccagaaagtgcaaatgaggtcgcaaaaaaactgccgtatcaaggacagttaaaactattactaggagaattattttttcttagtaagttacagcgacacggtatattagatggtgccaccgtagtgtatataggatctgctcccggtacacatatacgttatttgagagatcatttctataatttaggagtgatcatcaaatggatgctaattgacggccgccatcatgatcctattttaaatggattgcgtgatgtgactctagtgactcggttcgttgatgaggaatatctacgatccatcaaaaaacaactgcatccttctaagattattttaatttctgatgtgagatccaaacgaggaggaaatgaacctagtacggcggatttactaagtaattacgctctacaaaatgtcatgattagtattttaaaccccgtggcgtctagtcttaaatggagatgcccgtttccagatcaatggatcaaggacttttatatcccacacggtaataaaatgttacaaccttttgctccttcatattcagctgaaatgagattattaagtatttataccggtgagaacatgagactgactcgagttaccaaattagacgctgtaaattatgaaaaaaagatgtactaccttaataagatcgtccgtaacaaagtagttgttaactttgattatcctaatcaggaatatgactattttcacatgtactttatgctgaggaccgtgtactgcaataaaacatttcctactactaaagcaaaggtactatttctacaacaatctatatttcgtttcttaaatattccaacaacatcaactgaaaaagttagtcatgaaccaatacaacgtaaaatatctagcaaaaattctatgtctaaaaacagaaatagcaagagatccgtacgcggtaataaatagaaacgtactactgagatatactaccgatatagagtataatgatttagttactttaataaccgttagacataaaattgattctatgaaaactgtgtttcaggtatttaacgaatcatccataaattatactccggttgatgatgattatggagaaccaatcattataacatcgtatcttcaaaaaggtcataacaagtttcctgtaaattttctatacatagatgtggtaatatctgacttatttcctagctttgttagactagatactacagaaactaatatagttaatagtgtactacaaacaggcgatggtaaaaagactcttcgtcttcccaaaatgttagagacggaaatagttgtcaagattctctatcgccctaatataccattaaaaattgttagatttttccgcaataacatggtaactggagtagagatagccgatagatctgttatttcagtcgctgattaatcaattagtagagatgagataagaacattataataatcaataatatatcttatatcttatatcttatatcttatatcttgtttagaaaaatgctaatattaaaatagctaacgctagtaatccaatcggaagccatttgatatctataatagggtatctaatttcctgatttaaatagcggacagctatattctcggtagctactcgtttggaatcacaaacattatttacatctaatttactatctgtaatggaaacgtttcccaatgaaatggtacaatccgatacattgcattttgttatatttttttttaaagaggctggtaacaacgcatcgcttcgtttacatggctcgtaccaacaataatagggtaatcttgtatctattcctatccgtactatgcttttatcaggataaatacatttacatcgtatatcgtctttgttagcatcacagaatgcataaatttgttcgtccgtcatgataaaaatttaaagtgtaaatataactattatttttatagttgtaataaaaagggaaatttgattgtatactttcggttctttaaaagaaactgacttgataaaaatggctgtaatctctaaggttacgtatagtctatatgatcaaaaagagattaatgctacagatattatcattagtcatgttaaaaatgacgacgatatcggtaccgttaaagatggtagactaggtgctatggatggggcattatgtaagacttgtgggaaaacggaattggaatgtttcggtcactggggtaaagtaagtatttataaaactcatatagttaagcctgaatttatttcagaaattattcgtttactgaatcatatatgtattcactgcggattattgcgttcacgagaaccgtattccgacgatattaacctaaaagagttatcgggacacgctcttaggagattaaaggataaaatattatccaagaaaaagtcatgttggaacagtgaatgtatgcaaccgtatcaaaaaattactttttcaaagaaaaaggtttgtttcgtcaacaagttggatgatattaacgttcctaattctctcatctatcaaaagttaatttctattcatgaaaagttttggccattattagaaattcatcaatatccagctaacttattttatacagactactttcccatccctccgttgattattagaccggctattagtttttggatagatagtatacccaaagagaccaatgaattaacttacttattaggtatgatcgttaagaattgtaacttgaatgctgatgaacaggttatccagaaggcggtaatagaatacgatgatattaaaattatttctaataacactaccagtatcaatttatcatatattacatccggcaaaaataatatgattagaagttatatcgtcgcccgacgaaaagatcagaccgctagatctgtaattggtcccagtacatctatcaccgttaatgaggtaggaatgcccgcatatattagaaatacacttacagaaaagatatttgttaatgcctttacagtggataaagttaaacaactattagcgtcaaaccaagttaaattttactttaataaacgattaaaccaattaacaagaatacgccaaggaaagtttattaaaaataaaatacatttattgcctggtgattgggtagaagtagctgttcaagaatatacaagtattatttttggaagacagccgtctctacatagatacaacgtcatcgcttcatctatcagagctaccgaaggagatactatcaaaatatctcccggaattgccaactctcaaaatgctgatttcgacggggatgaggaatggatgatattagaacaaaatcctaaagctgtaattgaacaaagtattcttatgtatccgacgacgttactcaaacacgatattcatggagcccccgtttatggatctattcaagatgaaatcgtagcagcgtattcattgtttaggatacaagatctttgtttagatgaagtattgaacatcttggggaaatatggaagagagttcgatcctaaaggtaaatgtaaattcagcggtaaagatatctatacttacttgataggtgaaaagattaattatccgggtctcttaaaggatggtgaaattattgcaaacgacgtagatagtaattttgttgtggctatgaggcatctgtcattggctggactcttatccgatcataagtcgaacgtggaaggtatcaactttattatcaagtcatcttatgtttttaagagatatctatctatttacggttttggggtgacattcaaagatctgagaccaaattcgacgttcactaataaattggaggccatcaacgtagaaaaaatagaacttatcaaagaagcatacgccaaatatctcaacgatgtaagagacgggaaaatagttccattatctaaagctttagaggcggactatgtggaatccatgttatccaacttgacaaatcttaatatccgagagatagaagaacatatgagacaaacgctgatagatgatccagataataacctcctgaaaatggccaaagcgggttataaagtaaatcccacagaactaatgtatattctaggtacgtatggacaacaaaggattgatggtgaaccagcagagactcgagtattgggtagagttttaccttactatcttccagactctaaggatccagaaggaagaggttacattcttaattctttaacaaaaggattaacgggttctcaatattacttttcgatgctggttgccagatctcaatctactgatatcgtctgtgaaacatcacgtaccggaacactggctagaaaaatcattaaaaagatggaggatatggtggtcgacggatacggacaagtagttataggtaatacgctcatcaagtacgccgccaattataccaaaattctaggctcagtatgtaaacctgtagatcttatctatccagatgagtccatgacttggtatttggaaattagtgctctgtggaataaaataaaacagggattcgtttactctcagaaacagaaacttgcaaagaagacattggcgccgtttaatttcctagtattcgtcaaacccaccactgaggataatgctattaaggttaaggatctgtacgatatgattcataacgtcattgatgatgtgagagagaaatacttctttacggtatctaatatagattttatggagtatatattcttgacgcatcttaatccttctagaattagaattacaaaagaaacggctatcactatctttgaaaagttctatgaaaaactcaattatactctaggtggtggaactcctattggaattatttctgcacaggtattgtctgagaagtttacacaacaagccctgtccagttttcacactactgaaaaaagtggtgccgtcaaacaaaaacttggtttcaacgagtttaataacttgactaatttgagtaagaataagaccgaaattatcactctggtatccgatgatatctctaaacttcaatctgttaagattaatttcgaatttgtatgtttgggagaattaaatccaaacatcactcttcgaaaagaaacagataaatatgtagtagatataatagtcaatagattatacatcaagagagcagaaataaccgaattagtcgtcgaatatatgattgaacgatttatctcctttagcgtcattgtaaaggaatggggtatggagacattcattgaggacgaggataatattagatttactgtctacctaaatttcgttgaaccggaagaattgaatcttagtaagtttatgatggttcttccgggggcagccaacaagggaaagattagtaaattcaagattcctatctctgattatacgggatatgacgacttcaatcaaacaaaaaagctcaataagatgactgtagaactcatgaatctaaaagaattgggttctttcgatttggaaaacgtcaacgtgtatcctggagtatggaatacatacgatatcttcggtatcgaggccgctcgtgaatacttgtgcgaagccatgttaaacacctatggagaagggttcgattatctgtatcagccttgtgatcttctcgctagtttactatgtgctagttacgaaccagaatcagtgaataaattcaagttcggcgcagctagtactcttaagagagctacgttcggagacaataaagcattgttaaacgcggctcttcataaaaagtcagaacctattaacgataatagtagctgccacttttttagcaaggtccctaatataggaactggatattacaaatactttatcgacttgggtcttctcatgagaatggaaaggaaactatctgataagatatcttctcaaaagatcaaggaaatggaagaaacagaagacttttaattcttatcaataacatatttttctatgatctgtcttttaaacgatggattttccacaaatgcgcctctcaagtccctcatagaatgatacacgtataaaaaatatagcataggcaatgactccttatttttagacattagatatgccaaaatcatagccccgcttctatttactcccgcagcacaatgaaccaacacgggctcgtttcgttgatcacatttagataaaaaggcggttacgtcgtcaaaatatttactaatatcggtagttgtatcatctaccaacggtatatgaataatattaatattagagttaggtaatgtatatttatccatcgtcaaatttaaaacatatttgaacttaacttcagatgatggtgcatccatagcatttttataatttcccaaatacacattattggttacccttgtcattatagtgggagatttggctttgtgcatatctccagttgaacgtagtagtaagtatttatacaaacttttcttatccatttataacgtacaaatggataaaactactttatcggtaaacgcgtgtaatttagaatacgttagagaaaaggctatagtaggcgtacaagcagccaaaacatcaacacttatattctttgttattatattggcaattagtgcgctattactctggtttcagacgtctgataatccagtctttaatgaattaacgagatatatgcgaattaaaaatacggttaacgattggaaatcattaacggatagcaaaacaaaattagaaagtgatagaggtagacttctagccgctggtaaggatgatatatttgaattcaaatgtgtggatttcggcgcctattttatagctatgcgattggataagaaaacatatctgccgcaagctattaggcgaggtactggagacgcgtggatggttaaaaaggcggcaaaggtcgatccatctgctcaacaattttgtcagtatttgataaaacacaagtctaataatgttattacttgtggtaatgagatgttaaatgaattaggttatagcggttattttatgtcaccgcattggtgttccgattttagtaatatggaatagtgttagataaatgcggtaacgaatgttcctgtaaggaaccataacagcttagatttaacgttaaagatgagcataaacataataaacaaaattacaatcaaacttataacattaatatcaaacaatccaaaaaatgaaatcagtggagtagtaaacgcgtacataactcctggataacgtttagcagctgccgttcctattctagaccaaaaattcggtttcatgttttcgaaacggtattctgcaacaagtcgaggatcgtgttctacatatttggcggcattatccagtatctgcctattgatcttcatttcgttttcgattctggctatttcaaaataaaatcccgatgatagacctccagactttataatttcatctacgatgttcagcgccgtagtaactctaataatataggctgataagctaacatcataccctcctgtatatgtgaatatggcatgatttttgtccattacaagctcggttttaactttattgcctgtaataatttctctcatctgtaggatatctatttttttgtcatgcattgccttcaagacgggacgaagaaacgtaatatcctcaataacgttatcgttttctacaataactacatattctacctttttattttctaactcggtaaaaaaattagaatcccatagggctaaatgtctagcgatatttcttttcgtttcctctgtacacatagtgttacaaaaccctgaaaagaagtgagtatacttgtcatcatttctaatgtttcctccagtccactgtataaacgcataatccttgtaatgatctggatcatccttgactaccacaacatttcttttttctggcataacttcgttgtcctttacatcatcgaacttctgatcattaatatgctcatgaacattaggaaatgtttctgatggaggtctatcaataactggcacaacaataacaggagttttcaccgccgccatttagttattgaaattaatcatatacaactctttaatacgagttatattttcgtctatccattgtttcacattgacatatttcgacaaaaagatataaaatgcgtattccaatgcttctctgtttaatgaattactaaaatatacaaacacgtcactgtctggcaataaatgatatcttagaatattgtaacaatttattttgtattgcacatgttcgtgatctatgagttcttcttcgaatggcataggatctccgaatctgaaaacgtataaataggagttagaataataatatttgagagtattggtaatatataaactctttagcggtataattagtttttttctctcaatttctatttttagatgtgatggaaaaatgactaattttgtagcattagtatcatgaactctaatcaaaatcttaatatcttcgtcacacgttagctctttgaagtttttaagagatgcatcagttggttctacagatggagtaggtgcaacaattttttgttctacacatgtatgtactggagccattgttttaactataatggtgcttgtatcgaaaaactttaatgcagatagcggaagctcttcgccgcgactttctacgtcgtaattgggttctaacgccgatctctgaatggatactagttttctaagttctaatgtgattctctgaaaatgtaaatccaattcctccggcattatagatgtgtatacatcggtaaataaaactatagtatccaacgatcccttctcgcaaattctagtcttaaccaaaaaatcgtatataaccacggagatggcgtatttaagagtggattcttctaccgttttgttcttggatgtcatataggaaactataaagtccgcactactgttaagaatgattactaacgcaactatatagtttaaattaagcattttggaaacataaaataactctgtagacgatacttgactttcgaataagtttgcagacaaacgaagaaagaacagacctctcttaatttcagaagaaaactttttttcgtattcctgacgtctagagtttatatcaataagaaagttaagaattagtcggttaatgttgtatttcattacccaagtttgagatttcataatattatcaaaagacatgataatattaaagataaagcgctgactatgaacgaaatagctatatggttcgctcaagaatatagtcttgttaaacgtggaaacgataactgtatttttaatcacgtcagcggcatctaaattaaatataggtatatttattccacacactctacaatatgccacaccatcttcataataaataaattcgttagcaaaattattaattttagtgaaatagttagcgtcaactttcatagcttccttcaatctaatttgatgctcacacggtgcgaattccactctaacatcccttttccatgcctcaggttcatcgatctctataatatctagttttttgcgtttcacaaacacaggctcgtctctcgcgatgagatctgtatagtaactatgtaaatgataactagatagaaagatgtagctatatagatgacgatcctttaagagaggtataataactttaccccaatcagatagactgttgttatggtcttcggaaaaagaatttttataaatttttccagtattttccaaatatacgtacttaacatctaaaaaatccttaatgataataggaatggataatccgtctattttataaagaaatacatatcgcacattatacttttttttggaaatgggaataccgatgtgtctacataaatatgcaaagtctaaatattttttagagaatcttagttggtccaaattcttttccaagtacggtaatagatttttcatattgaacggtatcttcttaatctctggttctagttccgcattaaatgatgaaactaagtcactatttttataactaacgattacatcacctctaacatcatcatttaccagaatactgatcttcttttgtcgtaaatacatgtctaatgtgttaaaaaaaagatcatacaagttatacgtcatttcatctgtggtattcttgtcattgaaggataaactcgtactaatctcttctttaacagcctgttcaaatttatatcctatatacgaaaaaatagcaaccagtgtttgatcatccgcgtcaatattctgttctatcgtagtgtataacaatcgtatatcttcttctgtgatagtcgatacgttataaaggttgataacgaaaatatttttatttcgtgaaataaagtcatcgtaggattttggacttatattcgcgtctagtagatatgcttttatttttggaatgatctcaattagaatagtctctttagagtccatttaaagttacaaacaactaggaaattggtttatgatgtataatttttttagtttttatagattctttattctatacttaaaaaatgaaaataaatacaaaggttcttgagggttgtgttaaattgaaagcgagaaataatcataaattatttcattatcgcgatatccgttaagtttgtatcgtaatggcgtggtcaattacgaataaagcggatactagtagcttcacaaagatggctgaaatcagagctcatctaaaaaatagcgctgaaaataaagataaaaacgaggatattttcccggaagatgtaataattccatctactaagcccaaaaccaaacgagccactactcctcgtaaaccagcggctactaaaagatcaaccaaaaaggaggaagtggaagaagaagtagttatagaggaatatcatcaaacaactgaaaaaaattctccatctcctggagtcagcgacattgtagaaagcgtggccgctgtagagctcgatgatagcgacggggatgatgaacctatggtacaagttgaagctggtaaagtaaatcatagtgctagaagcgatctctctgacctaaaggtggctaccgacaatatcgttaaagatcttaagaaaattattactagaatctctgcagtatcgacggttctagaggatgttcaagcagctggtatctctagacaatttacttctatgactaaagctattacaacactatctgatctagtcaccgagggaaaatctaaagttgttcgtaaaaaagttaaaacttgtaagaagtaaatgcgtgcacttttttataaagatggtaaactctttaccgataataattttttaaatcctgtatcagacgataatccagcgtatgaggttttgcaacatgttaaaattcctactcatttaacagatgtagtagtatatgaacaaacgtgggaggaggcgttaactagattaatttttgtgggaagtgattcaaaaggacgtagacaatacttttacggaaaaatgcatgtacagaatcgcaacgctaaaagagatcgtatttttgttagagtatataacgttatgaaacgaattaattgttttataaacaaaaatataaagaaatcgtccacagattccaattatcagttggcggtttttatgttaatggaaactatgttttttattagatttggtaaaatgaaatatcttaaggagaatgaaacagtagggttattaacactaaaaaataaacacatagaaataagtcccgatgaaatagttatcaagtttgtaggaaaggacaaagtttcacatgaatttgttgttcataagtctaatagactatataaaccgctattgaaactgacggatgattctagtcccgaagaatttctgttcaacaaactaagtgaacgaaaggtatacgaatgtatcaaacagtttggtattagaatcaaggatctccgaacgtatggagtcaattatacgtttttatataatttttggacaaatgtaaagtccatatctcctcttccgtcaccaaaaaagttaatagcattaactatcaaacaaactgctgaagtggtaggtcatactccatcaatttcaaaaagagcttatatggcaacgactattttagaaatggtaaaggataaaaattttttagatgtagtatctaaaactacgttcgatgaattcctatctatagtcgtagatcacgttaaatcatctacggatggatgatatagatctttacacaaataattacaagaccgataaatggaaatggataagcgtatgaaatctctcgcaatgacagctttcttcggagagctaagcacattagatattatggcattgataatgtctatatttaaacgccatccaaacaataccattttttcagtggataaggatggtcagtttatgattgatttcgaatacgataattataaggcttctcaatatttggatctgaccctcactccgatatctggagatgaatgcaagactcacgcatcgagtatagccgaacaattggcgtgtgcggatattattaaagaggatattagcgaatatatcaaaactactccccgtcttaaacgatttataaaaaaataccgcaatagatcagatactcgtatcagtcgagatacagaaaagcttaaaatagctctagctaaaggcatagattacgaatatataaaagacgcttgttaataagtaaatgaaaaaaaactagtcgtttataataaaacacgatatggatgccaacgtagtatcattttctactattgcgacgtatatagacgctttagcgaagaatgcttcggaattagaacagaggtctaccgcatacgaaataaataatgaattggaactagtatttattaagccgccattgattactttgacaaatgtagtgaatatctctacgattcaggaatcgtttattcgatttaccgttactaataaggaaggtgttaaaattagaactaagattccattatctaaggtacatggtctagatgtaaaaaatgtacagttagtagatgctatagataacatagtttgggaaaagaaatcattagtgacggaaaatcgtcttcacaaagaatgcttgttgagactatcgacagaggaacgtcatatatttttggattacaagaaatatggatcctctatccgactagaattagtcaatcttattcaagcaaaaacaaaaaactttacgatagactttaagctaaaatattttctaggatccggtgcccagtctaaaagttctttgttgcacgctattaatcatccaaagtcaaggcctaatacatctctggaaatagaattcacacctagagacaatgaaacagttccatatgatgaactaataaaggaattgacgactctctcgcgtcatatatttatggcttctccagagaatgtaattctttctccgcctattaacgcgcctataaaaacctttatgttgcctaaacaagatatagtaggtttggatctggaaaatctatatgccgtaactaagactgacggcattcctataactatcagagttacatcaaacgggttgtattgttattttacacatcttggttatattattagatatcctgttaagagaataatagattccgaagtagtagtctttggtgaggcagttaaggataagaactggaccgtatatctcattaagctaatagagcctgtgaatgcaatcaatgatagactagaagaaagtaagtatgttgaatctaaactagtggatatttgtgatcggatagtattcaagtcaaagaaatacgaaggtccgtttactacaactagtgaagtcgtcgatatgttatctacatatttaccaaagcaaccagaaggtgttattctgttctattcaaagggacctaaatctaacattgattttaaaattaaaaaggaaaatactatagaccaaactgcaaatgtagtatttaggtacatgtccagtgaaccaattatctttggagaatcgtctatctttgtagagtataagaaatttagcaacgataaaggctttcctaaagaatatggttctggtaagattgtgttatataacggcgttaattatctaaataatatctattgtttggaatatattaatacacataatgaagtgggtattaagtccgtggttgtacctattaagtttatagcagaattcttagttaatggagaaatacttaaacctagaattgataaaaccatgaaatatattaactcagaagattattatggaaatcaacataatatcatagtcgaacatttaagagatcaaagcatcaaaataggagatatctttaacgaggataaactatcggatgtgggacatcaatacgccaataatgataaatttagattaaatccagaagttagttattttacgaataaacgaactagaggaccgttgggaattttatcaaactacgtcaagactcttcttatttctatgtattgttccaaaacatttttagacgattccaacaaacgaaaggtattggcgattgattttggaaacggtgctgacctggaaaaatacttttatggagagattgcgttattggtagcgacggatccggatgctgatgctatagctagaggaaatgaaagatacaacaaattaaactctggaattaaaaccaagtactacaaatttgactacattcaggaaactattcgatccgatacatttgtctctagtgtcagagaagtattctattttggaaagtttaatatcatcgactggcagtttgctatccattattcttttcatccgagacattatgctaccgtcatgaataacttatccgaactaactgcttctggaggcaaggtattaatcactaccatggacggagacaaattatcaaaattaacagataaaaagacttttataattcataagaatttacctagtagcgaaaactatatgtctgtagaaaaaatagctgatgatagaatagtggtatataatccatcaacaatgtctactccaatgactgaatacattatcaaaaagaacgatatagtcagagtgtttaacgaatacggatttgttcttgtagataacgttgatttcgctacaattatagaacgaagtaaaaagtttattaatggcgcatctacaatggaagatagaccgtctacaaaaaactttttcgaactaaatagaggagccattaaatgtgaaggtttagatgtcgaagacttacttagttactatgttgtttatgtcttttctaagcggtaaataataatatggtatgggttctgatctcccagttctaaatgcattaaataattccaatagagcgatttttgttcctataggaccttccaactgtggatactctgtattgttaatagatatattaatacttttgtcgggtaacagaggttctacgtcttctaaaaataaaagttttataacatctggcctgttcataaataaaaacttggcgattctatatatactcttattatcaaatctagccattgtcttatagatgtgagctactgtaggtgtaccatttgattttctttctaatactatatatttctctcgaagaagttcttgcacatcatctgggaataaaatactactgttgagtaaatcagttattttttttatatcgatattgatggacatttttatagttaaggataataagtatcccaaagtcgataacgacgataacgaagtatttatacttttaggaaatcacaatgactttatcagattaaaattaacaaaattaaaggagcatgtatttttttctgaatatattgtgactccagatacatatggatctttatgcgtcgaattaaatgggtctagttttcagcacggcggtagatatatagaggtggaggaatttatagatgctggaagacaagttagatggtgttctacatccaatcatatatctaaagatatacccgaagatatgcacactgataaatttgtcatttatgatatttatacgtttgattcgttcaagaataaacgattggtattcgtacaggtacctccgtcgttaggagatgatagtcatttgactaatccgttattgtcaccgtattatcgtaattcagtagccagacaaatggtcaatgatatgatttttaatcaagattcatttttaaaatatttattagaacatctgattagaagccactatagagtttctaaacatataacaatagttagatacaaggataccgaagaattaaatctaacgagaatatgttataatagagataagtttaaggcgtttgtattcgcttggtttaacggcgtttcggaaaatgaaaaggtactagatacgtataaaaaggtatctaatttgatataatgaattcagtgactgtatcacacgcgccatatactattacttatcacgatgattgggaaccagtaatgagtcaattggtagagttttataacgaagtagccagttggctgctacgagacgagacgtcgcctattcctgataagttctttatacagttgaaacaaccgcttagaaataaacgagtatgtgtgtgtggtatagatccgtatccgaaagatggaactggtgtaccgttcgaatcaccaaattttacaaaaaaatcaattaaggagatagcttcatctatatctagattaaccggagtaattgattataaaggttataaccttaatataatagacggggttataccctggaattattacttaagttgtaaattaggagaaacaaaaagtcacgcgatttactgggataagatttccaagttactgctgcagcatataactaaacacgttagtgttctttattgtttgggtaaaacagatttctcgaatatacgggccaagttagaatccccggtaactaccatagtcggatatcatccagcggctagagaccgccaattcgagaaagatagatcatttgaaattatcaacgttttactggaattagacaacaaggcacctataaattgggctcaagggtttatttattaatgctttagtgaaattttaacttgtgttctaaatggatgcggctattagaggtaatgatgttatctttgttcttaagactataggtgtcccgtcagcgtgcagacaaaatgaagatccaagatttgtagaagcatttaaatgcgacgagttagaaagatatattgagaataatccagaatgtacactattcgaaagtcttagggatgaggaagcatactctatagtcagaattttcatggatgtagatttagacgcgtgtctagacgaaatagattatttaacggccattcaagattttattatcgaggtgtcaaactgtgtagctagattcgcgtttacagaatgcggcgccattcatgaaaatgtaataaaatccatgagatctaatttttcattgactaagtctacaaatagagataaaacaagttttcatattatctttttagatacgtataccactatggatacattgatagctatgaaacgaacactattagaattaagtagatcatctgaaaatccactaaccagatcgatagacactgccgtatataggagaaaaacaactcttcgggttgtaggtactaggaaaaatccaaattgcgacactattcatgtaatgcaaccaccgcatgataatatagaagattacctattcacttacgtggatatgaacaacaatagttattacttttctctacaacaacgattggaggatttagttcctgataagttatgggaaccagggtttatttcattcgaagacgctataaaaagagtttcaaaaatattcattaattctataataaactttaatgatctcgatgaaaataattttacaacggtaccactggtcatagattacgtaacaccttgtgcattatgtaaaaaacgatcgcataaacatccgcatcaactatcgttggaaaatggtgctattagaatttacaaaactggtaatccacatagttgtaaagttaaaattgttccgttggatggtaataaactgtttaatattgcacaaagaattttagacactaactctgttttattaaccgaacgaggagaccatatagtttggattaataattcatggaaatttaacagcgaagaacccttgataacaaaactaattttgtcaataagacatcaactacctaaggaatattcaagcgaattactctgtccaagaaaacgaaagactgtagaagctaacatacgagacatgttagtagattcagtggagaccgatacctatccggataaacttccgtttaaaaatggtgtattggacctggtagacggaatgttttactctggagatgatgctaaaaaatatacgtgtactgtatcaaccggatttaaatttgacgatacaaagttcgtcgaagacagtccagaaatggaagagttaatgaatatcattaacgatatccaaccattaacggatgaaaataagaaaaatagagagctatatgaaaaaacattatctagttgtttatgcggtgctaccaaaggatgtttaacattcttttttggagaaactgcaactggaaagtcgacaaccaaacgtttgttaaagtctgctatcggtgacctgtttgttgagacgggtcaaacaattttaacagatgtattggataaaggacctaatccatttatcgctaacatgcatttgaaaagatctgtattctgtagcgaactacctgattttgcctgtagtggatcaaagaaaattagatctgacaatattaaaaagttgacagaaccttgtgtcattggaagaccgtgtttctccaataaaattaataatagaaaccatgcgacaatcattatcgatactaattacaaacctgtttttgataggatagataacgcattaatgagaagaattgccgtcgtgcgattcagaacacacttttctcaaccttctggtagagaggctgctgaaaataatgacgcgtacgataaagtcaaactattagacgaggggttagatggtaaaatacaaaataatatatatagatttgcatttctatacttgttggtgaaatggtacaaaaaatatcatgttcctattatgaaactatatcctacacccgaagagattcctgactttgcattctatctcaaaataggtactctgttggtatctagctctgtaaagcatattccattaatgacggacctctccaaaaagggatatatattgtacgataatgtggtcactcttccgttgactactttccaacagaaaatatccaagtattttaattctagactatttggacacgatatagagagcttcatcaatagacataagaaatttgccaatgttagtgatgaatatctgcaatatatattcatagaggatatttcatctccgtaaatatatgctcatatatttatagaagatatcacatatctaaatgaataccggaatcatagatttatttgataatcatgttgatagtataccaactatattacctcatcagttagctactctagattatctagttagaactatcatagatgagaacagaagcgtgttattgttccatattatgggatcaggtaaaacaataatcgctttgttgttcgccttggtagcttccagatttaaaaaggtttacattctagtgccgaacatcaacatcttaaaaattttcaattataatatgggtgtagctatgaacttgtttaatgacgaattcatagctgagaatatctttattcattccacaacaagtttttattctcttaattataacgataacgtcattaattataacggattatctcgctacaataactctatttttatcgttgatgaggcacataatatctttgggaataatactggagaacttatgaccgtgataaaaaataaaaacaagattccttttttactattgtctggatctcccattactaacacacctaatactctgggtcatattatagatttaatgtccgaagagacgatagattttggtgaaattattagtcgtggtaagaaagtaattcagacacttcttaacgaacgcggtgtgaatgtacttaaggatttgcttaaaggaagaatatcatattacgaaatgcctgataaagatctaccaacgataagatatcacggacgtaagtttctagatactagagtagtatattgtcacatgtctaaacttcaagagagagattatatgattactagacgacagctatgttatcatgaaatgtttgataaaaatatgtataacgtgtcaatggcagtattgggacaacttaatctgatgaataatttagatactttatttcaggaacaggataaggaattgtacccaaatctgaaaataaataatggcgtgttatacggagaagaattggtaacgttaaacattagttccaaatttaaatactttattaatcggatacagacactcaacggaaaacattttatatacttttctaattctacatatggcggattggtaattaaatatatcatgctcagtaatggatattctgaatataatggttctcagggaactaatccacatatgataaacggcaaaccaaaaacatttgctatcgttactagtaaaatgaaatcgtctttagaggatctattagatgtgtataattctcctgaaaacgatgatggtagtcaattgatgtttttgttttcatcaaacattatgtccgaatcctatactctaaaagaggtaaggcatatttggtttatgactatcccagatactttttctcaatacaaccaaattcttggacgatctattagaaaattctcttacgccgatatttctgaaccagttaatgtatatcttttagccgccgtatattccgatttcaatgacgaagtgacgtcattaaacgattacacacaggatgaattaattaatgttttaccatttgacatcaaaaagctgttgtatctaaaatttaagacgaaagaaacgaatagaatatactctattcttcaagagatgtctgaaacgtattctcttccaccacatccatcaattgtaaaagttttattgggagaattggtcagacaatttttttataataattctcgtattaagtataacgataccaagttacttaaaatggttacatcagttataaaaaataaagaagacgctaggaattacatagatgatattgtaaacggtcacttctttgtatcgaataaagtatttgataaatctcttttatacaaatacgaaaacgatattattacagtaccgtttagactttcctacgaaccatttgtttggggagttaactttcgtaaagaatataacgtggtatcttctccataaaactgatgagatatataaagaaataaatgtcgagctttgttaccaatggatacctttccgttacattggaaccacacgagctgacgttagacataaaaactaatattaggaatgccgtatataagacgtatctccatagagaaattagtggtaaaatggccaagaaaatagaaattcgtgaagacgtggaattacctctcggcgaaatagttaataattctgtagttataaacgttccgtgtgtaataacctacgcgtattatcacgttggggatatagtcagaggaacattaaacatcgaagatgaatcaaatgtaactattcaatgtggagatttaatctgtaaactaagtagagattcgggtactgtatcatttagcgattcaaagtactgcttttttcgaaatggtaatgcgtatgacaatggcagcgaagtcactgccgttctaatggaggctcaacaaggtatcgaatctagttttgtttttctcgcgaatatcgtcgactcataaaaaagagaatagcggtaagtataaacacgaatactatggcaataattgcgaatgttttattctcttcgatatatttttgataatatgaaaaacatgtctctctcaaatcggacaaccatctcataaaatagttctcgcgcgctggagaggtagttgccgctcgtataatctctccagaataatatacttgcgtgtcgtcgttcaatttatacggatttctatagttctctgttatataatgcggtttgccctcatgattagacgacgacaatagtgttctaaatttagatagttgatcagaatgaatgtttattggcgttggaaaaattatccatacagcgtctgcagagtggttgatagttgttcctagatatgtaaaataatccaacttactaggcagcaaattgtctagataaaatactgaatcaaacggtgcagacgtattggcggatctaatggaatccaattgattaactatcttttgaaaatatacatttttatgatccaatacttgtaagaatatagaaataatgataagtccatcatcgtgtttttttgcctcttcataagaactatattttttcttattccaatgaacaagattaatctctccagagtatttgtacacatctatcaagtgattggatccataatcgtcttcctttccccaatatatatgtagtgatgataacacatattcattggggagaaaccctccacttatatatcctcctttaaaattaatccttactagttttccagtgttctggatagtggttggtttcgactcattataatgtatgtctaacggcttcaatcgcgcgttagaaattgcttttttagtttctatattaataggagatagttgttgcggcatagtaaaaatgaaatgataactgtttaaaaatagctcttagtatgggaattacaatggatgaggaagtgatatttgaaactcctagagaattaatatctattaaacgaataaaagatattccaagatcaaaagacacgcatgtgtttgctgcgtgtataacaagtgacggatatccgttaataggagctagaagaacttcattcgcgttccaggcgatattatctcaacaaaattcagattctatctttagagtatccactaaactattacggtttatgtactacaatgaactaagagaaatctttagacggttgagaaaaggttctatcaacaatatcgatcctcactttgaagagttaatattattgggtggtaaactagataaaaaggaatctattaaagattgtttaagaagagaattaaaagaggaaagtgatgaacgtataacagtaaaagaatttggaaatgtaattctaaaacttacaacacgggataaattatttaataaagtatatataagttattgcatggcgtgttttattaatcaatcgttggaggatttatcgcatactagtatttacaatgtagaaattagaaagattaaatcattaaatgattgtattaacgacgataaatacgaatatctgtcttatatttataatatgctagttaatagtaaatgaacttttacagatctagtataattagtcagattattaagtataatagacgactagctaagtctattatttgcgaggatgactctcaaattattacactcacggcattcgttaaccaatgcctatggtgtcataaacgagtatccgtgtccgctattttattaactactgataacaaaatattagtatgtaacagacgagatagttttctctattctgaaataattagaactagaaacatgtttagaaagaaacgattatttctgaattattccaattatttgaacaaacaggaaagaagtatactatcgtcatttttttctctagatccagctactactgataatgatagaatagacgctatttatccgggtggcatacccaaaaggggtgagaatgttccagagtgtttatccagggaaattaaagaagaagttaatatagacaattcttttgtattcatagacactcggttttttattcatggcatcatagaagataccattattaataaattttttgaggtaatcttctttgtcggaagaatatctctaacgagtgatcaaatcattgatacatttaaaagtaatcatgaaatcaaggatctaatatttttagatccgaattcaggtaatggactccaatacgaaattgcaaaatatgctctagatactgcaaaacttaaatgttacggccatagaggatgttattatgaatcattaaaaaaattaactgaggatgattgattaaaaaatataaattaatttaccatcgtgtatttttataacgggattgtccggcatatcatgtagatagttaccgtctacatcgtatactcgaccatctacgcctttaaatcctctatttattgacattaatctattagaattggaataccaaatattagtaccctcaattagtttattggtaatattttttttagacgatagatcgatggctcttgaaaccaaggttttccaaccggactcattgtcgatcggtgagaagtctttttcattagcatgaatccattctaatgatgtatgtttaaacactctaaacaattggacaaattcttttgatttgctttgaatgatttcaaataggtcttcgtctacagtaggcataccattagataatctagccattataaagtgcacgtttacatatctacgttctggaggagtaagaacgtgactattgagacgaatggctcttcctactatctgacgaagagacgcctcgttccatgtcatatctaaaatgaagatatcattaattgagaaaaaactaataccctcgcctccactagaagagaatacgcatgttttaatgcattctccgttagtgtttgattcttggttaaactcagccaccgccttgattctagtatcttttgttctagatgagaactctatattagagataccaaagactttgaaatatagtaataagatttctattcctgactgattaacaaatggttcaaagactagacatttaccatgggatgctaatattcccaaacatacatctataaatttgacgcttttctcttttaattcagtaaatagagagatatcagccgcactagcatcccctttcaatagttctccctttttaaaggtatctaatgcggatttagaaaactctctatctcttaatgaatttttaaaatcattatatagtgttgctatctcttgcgcgtattcgcccggatcacgattttgtctttcaggaaagctatcgaacgtaaacgtagtagccatacgtctcagaattctaaatgatgatatacctgtttttatttcagcgagtttagccttttgataaatttcttcttgctttttcgacatattaacgtatcgcattaatactgttttcttagcgaatgatgcagacccttctacgtcatcaaaaatagaaaactcgttattaactatatacgaacatagtcctcctagtttggagactaattctttttcatcgactagacgtttattctcaaatagcgattggtgttgtaaggatcctggtcgtagtaagttaaccaacatggtgaattcttgcacactattgacgataggtgtagccgataaacaaatcatcttatggttttttaacgcaatggtcttagataaaaaattatatactgaacgagtaggacggatcttaccatcttctttgattaatgatttagaaatgaagttatgacattcatcaataatgacgcatattctactcttggaattaatagttttgatattagtaaaaaatttatttctaaaattttgatcatcgtaattaataaaaatacaatccttcgttatctctggagcgtatctgagtatagtgttcatccaaggatcttctatcaaagcctttttcaccaataagataatagcccaattcgtataaatatccttaagatgtttgagaatatatacagtagtcattgttttaccgacacccgtttcatggaacaataaaagagaatgcatactgtctaatcctaagaaaactcttgctacaaaatgttgataatccttgaggcgtactacgtccgaccccatcatttcaacgggcatattagtagttctgcgtaaggcataatcgatataggccgcgtgtgatttactcatttatgagtgataagtaataactatgttttaaaaatcacagcagtagtttaactagtcttctctgatgtttgttttcgatactttttgaatcagaagtcatactagaataaagcaacgagtgaacgtaatagagagcttcgtatactctattcgaaaactctaagaacttattaatgaattccgtatccactggattgtttaaaatactaaattgaacactgttcacatccttccaagaagaagacttagtgacggacttaacatgagacataaataaatccaaattttttttacaaacatcactagccaccataatggcgctatctttcaaccagctatcgcttacgcattttagcagtctaacatttttaaagagactacaatatattctcatagtatcgattacacctctaccgaataaagttggaagtttaataatacaatatttttcgtttacaaaatcaaataatggtcgaaacacgtcgaaggttaacatcttataatcgctaatgtatagattgttttcagtgagatgattattagatttaatagcatctcgttcacgtttgaacagtttattgcgtgcgctgaggtcggcaactacggcgtccgctttagtactcctcccataatactttacgctattaatctttaaaatttcatagactttatctagatcgctttctggtaacatgatatcatgtgtaaaaagttttaacatgtcggtcggcattctatttagatcattaactctagaaatctgaagaaagtaattagctccgtattccagactaggtaatgggcttttacctagagacagattaagttctggcaatgtttcataaaatggaagaaggacatgcgttccctcccggatattttttacaatttcatccatttacaactctatagtttgttttcattattattagttattatctcccataatcttggtaatacttaccccttgatcgtaagataccttatacaggtcattacatacaactaccaattgtttttgtacataatagattggatggttgacatccatggtggaataaactactcgaacagatagtttatctttccccctagatacattagccgtaatagttgtcggcctaaagaatatctttggtgtaaagttaaaagttagggttcttgttccattattgctttttgtcagtagttcattataaattctcgagatgggtccgttctctgaatatagaacatcatttccaaatctaacttctagtctagaaataatatcggtcttattcttaaaatctattcccttgatgaagggatcgttaatgaacaaatccttggcctttgattcggctgatctattatctccgttatagacgttacgttgactagtccaaagacttacaggaatagatgtatcgatgatgttgatactatgtgatatgtgagcaaagattgttctcttagtggcatcactatatgttccagtaatggcggaaaactttttagaaatgttatatataaaagaattttttcgtgttccaaacattagcagattagtatgaagataaacactcatattatcaggaacattatcaatttttacatacacatcagcatcttgaatagaaacgataccatcttctggaacctctacgatctcggcagactccggataaccagtcggtgggccatcgctaacaataactagatcatccaacaatctactcacatatgcatctatataatctttttcatcttgtgagtaccctggatacgaaataaatttattatccgtatttccataataaggtttagtataaacagagagagatgttgccgcatgaacttcagttacagtcgccgttggttggtttatttgacctattactctcctaggtttctctataaacgatggtttaatttgtacattcttaaccatatatccaataaagctcaattcaggaacataaacaaattctttgttgaacgtttcaaagtcgaacgaagagtcacgaataacgatatcggatactggattgaaggttaccgttacggtaatttttgaatcggatagtttaagactgctgaatgtatcttccacatcaaacggagttttaatataaacgtatactgtagatggttctttaatagtgtcattaggagttaggccaatagaaatatcattaagttcactagaatatccagagtgtttcaaagcaattgtattattgatacaattattatataattcttcgccctcaatttcccaaataacaccgttacacgaagagatagatacgtgattaatacatttatatccaacatatggtacgtaactgaatcttcccatacctttaacttctggaagttccaaactcagaaccaaatgattaagcgcagtaatatactgatccctaatttcgaagctagcgatagcctgattgtctggaccatcgtttgtcataactccggatagagaaatatattgcggcatatacaaagttggaatttgactatcgactgcgaagacattagaccgtttaatagagtcatccccaccgatcaaagaattaatgatagtattattcattttctatttaaaatggaaaaagcttacaataaactccgtagagaaatatctataatttgtgagttttccttaaagtaacagcttccgtaaacgccgtctttatctcttagtaggtttattgtatttatgaccttttccttatcttcatagaatactaaaggcaacaaagaaatttttggttcttctctaagagctacgtgagacttaaccatagaagccaacgaatccctacatattttagaacagaaataccctacttcaccacccttgtatgtctcaatactaataggtctaaaaaccaaatcttgattacaaaaccaacacttatcaattacactatttgtcttaatagacacatctgccatagatttataatactttggtagtatacaagcgagtgcttcttctttagcgggcttaaagactgctttaggtgctgaaataaccacatctggaaggcttactcgcttagccatttaattacggaactatttttttatacttctaatgagcaagtagaaaacctctcatctacaaaaacgtactcgtgtccataatcctctaccatagttacacgttttttagatctcatatgtgctaaaaagttttcccatactaattggttactattatttttcgtataatttttaacagtttgaggttttagatttttagttacagaagtgatatcgaatattttatccaaaaagaatgaataattaattgtcttagaaggagtgttttcttggcaaaagaataccaagtgcttaaatatttctactacttcattaatcttttctgtactcagattcagtttctcatcttttacttgattgattatttcaaagactaacttataatcctttttatttattctctcgttagccttaagaaaactagatacaaaatttgcatctacatcatccgtggatatttgatttttttccatgatatccaagagttccgagataatttctccagaacattgatgagacaataatctccgcaatacatttctcaaatgaataagtttattagacacgtggaagtttgactttttttgtacctttgtacatttttgaaataccgactcgcaaaaaatacaatattcatatccttgttcagatactataccgttatgtctacaaccgctacataatcgtagattcatgttaacactctacgtatctcgtcgtccaatattttatataaaaacattttatttctagacgttgccagaaaatcctgtaatatttttagttttttgggctgtgaataaagtatcgccctaatattgttaccgtcttccgccaatatagtagttaaattatccgcacatgcagaagaacaccgcttaggcggattcagtacaatgttatatttttcgtaccaactcatttaaatatcataatctaaaatagttctgtaatatgtctagcgctaatatattgatcataatcctgtgcataaattaagatacaacaatgtctcgaaatcatcgacatggcttcttccatagttagaagatcgtcgtcaaagttagcaacgtgattcatcaacatttgctgttttgaggcagcaaatactgaaccgtcgccattcaaccattcataaaaaccatcgtctgaatccattgataatttcttgtactggtttttgagagctcgcatcaatctagcatttctagctcccggattgaaaacagaaagaggatcgtacatccagggtccattttctgtaaatagaatcgtataatgtcccttcaagaagatatcagacgatccacaatcaaagaattggtctccgagtttgtaacaaactgcggactttaacctatacatgataccgtttagcataatttctggtgatacgtcaatcggagtatcatctattagagatctaaagccggtgtaacattctccaccaaacatattcttattctgacgtcgttctacataaaacatcattgctccattaacgataacaggggaatgaacagcactacccatcacattagttcccaatggatcaatgtgtgtaactccagaacatcttccatagcctatgttaggaggagcgaacaccactcttccactattgccatcgaatgccatagaataaatatccttggaattgatagaaatcggactgtcggatgttgtgatcatcttcataggattaacaactatgtatggtgccgcctgaagtttcatatcgtaactgatgccgtttataggtctagccacagaaaccaacgtaggtctaaatccaactatagacaaaatagaagccaatatctgttcctcatctgtcataacttgagagcatccagtatgaataatcttcattagatggggatctaccgcatcatcatcgttacaataaaaaattcccattctaatgttcataattgcttttctaatcatggtatgcatgtttgctctctgaatctctgtggaaattagatctgatacacctgtaatcactatcggattatcctccgtaagacgattaaccaacaacatataattataagactttacttttctaaattcataaagttgctggattaggctataggtgtctccatgtacatacgcgttctcgagcgcaggaagtttaataccgaatagtgccatcagaataggatgaatatagtaattagtttctggttttctataaataaaagacaaatcttgtgaactagacatatcggtaaaatgcatggattggaatcgtgtagtcgacagaagaatatgatgattagatggagagtatattttatctaactctttgagttggtcaccgattctaggactagctcgagaatgaataagtactaaaggatgagtacatttcacagaaacactagcattgttcaatgtgctctttacatgggtaaggagttgaaatagctcgtttctatttgttctgacaatatttagtttattcataatgttaagcatatcctgaatagtaaagttagatgtgtcatacttgttagtagttagatatttagcaattgcattcccatcatttctcaatctcgtactccaatcatgcgtggatgctacttcgtcgatggaaaccatacaatcctttttgataggctgttgagattgatcatttcctgcacgtttaggtttggtacgttgatttctagcccctgcggatataaagtcatcgtctacaatttgggacaatgaattgcatacactacaagacaaagatttatcagaagtgtgaatatgatcttcatctaccaaagaaagagtttgattagtataactagattttagtcctgcgttagatgttaaaaaaacatcgctattgaccacggcttccattatttatattcgtagtttttactcgaaagcgtgattttaatatccaatcttattacttttggaatcgttcaaaacctttgactagttgtagaatttgatctattgccctacgcgtatactcccttgcatcatatacgttcgtcaccagatcgtttgtttcggcctgaagttggtgcatatctctttcaacattcgacatgagatccttaagggccatatcgtctagattttgttgagatgctgctcctggatttggattttgttgtgctgttgtacatactgtaccaccagtaggtgtaggagtacatacagtggccacaataggaggttgagaaagtgtaaccgttggagtagtacaagaaatacttccatccgattgttgtgtacatgtagttgttggtaacgtctgagaaggttgggtagatggcggcgtcgtcgttttttgatctttattaaatttagagataatatcctgaacagcattgctcggcgtcaacgctggaaggagtgaactcgccggcgcatcagtatcttcagacagccaatcaaaaagattagacatatcagatgatgtattagtttgttgtcgtggttttggtgtaggagcagtactactaggtagaagaataggagccgatgtagctgttggaaccggctgtggagttatatgaatagttggttgtagcggttggataggctgtctgctggcggccatcatattatctctagctagttgttctcgcaactgtctttgataatacgactcttgagactttagtcctatttcaatcgcttcatcctttttcgtatccggatccttttcttcagaataatagattgacgactttggtgtagaggattctgccagcctctgtgagaacttgttaaagaagtccatttaaggctttaaaattgaattgcgattataagattaaatggcagacacagacgatattatcgactatgaatccgatgatctcaccgaatacgaggatgatgaagaagaggaagaagatggagagtcactagaaactagtgatatagatcccaaatcttcttataagattgtagaatcagcatccactcatatagaagatgcgcattccaatcttaaacatatagggaatcatatatctgctcttaaacgacgctatactagacgtataagtctatttgaaatagcgggtataatagcagaaagctataacttgcttcaacgaggaagattacctctagtttcagaattttctgacgaaacgatgaagcaaaatatgctacatgtaattatacaagagatagaggagggttcttgtcctatagtcatcgaaaagaacggagaattgttgtcggtaaacgattttgacaaagatggtctaaaattccatctagactatattatcaaaatttggaaacttcaaaaacgatattagaatttatacgaatatcgttctctaaatgtcacaatcaagtctcgcatgttcagcaatttattgtcgtactttatatcgtgttcattaacgatatcttgcaaaatagtaatgattctatcttccttcgatagatattcttcagagattattgtcttatattctttcttgttatcagatatgaatttgataagactttgaacattattgatacccgtctgtttaattttttctacagatattttagttttggcagattctatcgtatctgtcaatagacatccaacatcgacattcgacgtcaattgtctataaatcaacgtataaattttagaaataacattagcgaattgttgtgcgttgatgtcgttattctgaaacagtatgattttaggtagcattttcttaacaaagagaacgtatttattgttactcagttgaacagatgatatatccagattactaacgcatctgattccgtataccaaactttcagaagaaatggtatacaattgtttgtattcattcaatgtctctttttcagaaattagtttagagtcgaatactgcaataattttcaagagatagttttcatcagataagattttatttagtgtagatatgataaaactattgttttgttggagaacttgatacgccgcgttctctgtagtcgacgctctcaaatgggaaacaatctccattatttttttggaatcggatactatatcttcggtatcttgacgcagtctagtatacatagagttaagagagattagagtttgtacattaagcaacatgtctctaaatgtggctacaaacttttcctttttcacatcatctagtttattatataccgatttcacaacggcaccagatttaaggaaccagaatgaaaaactctgataactacaatatttcatcatagttacgattttatcatcttctatagttggtgtaatagcgcatacctttttctccaagactggaaccaacgtcataaaaatgtttaaatcaaaatccatatcaacatctgatgcgctaagaccagtctcgcgttcaagattatctttactaatggtgacgaactcatcgtataaaactctaagtttgtccattatttatttacagatttagttgtttaatttatttgtgctcttccagagttgggatagtatttttctaacgtcggtattatattattaggatctacgttcatatgtatcataatattaatcatccacgttttgataaatctatctttagcttctgaaataacgtatttaaacaaaggagaaaaatatttagctacggcatcagacgcaataacattttttgtaaatgtaacgtatttagacgacagatcttcgttaaaaagttttccatctatgtagaatccatcggttgttaacaccattcccgcgtcagattgaataggagtttgaatagtttgttttggaaatagatccttcaataacttatagttgggtgggaaaaaatcgattttatcactagactctttcttttttactatcattacctcatgaactatttcttgaatgagtatatgtattttctttcctatatcggacgcgttcattggaaaatataccatgtcgttaactataagaatatttttatcctcgtttacaaactgaataatatcagatgtagttcgtaaacgaactatatcatcaccagcacaacatctaactatatgatatccactagtttcctttagccgtttattatcttgttccatattagcagtcattccatcatttaagaaggcgtcaaaaataatagggagaaatgacattttggattctgttacaactttaccaaaattaaggatatacggacttactatctttttctcaacgtcaatttgatgaacacacgatgaaaatgtgcttctatgagattgatcatgtagaaaacaacaagggatacaatatttccgcatatcatgaaatatattaagaaatcccaccttattatatttccccaaaggatccatgcacgtaaacattatgccgttatcattaataaagacttctttctcatcggatctgtaaaagttgttactgatttttttcattccaggatctagataattaataatgatgggttttctattcttattctttgtattttggcatatcctagaccagtaaacagtttccactttggtaaaatcagcagacttttgaacgctattaaacatggcattaatggcaataactaaaaatgtaaaatatttttctatgttaggaatatggtttttcactttaatagatatatggtttttggccaaaatgatagatatttttttatccgaggatagtaaaatattattagtcgccgtctctataaaaatgaagctagtctcgatatccaattttattctagaattgataggagtcgccaaatgtaccttatacgttatatctcccttgatgcgttccatttgtgtatctatatcggacacaagatctgtaaatagttttacgttattaatcatcacggtatcgccgtcgctagataacgctaatgtaccatccaagtcccaaatggagagatttaactgttcatcgtttagaataaaatgattaccggtcatattaataaagtgttcatcgtatctagataacaacgacttataattaatgtccaagtcttgaactcgctgaatgatcttttttaacccagttagttttagattggtacgaaatatattgttaaactttgattctacagtaatgtccaaatctagttgtggaaatacttccatcaacattgtttcaaacttgataatattattatctacatcttcgtacgatccaaattccggaatagatgtatcgcacgctctggccacccagataaccaaaaagtcacacgctccaggatatacattgtataaaaagctatcgttttttagtagggtttttttctgcgtgtatacgaagggattaaaaatagtattatcaacgtaactatattccaaattattcttatgagaatagataataatatcgtccttaatatctaacaaatttcctaaatatccctttaattgagtcattcgaagcgtcaatagaatatgtctcttaactatttccggctgttgtatatttaaatgacttcgtaaaaaataatatatgggcgacttctcatctatgtaatcatatggagtgagatatagggctcgttctacctcctgccccttacccacctgtaataccaattgcggacttactatatatcgcatatttatatcgtggggtaaagtgaaaatctactaccgatgatgtaagtcttacaatgttcgaaccagtaccagatcttaatttggaggcctccgtagaactaggggaggtaaatatagatcaaacaacacctatgataaaggagaatagcggttttatatcccgcagtagacgtctattcgcccatagatctaaggatgatgagagaaaactagcactacgattctttttacaaagactttattttttagatcatagagagattcattatttgttcagatgcgttgacgctgtaaaagacgtcactattaccaaaaaaaataacattatcgtggcgccttatatagcacttttaactatcgcatcaaaaggatgcaaacttacagaaacaatgattgaagcattctttccagaactatataatgaacatagtaagaaatttaaattcaactctcaagtatccatcatccaagaaaaactcggataccagtttggaaactatcacgtttatgattttgaaccgtattactctacagtagctctggctattcgagatgaacattcatctggcatttttaatatccgtcaagagagttatctggtaagttcattatctgaaataacatatagattttatctaattaatctaaaatctgatcttgttcaatggagtgctagtacgggcgctgtaattaatcaaatggtaaatactgtattgattacagtgtatgaaaagttacaactggtcatagaaaatgattcacaatttacatgttcattggctgtggaatcaaaacttccaataaaattacttaaagatagaaatgaattatttacaaaattcattaacgagttaaaaaagaccagttcattcaagataagcaaacgcgataaggatacgctactaaaatattttacttaggactggagttagaatttatagacgactcatttcgtttatcattgttactattattactattactatcattattagtgttggcattattagtattcttcttgtcatcttgttcagaaatatacagcaatgctatacctaatactaaatacattatcatgctcgcaatggctctaacaacaacgaaccaaaatgaatttggtcgtagcttttgttcacaaaaatacataaagaaatgtctacataaatctatggcgccattggctacttgaaatagcgccagtcctcctacagattttaatatagctgtataacatgacatttattcatcatcaaaagagacagagtcaccatctgtcatatttagattttttttcatgtgttcaaagtatcctctactcatttcattataatagtttatcatacttagaattttaggacggatcaatgagtaagacttgactagatcgtcagtagtaatttgtgcatcgtctattctgcatccgcttcgtcgaataatgtatagcatcgctttgagattctccatagctatcaagtctttatacaatgacatggaaatatctgtgaatactttatacttctccaacatcgatgccttaacatcatcgcctactttagcattgaaaatacgttctattgtgtagatggatgtagcaagatttttaaacaacaatgccatcttacacgatgattgcctcaagtctccaatcgtttgtttagaacgattagctacagagtccaatgcttggctgactagcatattattatctttagaaattgtattcttcaatgaggcgtttatcatatctgtgatttcgttagtcatattacagtctgactgggttgtaatgttatccaacatatcacctatggatacggtacacgtaccagcatttgtaataatcctatctaagatgttgtatggcattgcgcagaaaatatcttctcctgtaatatctccactctcgataaatctactcagattattcttaaatgccttattctctggagaaaagatatcagtgtccatcatttcattaatagtatacgcagaaaagataccacgagtatcaattctatccaagatacttatcggttccgagtcacagataatggtttcctctccttcgggagatcctgcatagaaatatctaggacaatagtttctatactgtctgtaactctgataatctctaaagtcactaactgataccatgaaattgagaagatcaaacgctgaagtaattaatttttctgcctcgtttttactacaactagttttcatcaatgtagtgacgatgtattgtttagttacttttggtctaatactgatgatagagatattattgcttcccataatggatcttctagtagtcaccttaaagcccattgatgcgaatagcagatagataaagtcttggtatgactcctttctaatatagtacggactacctttgtcacccaactttatacccacataagccataacaacctctttaatagccgtttcatgaggtttatcagccatgagcctgagtagttggaagaatctcatgaatcccgtctcagaaagtcctatatgcatgatagatttatctttcctgggaaactctcgtatagtcatagatgaaatactctttaaagtttctgaaataagattagtaacagtcttacctccgactactctaggtaacaaacaaactctaataggtgttttctctgcggagataatatcagaaaggatagagcaataagtagtattattgtgattataaagaccgaatacataacaggtagaatttataaacatcatgtcctgaaggtttttagacttgtattcctcgtaatccataccgtcccaaaacatggatttggtaactttgatagccgtagatctttgttccttcgccaacaggttaaagaaattaataaagaatttgttgtttctatttatgtccacaaattgcacgtttggaagcgccacggttacattcactgcagcattttgaggatcgcgagtatgaagtacgatgttattgtttactggtatatctggaaagaaatctaccagtctaggaataagagattgatatcgcatagaaatagtaaagtttataatctcatcatcgaagagcattttgttaccattgtaataaatatccactctgtcatatgtataaatgaagtactgttcaaacatgatgagatgtttatatgttggcatagtagtgagatcgacgtttggtaatggcaatgtattaagattaactccataatgtctagcagcatctgcgatgttataagcgtcgtcaaagcggggtcgatcttgtattgttatatattgtctaacacctataagattatcaaaatcttgtctgcttaatacaccgttaacaatttttgccttgaattcttttattggtgcattaataacatccttatagaggatgttaaacaaataagtgttatcaaagttaagatctggatatttcttttctgctagaacatccattgagtcggagccatctggtttaatataaccaccgataaatctagctctgtattctgtatccgtcaatctaatattaagaaggtgttgagtgaaaggtggaagatcgtaaaagctgtgagtattaatgataggattagtttccgaactaatgttaattggggtattaataatatctatatttccagcgttaagtgtaacattaaacagttttaattcacgtgacgtggtatcaattaaataattaatgcccaatttggatatagcagcctgaagctcatcttgtttagttacggatcctaatgagttattaagcaatatatcgaacggatgaacgaaggttgttttaagttggtcacatactttgtaatctagacatagatgcggaagaacggtagaaactatacgaaataaatattcagagtcctctaattgatcaagagtaactattgacttaataggcatcatttatttagtattaaatgacgaccgtaccagtgacggatatacaaaacgatttaattacagagttttcagaagataattatccatctaacaaaaattatgaaataactcttcgtcaaatgtctattctaactcacgttaacaacgtggtagatagagaacataatgccgccgtagtgtcatctccagaggaaatatcctcacaacttaatgaagatctatttccagatgatgattcaccggccactattatcgaacgagtacaacctcatactactattattgacgatactccacctcctacgtttcgtagagagttattaatatcggaacaacgtcaacaacgagaaaaaagatttaatattacagtatcgaaaaatgctgaagcaataatggaatctagatctatgataacttctatgccaacacaaacaccatccttgggagtagtttatgataaagataaaagaattcagatgttagaggatgaagtggttaatcttagaaatcaacgatctaatacaaaatcatctgataatttagataattttaccaaaatactatttggtaagactccgtacaaatcaacagaagttaataagcgtatagccatcgttaattatgcaaatttgaacgggtcccccttatcagtcgaggacttggatgtttgttcggaggatgaaatagatagaatctataaaacgattaaacaatatcacgaaagtagaaaacgaaaaattatcgtcactaacgtgattattattgtcataaacattatcgagcaggcattgctaaaactcggatttgaagaaatcaaaggactgagtaccgatatcacttcagaaattatcgatgtggagatcggagatgactgcgatgctgtagcatctaaactaggaatcggtaacagtccggttcttaatattgtattgtttatactcaagatattcgttaaacgaattaaaattatttaatttaatacattcccatatccagacaacaatcgtctggattaatctgttcctgtcgtctcataccggacgacatattaatctttttattagtgggcatctttttagatggtttctttttcccagcattaactgagtcgatacctagaagatcgtgattgatctctccgaccattccacgaacttctaattggccgtctctgacggtaccataaactattttaccagcattagtaacagcttggacaatctgaccatccatcgcattgtacgatgtagtagtaactgttgttctacgtctaggagcaccagaagtatttttggagcccttggatgttgatgtagaagaagacgaggattttgattttggtttacatgtaatacattttgaactctttgattttgtatcacatgcgccggcagtcacatctgtttgagaattaagattattgttgcctcctttgacggctgcatctccaccgatttgcgctagtagatttttaagctgtggtgtaatcttattaactgtttcgatataatcatcgtaactgcttctaacggctaaattttttttatccgccatttagaagctaaaaatatttttatttatgcagaagatttaactagattatacaatgaactaatatgatccttttccagattatttacaaacttggtattttttggttctggaggaggcgaatttaaattcggacttggattcggattttgtaagttcttgatcttattatacatcgagtataggatggcgacagtaactgctacacaaataccgatcaaaagaagaataccaatcatttattgacaataacttcactattgatcaagtatgcaatatatcatcttttcactaaataagtagtaataatgattcaacaatgtcgagatatatggacgataataatttagttcatggaaatatcgctatgattggtgtgaatgactccgctaactctgtggggtgcgcagtgctttccccacatagaataaattagcattccgactgtgataataataccaagtataaacgccataatactcaatactttccatgtacgagtgggactggtagacttactaaagtcaataaaggcgaagatacacgaaagaatcaaaagaatgattccagcgattagcacgccggaaaaataatttccaatcataagcatcatgtccatttaactaataaaaattttaaatcgccgaatgaacaaagtggaatataaaccatataaaaacaatagtttgtactgcaaaaataatatctatttttgttttcgaagatatggtaaaattaaatagtagtacacagcatgttataactaacagcagcaacggctcgtaattacttatcatttactagacgaaaaggtggtgggatattttcttgctcaaataatacgaatatatcacccatccattttatgcgatgtttatatactctaatctttaatagatctatagacgacgggtttaccaacaatatagattttatcgattcatctaatttaaacccttccttaaacgtgaatgatctattatctggcataacgatgaccctacctgatgaatcggacaatgtactgggccatgtagaataaattatcaacgaattatcgtctacgaacatttatatcatttgttttaattttaggacgcgaataaatggatataaaatagaaaataacagatattacaaccagtgttatggccgcgcccaaccaggtaggcagttttattttatcttttactacaggttctcctggatgtacgtcaccaacggcggacgtagttctagtacaattagacgtaagttccgcttgggaattttttaacgctaaagagttaacgttaatcgtgcacccaacgtatttacatctagttcgttgaacatcttgattataatataaccattttctatctctagattcgtcagtgcactcatgtaaccaacataccctaggtcctaaatatttatctccggaattagattttggataattcgcgcaccaacaatttctatttcctttatgatcgttacaaaagacgtataatgccgtatccccaaaagtaaaataatcaggacgaataattctaataaactcagaacaatatctcgcatccatatgtttggagcaaatatcggaataagtagacatagccggtttccgttttgcacgtaaccattctaaacaattggggtttccaggatcgtttctacaaaatccagtcatgaaatcgtcacaatgttctgtcttgtaattattattaaatatttttggacagtgtttggtatttgtcttagaacaacattttgccacgctatcactatcgcccaggagataatccttttttataaaatgacatcgttgcccggatgctatataatcagtagcgtgttttaaatccttaatatattcaggagttacctcgttctgataatagattaatgatccaggacgaaatttgaaagaactacatggttctccatgaattaatacatattgtttagcaaattcaggaactataaaactactacaatgatctatcgacataccatctatcaaacaaaacttgggtttaatttctcccggagatgtttcataatagtacgtataactttcttctgcaaacttaacagctctattatattcaggataattaaaacctaattccatatatttgtctcgtatatctgctattcctggtgctattttgattctattaagagtaacagctgcccccattcttaataatcgtcagtatttaaactgttaaatgttggtatatcaacatctaccttatttcccgcagtataaggtttgttgcaggtatactgttcaggaatggttacatttatacttcttctatagtcctgtctttcgatgttcatcacatatgcaaagaacagaataaacaaaataatgtaagaaataatattaaatatctgtgaattcgtaaatacattgattgccataataattacagcagctacaatacacacaatagacattcccacagtgttgccattacctccacgatacatttgagttactaagcaataggtaataactaagctagtaagaggcaatagaaaagatgagataaatatcatcaatatagagattagaggagggctatatagagccaagacgaacaaaatcaaaccgagtaacgttctaacatcattatttttgaagattcccaaataatcattcattcctccataatcgttttgcatcatacctccatctttaggcataaacgattgctgctgttcctctgtaaataaatctttatcaagcactccagcacccgcagagaagtcgtcaagcatattgtaatatcttaaataactcatttatatattaaaaaatgtcactattaaagatggagtataatctttatgccgaactaaaaaaaatgacttgtggtcaacccctaagtctttttaacgaagacggggatttcgtagaagttgaaccgggatcatcctttaagtttctgatacctaagggattttacgcctctccttccgtaaagacgagtctagtattcgagacattaacaacgaccgataataaaatcactagtatcaatccaacaaatgcgccaaagttatatcctcttcaacgcaaagtcgtatctgaagtagtttctaatatgaggaaaatgatcgaatcaaaacgtcctctatacatcactcttcacttggcgtgtggatttggtaagactattaccacgtgttatcttatggctacacacggtagaaaaaccgtcatttgcgtacccaataaaatgttaatacatcaatggaagacacaggtagaggcagtcggattggaacataagatatccatagatggagtaagtagtctattaaaggaactaaagactcaaagtccggatgtattaatagtagtcagtagacatctgacaaacgatgccttttgtaaatatatcaataagcattatgatttgttcatcttggatgaatcacatacgtataatctgatgaacaatacagcagttacaagatttttagcgtattatcctccgatgatgtgttattttttaactgctacacctagaccatctaaccgaatttattgtaacagtattattaatattgccaagttatccaatctaaaaaaaactatctatgcagtagatagtttttttgagccatattccacagataatattagacatatggtaaaacgactagatggaccatctaataaatatcatatatataccgagaagttattatctgtagacgagcctagaaatcaacttattcttgataccctggtagaagaattcaagtcaggaactattaatcgcattttagttattactaaactacgtgaacatatggtattattctacaaacgattattagattttttcggaccagaggttgtatttataggagacgcccaaaatagacgtactccagatatggtcaaatcaatcaaggaactaaatagatttatattcgtatccaccttattttattccggtactggtttagatattcctagtttggattcgttgttcatttgctcggcagtaatcaacaatatgcaaatagagcaattactagggagggtatgtcgagaaacagaactattagataggacggtatatgtatttcctaacacatccatcaaagaaataaagtacatgataggaaatttcatgcaacgaattattagtctgtctgtagataaactaggatttaaacaaaaaagttatcggaaacatcaagaatccgatcccacttctgcatgtacaacatcatccagagaagaacgtgtattaaatagaatatttaactcgcaaaatcgttaagaagtttaagcgacgatccgcatgctgcgcaggccagtgtattacccctcatagtattaatataatccaatgatacttttgtgatgtcggaaatcttaaccaatttagactgacaggcagaacacgtcatgcaatcatcatcgtcatcgataactgtagtcttgggcttctttttgcgactcttcattccggaacgcacattggtgctatccatttaggtagtaaaaaataagtcagaatatgccctataacacgatcgtgcaaaacctggtatatcgtctctatctttatcacaatatagtgtatcgacatttttattattattgacctcgtttatcttggaacatggaatgggaacatttttgttatcaacggccatctttgccttaattccagatgttgtaaaattataactaaacagtctatcatcgacacaaatgaaattcttgtttagacgtttgtagtttacgtatgcggctcgttcgcgtctcattttttcagatattgcaggtactataatattaaaaataagaatgaaataacataggattaaaaataaagttatcatgacttctagcgctgatttaactaacttaaaagaattacttagtctgtacaaaagtttgagattttcagattctgcggctatagaaaagtataattctttggtagaatggggaacatctacttactggaaaataggcgtgcaaaaggtagctaatgtcgagacgtcaatatctgattattatgatgaggtaaaaaataaaccgtttaatattgatccgggctattacattttcttaccggtatattttgggagcgtctttatttattcgaagggtaaaaatatggtagaacttggatctggaaactcttttcaaataccagatgatatgcgaagtgcgtgtaacaaagtattagacagcgataacggaatagactttctgagatttgttttgttaaacaatagatggataatggaagatgctatatcaaaatatcagtctccagttaatatatttaaactagctagtgagtacggattaaacatacccaaatatttagaaattgaaatagaggaagacacattatttgacgacgagttatactctattatagaacgctctttcgatgataaatttccaaaaatatccatatcgtatattaagttgggagaacttagacggcaagttgtagactttttcaaattctcattcatgtatattgagtccatcaaggtagatcgtataggagataatatttttattcctagcgttataacaaaatcaggaaaaaagatattagtaaaagatgtagaccatttaatacgatccaaggttagagaacatacatttgtaaaagtaaaaaagaaaaacacattttccattttatacgactatgatggaaacggaacagaaactagaggagaagtaataaaacgaattatagacactataggacgagactattatgttaacggaaagtatttctctaaggttggtagtgcaggcttaaagcaattgactaataaattagatattaatgagtgcgcaactgtcgatgagttagttgatgagattaataaatccggaactgtaaaacgaaaaataaaaaaccaatcagcatttgatttaagcagagaatgtttgggatatccagaagcggattttataacgttagttaataacatgcggttcaaaatagaaaattgtaaggttgtaaatttcaatattgaaaatactaattgtttaaataacccgagtattgaaactatatatggaaactttaaccagttcgtctcaatctttaatgtcgtcaccgatgtcaaaaaaagattattcgagtgaaataatatgcgcctttgatataggtgcaaaaaatcctgccagaactgttttagaagtcaaggataactccgttagggtattggatatatcaaaattagactggagttctgattgggaaaggcgcatagctaaagatttgtcacaatatgaatacactacagttcttctagaacgtcagcctagaaggtcgccgtatgttaaatttatctattttattaaaggctttttatatcatacatcggctgccaaagttatttgcgtctcgcctgtcatgtctggtaattcatatagagatcgaaaaaagagatcggtcgaagcatttcttgattggatggacacattcggattgcgagactccgttccggatagacgcaaattagacgatgtagcggatagtttcaatttggctatgagatacgtattagataaatggaatactaattatacaccttataataggtgtaaatctagaaattacataaaaaaaatgtaataacgttagtaacgccattatggataatctatttacctttctacatgaaatagaagatagatatgccagaactatttttaactttcatctaataagttgcgatgaaataggagatatatatggtcttatgaaagaacgcatttcctcagaggatatgtttgataatatagtgtataataaagatatacatcctgccattaagaaactagtgtattgcgacatccaacttactaaacacattattaatcagaatacgtatccggtatttaacgattcttcacaagtgaaatgttgtcattatttcgacataaactcagataatagcaatattagctctcgtacagtagagatatttgagagggaaaagtcatctcttgtatcatatattaaaactaccaataagaagagaaaggtcaattacggcgaaataaagaaaactgttcatggaggcactaatgcaaattacttttccggtaaaaagtctgacgagtatctgagtactacagttagatccaacattaatcaaccttggatcaaaaccatctctaagaggatgagagttgatatcattaatcactctatagtaacgcgtggaaaaagctctatattacaaactatagaaattatttttactaatagaacatgtgtgaaaatattcaaggattctactatgcacattattctatccaaggacaaggatgaaaaggggtgtatacacatgattgacaaattattctatgtctattataatttatttctgttgttcgaagatatcatccaaaacgagtactttaaagaagtagctaatgttgtaaaccacgtactcacggctacggcattagatgagaaattattcctaattaagaaaatggctgaacacgatgtttatggagttagcaatttcaaaatagggatgtttaacctgacatttattaagtcgttggatcataccgttttcccctctctgttagatgaggatagcaaaataaagttttttaaggggaaaaagctcaatattgtagcattacgatctctggaggattgtataaattacgtgactaaatccgagaatatgatagaaatgatgaaggaaagatcgactattttaaatagcatagatatagaaacggaatcggtagatcgtctaaaagaattgcttctaaaatgaaaaaaaacactaattcagaaatggatcaacgactagggtataagtttttggtgcctgatcctaaagccggagttttttatagaccgttacatttccaatatgtatcgtattctaattttatattgcatcgattgcatgaaatcttgaccgtcaagcggccactcttatcgtttaagaataatacagaacgaattatgatagaaattagcaatgttaaagtgactcctccagattactcacctataatcgcgagtattaaaggtaagagttatgacgcattagccacgttcactgtaaatatctttaaagaggtaatgaccaaagagggtatatccatcactaaaataagtagttatgagggaaaagattctcatttgataaaaattccgctactaataggatacgggaataaaaatccacttgatacagccaagtatcttgttcctaatgtcataggtggagtctttatcaataaacaatctgtcgaaaaagtaggaattaatctagtagaaaagattacaacatggccaaaatttagggttgttaagccaaactcattcactttctcgttttcctccgtatcccctcctaatgtattaccgacaagatatcgccattacaagatatctctggatatatcacaattggaagcgttgaatatatcatcgacaaagacatttataacggtcaatattgttttgctgtctcaatatttatctagagtgagtctagaattcattagacgtagtttatcatacgatatgcctccagaagttgtctatctagtaaacgcgataatagatagtgctaaacgaattactgaatctattactgactttaatattgatacatacattaatgacctggtggaagctgaacacattaaacaaaaatctcagttaacgatcaacgagttcaaatatgaaatgctgcataactttttacctcatatgaactatacacccgatcaactaaagggattttatatgatatctttactaagaaagtttctctactgtatcttccacacttctagatatccagatagagattcgatggtttgtcatcgcatcctaacgtacggcaaatattttgagacgttggcacatgatgaattagagaattacataggcaacatccgaaacgatatcatgaacaatcacaagaacagaggcacttacgcggtaaacattcatgtactaacaactcccggacttaatcacgcgttttctagcttattgagtggaaagttcaaaaagtcagacggtagttatcgaacacatcctcactattcatggatgcagaatatttctattcctaggagtgttggattttatccggatcaagtaaagatttcaaagatgttttctgtcagaaaataccatccaagtcaatatctttacttttgttcatcagacgttccggaaagaggtcctcaggtaggtttagtatctcaattgtctgtcttgagttccattacaaatatactaacgtctgagtatttggatttggaaaagaaaatttgtgagtatatcagatcatattataaagatgatataagttactttgaaacaggatttccaatcactatagaaaatgctctagtcgcatctcttaatccaaatatgatatgtgattttgtaactgactttagacgtagaaaacggatgggattcttcggtaacttggaggtaggtattactttagttagggatcacatgaatgaaattcgcattaatattggagcgggaagattagtcagaccattcttggttgtggataacggagagctcatgatggatgtgtgtccggagttagaaagcagattagacgacatgacattctctgacattcagaaagagtttccgcatgtcatcgaaatggtagatatagaacaatttacttttagtaacgtatgtgaatcggttcaaaaatttagaatgatgtcaaaggatgaaagaaagcaatacgatttatgtgactttcctgccgaatttagagatggatatgtagcatcttcattagtgggaatcaatcacaattctggacccagagctattcttggatgtgctcaagctaaacaagctatctcttgtctgagctcggatatacgaaataaaatagacaatggaattcatttgatgtatccagagaggccaatcgtgattagtaaggctttagaaacttcaaagattgcggctaattgcttcggccaacatgttactatagcattaatgtcgtacaaaggtatcaatcaagaggatggaattatcatcaaaaaacaatttattcagagaggcggtctcgatattgttacagccaagaaacatcaagtagaaattccattggaaaactttaataacaaagaaagagataggtctaacgcctattcaaaattagaaagtaatggattagttagactgaatgctttcttggaatccggagacgctatggcacgaaatatctcatcaagaactcttgaagatgattttgctagagataatcagattagcttcgatgtttccgagaaatataccgatatgtacaaatctcgcgttgaacgagtacaagtagaacttactgacaaagttaaggtacgagtattaaccatgaaagaaagaagacccattctaggagacaaatttaccactagaacgagtcaaaagggaacagtcgcgtatgtcgcggatgaaacggaacttccatacgacgaaaatggtatcacaccagatgtcattattaattctacatccatcttctctagaaaaactatatctatgttgatagaagttattttaacagccgcatattctgctaagccgtacaacaataagggagaaaaccgacctgtctgttttcctagtagtaacgaaacatccatcgatacatatatgcaattcgctaaacaatgttatgagcattcaaatccgaaattgtccgatgaagaattatcggataaaatcttttgtgaaaagattctctatgatcctgaaacggataagccttatgcatccaaagtattttttggaccaatttattacttgcgtctgaggcatttaactcaggacaaggcaaccgttagatgtagaggtaaaaagacgaagctcattagacaggcgaatgagggacgaaaacgtggaggaggtatcaagttcggagaaatggagagagactgtttaatagcgcatggtgcagccaatactattacagaagttttgaaagattcggaagaagattatcaagatgtgtatgtttgtgaaaattgtggagacatagcagcacaaatcaagggtattaatacatgtcttagatgttcaaaacttaatctctctcctctcttaacaaaaattgataccacgcacgtatctaaagtatttcttactcaaatgaacgccagaggcgtaaaagtcaaattagatttcgaacgaaggcctccttcgttttataaaccattagataaagttgatctcaagccgtcttttctggtgtaatattctagtttggtagtagatacatatcaatatcatcaaattcgagatccgaattataaaatgggcgtggattgttaactatagaatcggacgtctgatattcgaaaatctgtggagtttcaggttttggtggaggtgtaactgctacttgggatactgaagtctgatattcagaaagctgtggatgttctggttcggcatccaccgatggtgtcacatcactaatcggttcggtaacgtctgtggatggaggtgctacttctacagaacctgtagcctcagttgtcaacggagatacatttttaatgcgagaaaatgtataatttggtaatggtttcttatgtggatctgaagaagaggtaagatatctactagaaagataccgatcacgttctagttctcttttgtagaacttaactttttctttctccgcatctagttgatattccaacctcttcacgttactacgttcagattccaattcacgttcgcatgggttacctccgcagtttttacgagcgatttcacgttcagccttcatgcgtctctccctctctctatcgagtttatcagagcagtctttctgaaggcgatcgaactccataaatttctccaacgctttgattgtttccatagatttccgaagttcagcttttaggactgtgattctttttctttcgaattcacagctggatgtacaaccgtttccattaccgccatctctaagtttcttttctagatcggcaacatttcatccccatgccttttacattcctcgagtctactgtcgtcgaaatatcgttccagctccttttcgacatcaataactttagcacgttgtctctcaagctctcttttgtagttatctgattccctggcacgtttaagatcttcatgcaattgagtcagctcttaacttcctctcttgcttcttcgtcatagtacgcgcaatcactgtgagatccattgttaccacgtctacactcggcgagctcgcgtttaagagattcaatttcccgtttgtattggtccatgtttccattgctaccaccattagatttacaggctgctagttgtcgttcgagatcagaaatacgggttttcttggaattgatttcgtcgatgtacttggcatcgaaacacttattaagttctttttccaattctacgattttatttctttcgcgagtcaattccctcctgtagtaactatctgttttgtcagattcacgctctctacgtagactttcttgcaagttactaatttgttccctagcacgtccgagtttagttttatatgctgaatagagttctgattcatcctttgagcagatctctagcgatcgtttaagattcctaattctagtctttagcctatttacctcctcagaagatgttccgttaccgttgcgtttacactcgttaagctgtctatcaagatccatgattctatctctaagacgttgcatctctctttccatatcagcattgctttcattattacgtctgcagtcactcaactgtctttcaatatctgagattctatctctaagacgtcgcatctctctctgtttcggcattggtttcattattacgtttacagtcgttcaactgtctttcaagatctgatattctagattggagtctgctaatctctgtagcattttcacggcattcactcagttgtctttcaagatctgaaattttagattggagtctgctaatctctgtaagatttcctcctccgctctcgatgcagtcggtcaacttattctctagttctctaatacgcgaacgcagtgcatcaacttcttgcgtgtcttcctggttgcgtgtacattcatcgagatctctaacgcgtcgtcgttcttcctcaagttctctgcgtactacagaaagcgtgtccctatcttgttgatatttagcaatttctgattctagagtactgattttgcttacgtagttactaatagttgtcttggccttatcaagatcctccttgtatttgtcgcattccttgatatccctacgaagtctggacagttcccattcgacattacgacgtttatcgatttcagctcggagatcgtcatcgcgttgttttagccacatacgactgagttcaagttctcgttgacaagatccatctacttttccattcctaatagtatccagttccttttctagttctgaacgcatttctcgttccctatcaagcgattctctcaattctcggatagtcttcttatcaatttctaataaatctgaaccatcatctgtcccattttgaatatccctgtgttctttgatctcttttgtaagtcggtcgattctttcggttttataaacagaatccctttccaaagtcctaatcttactgagtttatcactaagttctgcattcaattcggtgagttttctcttggcttcttccaactctgttttaaactctccactatttccgcattcttcctcgcatttatctaaccattcaattagtttattaataactagttggtaatcagcgattcctatagccgttcttgtaattgtgggaacataattaggatcttctaatggattgtatggcttgatagcatcatctttatcattattagggggatggacaaccttaattggttggtcctcatctcctccagtagcgtgtggttcttcaataccagtgttagtaataggcttaggcaaatgcttgtcgtacgcgggcacttcctcatccatcaagtatttataatcgggttctacttcagaatattcttttctaagagacgcgacttcgggagttagtagaagaactctgtttctgtatctatcaacgctggaatcaatactcaagttaaggatagcgaatacctcatcgtcatcatccgtatcttctgaaacaccatcatatgacatttcatgaagtctaacgtattgataaatagaatcagatttagtattaaacagatccttaacctttttagtaaacgcatatgtatattttagatctccagatttcataatatgatcacatgccttaaatgtcagtgcttccatgatataatctggaacactaatgggtgacgaaaaagatacagcaccatatgctacgttgataaataaatctgaaccactaagtagataatgattaatgttaagaaagaggaaatattcagtgtataggtatgtcttggcgtcatatcttgtactaaacacgctaaacagtttgttaatgtgatcaatttccaatagattaattagagcagcgggaataccaacaaacatattaccacatccgtattttctatgaatatcacatatcatgttaaaaaatcttgatagaagagcgaatatctcgtctgacttaatgagtcgtagttcagcagcaacataagtcataactgtaaatagaacatactttcctgtagtgttgattctagactccacatcaacaccattattaaaaatagttttatatacatctttaatctgctctccgttaatcgtcgaacgttctagtatacggaaacactttgatttcttatctgtagttaatgacttagtgatatcacgaagaatattacgaattacatttcttgtttttcttgagagacctgattcagaactcaactcatcgttccatagtttttctacctcagtggcgaaatctttggagtgcttggtacatttttcaataaggttcgtgacctccatttattataaaaaatttattcaaaacttaactacaatcgggtaattataagatcgtagatctcccatgtggcggaatactaccatctatcgcatgtggatggacagtaggtaatggccatgggaacagtaatgtttgcatatttatctttcttgctagtattactgcatattgtcccaatgtttcgatgtgatgttctaacctatcaactgccgctgtatcacaacaatagtgtccgatgaaattaagattatgatccaatgtgtttaatatatgattatcaagtcttatacgatccgcgtcttttttgacaggatcaggttcttctacaggaagaagtttcggcctcttatgatattcatgtctgggaaacggtggtctagggtgaggctccggtatcggagtgggttttggattataatcatcatcgtctatgacatcatcttcgacttcgatatttattttgctatcttgatgatgtcctgtatcagttgcattttcagcactcgactgaatattagcgcattcattgtctattattaccatatttctaaacccaaaatgtatgtgttgaacatcagtactatcgttgatgagtcttatagcatgaattcgcttatcgttatcgggtttatcttctgtcaccttagcaattccttttttattaaactctacataatcatatccatttctattgtttgttctaatataaacgagtatagcatcattgctaaatttttcaatagtatcaaaaacagaatatcctaaaccatataatatatattcaggaacactcaaactaaatgtccaggattctcctaaatacgtaaactttaatagtgcgaaatcattcaaaaatctaccacttatagatagatagtacataaatgcgtatagtagtctacctatctctttattatgaaaaccggcattacgatcatatatgtcgtgatatacctgtgatccgtttacgttaaaccataaatacatgggtgatcctataaacatgaatttatttctaattctcagagctatagttaattgaccgtgtaatatttgcttacatgcatacttgatacgcttattaataagatttttatcattgctcgttatttcagaatcgtatatataaggagtaccatcgtgattcttaccagatattatacaaaatactatatataaaatatattgacccacgttagtaatcatataaatgtttaacgttttaaattttgtattcaatgatccattatcatacgctatcatggtcttgtaatattcattctttaaaatataatattgtgttagccattgcattggagctcctaatggagattttctattctcatccattttaggataggctttcataaagtccctaataacttcgtgaataatgtttctatgttttctactgatgcatgtatttgcttcgatttttttatcccatgtttcatctatcatagatttaaacgcagtaatgctcgcaacattaacatcttgaaccgttggtacaattccgttccataaatttataatgttcgccatttatataactcattttttgaatatacttttaattaacaaaagagttaagttactcatatggacgccgtccagtctgaacatcaatctttttagccagagatatcatagccgctcttagagtttcagcgtgattttccaacctaaatagaacttcatcgttgcgtttacaacacttttctatttgttcaaactttgttgttacattagtaatctttttttccaaattagttagccgttgtttgagagtttcctcattgtcgtcttcatcggctttaacaattgcttcgcgtttagcctctggctttttagcagcctttgtagaaaaaaattcagttgctggaattgcaagatcgtcatctccggggaaaagagttccgtccatttaaagtacagattttagaaactgacactctgcgttatttatatttggtacaacacatggattataaatattgatgttaataacatcagaaaatgtaaagtctatacattgttgcatcgtgttaaattttctaatggatctagtattattgggtccaacttctgcctgaaatccaaatatggaagcggatacaaaaccgtttcctggataaaccacacatctccacttttgctttacatcagaaattgtgtcgttgacatcttgaactctcctatctaatgccggtgttccacctatagattttgaatattcgaatgctgcatgagtagcattaaattccttaatattgccataattttcatatattgagtaaccctggataaaaagtaaacacaccgcagccgtcgctaccacaataaaaaaaattgatagagagttcatttataatctattagaagctgacaaaatttttttacacgcatcagacaatgctttaataaatagttcaacatctacttttgtcatatcgaaccgatggtatgattctaacctagaattacatccgaaaaagttgactatgttcatagtcattaagtcattaacaaacaacattccagactctggattataagacgatactgtttcgtcacaattacctaccttaatcatgtgattatgaatattggctattagagcaccttctaagaaatctataatatctttgaaacacgatttaaaatcaaaccacgaatatacttctacgaagaaagttagtttacccataggagaaataactataaatggagatctaaatacaaaatccggatctatgatagttttaacattattatattctctattaaatacctccacatctaaaaatgttaattttgaaactatgtcttcgtttattaccgtacctgaactaaacgctataagctctattgtttgagaactctttaaacgatattcttgaaatacatgtaacaaagtttcctttaactcggtcggtttatctaccatagttacagaatttgtatccttatctataatataataatcaaaatcgtataaagttatataattatcgcgttcagattgtgatcttttcaaatagactaaaaaccccatttctctagtaagtatcttatgtatatgtttgtaaaatatcttcatggtgggaatatgctctaccgcagttagccattcctcattgacagcggtagatgtattagacaaaactattccaatgtttaacaagggccattttacgagattattaaatccttgtttgataaatgtagccaatgagggttcgagttcaacgacgattgaattctcttcccgcggatgctgcatgatgaacgacgggatgttgttcgattgatttggaattctttttcgactttttgtttatattaaatattttaaaatttatagcggatagcaattcatgtaccacggataatgtagacgcgtattgcgcatcgatatctttattattagataaatttatcaataaatgtgagaagtttgcctcgttaaggtcttccatttaaatattatataaacatttgtgtttgtatcttattcgtcttttatggaatagttttttactagtaaagctgcaattacacactttgtccgtaaaacataaatataaacaccagcttttatcaatcgttccaaaaagtcgacggcggacatttttaacatggcatctattttaaatacacttaggtttttggaaaaaacatcattttataattgtaacgattcaataactaaagaaaagattaagattaaacataagggaatgtcatttgtattttataagccaaagcattctaccgttgttaaatacttgtctggaggaggtatatatcatgatgatttggttgtattggggaaggtaacaattaataatctaaagatgatgctattttacatggatttatcatatcatggagtgacaagtagtggagcaatttacaaattgggatcgtctatcgatagactttctctaaataggactattgttacaaaagttaataattatgatgatacattttttgacgacgatgattgatcgctattgcacaattttgtttttgtactttctaatatagtgtttaggttctttttcatatgagaatattgatttactaaaatatctatgtttaacttttgttctatgacgtccttatcggcggtatcggtacatatacgtaattcaccttcacaaaatacggagtcttcgataataatagccaatcgattattggatctagctgtctgtatcatattcaacatgtttaatatatcctttcgtttcccctttacaggcatcgatcgtagcatattttccgcgtctgatatggaaatgttaaaactacaaaaatgcgtaatgttagcccgtcctaatattggtacgtgtctataagtttggcatagtagaataatagacgtgtttaaatgccttccaaagtttaagaattctattagagtattgcattttgatagtttatcgcctacatcatcaaaaataagtaaaaagtgtgctgattttttatgattttgtgcgacagcaatacatttttctatgttacttttagttcgtatcagattatattctagagattcctgactactaacgaaattaatatgatttggccaaatgtatccatcataatctgggttataaacgggtgtaaacaagaatatatgtttatattttttaactagtgtagaaaacagagatagtaaatagatagtttttccagatccagatcctcctgttaaaaccattctaaacggcatttttaataaattttctcttgaaaattgtttttcttggaaacaattcataattatatttacagttactaaattaatttgataataaatcaaaatatggaaaactaaggttgttagtagggaggagaacaaagaaggcacatcgtgatataaataacatttattatcatgatgacaccagaaaacgacgaagagcagacatctgtgttctccgctactgtttacggagacaaaattcagggaaagaataaacgcaaacgcgtgattggtctatgtattagaatatctatggttatttcactactatctatgattaccatgtccgcgtttctcatagtgcgcctaaatcaatgcatgtctgctaacgaggctgctattactgacgccgctgttgccgttgctgctgcatcatctactcatagaaaggttgcgtctagcactacacaatatgatcacaaagaaagctgtaatggtttatattaccagggttcttgttatatattacattcagactaccagttattctcggatgctaaagcaaattgcactgcggaatcatcaacactacccaataaatccgatgtcttgactacctggctcattgattatgttgaggatacatggggatctgatggtaatccaattacaaaaactacatccgattatcaagattctgatgtatcacaagaagttagaaagtatttttgtgttaaaacaatgaactaatatttatttttgtacattaataaatgaaatcgcttaatagacaaactgtaagtaggtttaagaagttgtcggtgccggccgctataatgatgatactctcaaccattattagtggcataggaacatttctgcattacaaagaagaactgatgcctagtgcttgcgccaatggatggatacaatacgataaacattgttatttagatactaacattaaaatgtctacagataatgcggtttatcagtgtcgtaaattacgagctagattgcctagacctgatactagacatctgagagtattgtttagtattttttataaagattattgggtaagtttaaaaaagaccaatgataaatggttagatattaataatgataaagatatagatattagtaaattaacaaattttaaacaactaaacagtacgacggatgctgaagcgtgttatatatacaagtctggaaaactggttaaaacagtatgtaaaagtactcaatctgtactatgtgttaaaaaattctacaagtgacaacaaaaaatgaattaataataagtcgttaacgtacgccgccatggacgccgcgtttgttattactccaatgggtgtgttgactataacagatacattgtatgatgatctcgatatctcaatcatggactttataggaccatacattataggtaacataaaaactgtccaaatagatgtacgggatataaaatattccgacatgcaaaaatgctactttagctataagggtaaaatagttcctcaggattctaatgatttggctagattcaacatttatagcatttgtgccgcatacagatcaaaaaataccatcatcatagcatgcgactatgatatcatgttagatatagaagataaacatcagccattttatctattcccatctattgatgtttttaacgctacaatcatagaagcgtataacctgtatacagctggagattatcatctaatcatcaatccttcagataatctgaaaatgaaattgtcgtttaattcttcattctgcatatcagacggcaatggatggatcataattgatgggaaatgcaatagtaattttttatcataaaagttgtaaagtaaataataaaacaataaatattgaactagtagtacgtatattgagcaatcagaaatgatgctggtacctcttatcacggtgaccgtagttgcgggaacaatattagtatgttatatattatatatttgtaggaaaaagatacgtactgtctataatgacaataaaattatcatgacaaaattaaaaaagataaagagttctaattccagcaaatctagtaaatcaactgatagcgaatcagactgggaggatcactgtagtgctatggaacaaaacaatgacgtagataatatttctaggaatgagatattggacgatgatagcttcgctggtagtttaatatgggataacgaatccaatgttatggcgcctagcacagaacacatttacgatagtgttgctggaagcacgctgctaataaataatgatcgtaatgaacagactatttatcagaacactacagtagtaattaatgaaacggagactgttgaagtacttaatgaagataccaaacagaatcctaactattcatccaatcctttcgtaaattataataaaaccagtatttgtagcaagtcaaatccgtttattacagaacttaacaataaatttagtgagaataatccgtttagacgagcacatagcgatgattatcttaataagcaagaacaagatcatgaacacgatgatatagaatcatcggtcgtatcattggtgtgattagtttcctttttataaaattgaagtaatatttagtattattgctgccgtcacgttgtacaaatggagatattccctgtattcggcatttctaaaattagcaattttattgctaataatgactgtagatattatatagatacagaacatcaaaaaattatatctgatgagatcaatagacagatggatgaaacggtacttcttaccaacatcttaagcgtagaagttgtaaatgacaatgagatgtaccatcttattcctcatagattatcgacgattatactctgtattagttctgtcggaggatgtgttatctctatagataatgacatcaatggcaaaaatattctaacctttcccattgatcatgctgtaatcatatccccactgagtaaatgtgtcgtagttagcaagggtcctacaaccatattggttgttaaagcggatatacctagcaaacgattggtaacatcgtttacaaacgacatactatatgtaaacaatctgtcactgattaattatttgccgttgtctgtattcattattagacgagtcaccgactatttggatagacacatatgcgatcagatatttgctaataataagtggtattcccttataaccatcgacgataagcaatatcctattccatcaaactgtataggtatgtcctctgccaagtacataaattctagcatcgagcaagatactttaatccatgtttgtaacctcgagcatccgttcgactcagtatacaaaaaaatgcagtcgtacaattctctacctatcaaggaacaaatattgtacggtagaattgataatataaatatgagcattagtatttctgtggattaatagatttctagtatggggatcattaatcatctctaatctctaaatacctcataaaacgaaaaaaaagctattatcaaatactgtacggaatggattcattctcttctctttttatgaaactctgttgtatatctactgataaaactggaagcaaaaaatctgatagaaagaataagaataagatcaaggattatatggaacacgattattataaaataacaatagttcctggttcctcttccacgtctactagctcgtggtattatacacatgcctagtaatagtctctttgcgttgacggaaagcagactagaaataacaggctaaaatgttcagacaccataatagttcccaacccagataataacagagttccatcaacacattcctttaaactcaatcccaaacccaaaaccgttaaaatgtatccggccaattgatagtagataatgaggtgtacagcgcatgataatttacacagtaaccaaaatgaaaatactttagtaattataagaaatatagacggtaatgtcatcatcaacaatccgataatatgcctgagagtaaacattgacggataaaacaaaaatgctccgcataactctatcatggcaataacacaaccaaatacttgtaagattcctaaattagtagaaaatacaacgaatatcgatgtataagtgatctcgagaaataataagaataaagtaatgcccgtaaagataaacatcaacattgtttggtaatcattaaaccaattagtatgaagttgaactaatttcacagtagattttattccagtgttatcctcgcatgtataagtacctggtaagatatctttatattccataatcaatgagacatcactatctgataacgaatgaagtctagcactagtatgccatttacttaatattgtcgtcttggaagttttattataagttaaaatatcatggttatccaatttccatctaatatactttgtcggattatctatagtacacggaataatgatggtatcattacatgctgtatactctatggtctttgtagttgttataacaaccaacgtatagaggtatatcaacgatattctaactcttgacattttttatttatttaaaatgatacctttgttatttattttattctattttgctaacggtattgaatggcataagtttgaaacgagtgaagaaataatttctacttacttattagacgacgtattatacacgggtgttaatggggcggtatacacattttcaaataataaactaaacaaaactggtttaactaataataattatataacaacatctataaaagtagaggatgcggataaggatacattagtatgcggaaccaataacggaaatcccaaatgttggaaaatagacggttcagacgacccaaaacatagaggtagaggatacgctccttatcaaaatagcaaagtaacgataatcagtcacaacggatgtgtactatctgacataaacatatcaaaagaaggaattaaacgatggagaagatttgacggaccatgtggttatgatttattcacggcggataacgtaattccaaaagatggtttacgaggagcattcgtcgataaagacggtacttatgacaaagtttacattcttttcactgatactatcggctcaaagagaattgtcaaaattccgtatatagcacaaatgtgcctaaacgacgaaggtggtccatcatcattgtctagtcatagatggtcgacgtttctcaaagtcgaattagaatgtgatatcgacggaagaagttatagacaaattattcattctagaactataaaaacagataatgatacgatactatatgtattcttcgatagtccttattccaagtccgcattatgtacctattctatgaataccattaaacaatctttttctacgtcaaaattggaaggatatacaaagcaattgccgtctccagctcctggtatatgtttaccagctggaaaagttgttccacataccacgtttgaagtcatagaacaatataatgtactagatgatattataaagcctttatctaaccaacctatcttcgaaggaccgtctggtgttaaatggttcgatataaaggagaaggaaaatgaacatcgggaatatagaatatacttcataaaagaaaattctatatattcgttcgatacaaaatctaaacaaactcgtagctcgcaagtcgatgcgcgactattttcagtaatggtaactgcgaaaccgttatttatagcagatatagggataggagtaggaatgccacaaatgaaaaaaatacttaaaatgtaatcttaatcgagtacaccacacgacaatgaacaaacataagacagattatgctggttatgcttgctgcgtaatatgcggtctaattgtcggaattatttttacagcgacactattaaaagttgtagaacgtaaattagttcatacaccattaatagataaaacgataaaagatgcatatattagagaagattgtcctactgactggataagctataataataaatgtatccatttatctactgatcgaaaaacctgggaggaaggacgtaatgcatgcaaagctctaaattcaaattcggatctaattaagatagagactccaaacgagttaagttttttaagaagccttagacgaggctattgggtaggagaatccgaaatattaaaccagacaaccccatataattttatagctaagaatgccacgaagaatggaactaaaaaacggaaatatatttgtagcacaacgaatactcccaaactgcattcgtgttacactatataacaattacactacatttttatcataccactacttcggttagatgttttagaaaaaaataaatatcgccgtaccgttcttgtttttataaaaataacaattaacaattatcaaattttttctttaatattttacgtggttgaccattcttggtggtaaaataatctcttagtgttggaatggaatgctgtttaatgtttccacactcatcgtatattttgacgtatgtagtcacatcgtttacgcaatagtcagactgtagttctatcatgcttcctacatcagaaggaggaacagttttaaagtctcttggttttaatctattaccgttagttttcatgaaatcctttgttttatccacttcacattttaaataaatgtccactatacattcttttgttaattttactagatcgtcatgggtcatagaatttataggttccgtagtccatggatccaaactagcaaacttcgcgtatacggtatcgcgattagtgtatacaccaactgtatgaaaattaagaaaacagtttaataaatcaacagaaatatttaatcctccgtttgatacagatgcgccatatttatggatttcggattcacacgttgtttgtctgaggtgttcgtctagtgttgcttctacgtaaacttcgattcccatatattctttattgtcagaatcgcataccgatttatcatcatacactgtttgaaaactaaatggtatacacatcaaaataataaataataacgagtacattctgcaatattgttatcgtaattggaaaaatagtgttcgagtgagttggattatgtgagtattggattgtatattttattttatattttgtaataagaataaaatgctaatgtcaagtttattccaatagatgtcttattaaaaacatatataataaataacaatggctgaatggcataaaattatcgaggatatctcaaaaaataataagttcgaggatgccgccatcgttgattacaagactacaaagaatgttctagctgctattcctaacagaacatttgccaagattaatccgggtgaaattattcctctcatcactaatcgtaatattctaaaacctcttattggtcagaaatattgtattgtatatactaactctctaatggatgagaacacgtatgctatggagttgcttactgggtacgcccctgtatctccgatcgttatagcgagaactcataccgcacttatatttttgatgggtaagccaacaacatccagacgtgacgtgtatagaacgtgtagagatcacgctacccgtgtacgtgcaactggtaattaaaataaaaagtaatattcatatgtagtgtcaattttaaatgatgatgatgaaatggataatatccatattgacgatgtcaataatgccggtattggcatacagttcatcgatttttagatttcattcagaggatgtggaattatgttatgggcatttgtattttgataggatctataatgtagtaaatataaaatataatccgcatattccatatagatataattttattaatcgcacgttaaccgtagatgaactagacgataatgtcttttttacacatggttattttttaaaacacaaatatggttcacttaatcctagtttgattgtctcattatcaggaaacttaaaatataatgatatacaatgctcagtaaatgtatcgtgtctcattaaaaatttggcaacgagtacatctactatattaacatctaaacataagacttattctctacatcggtccacgtgtattactataataggatacgattctattatatggtataaagatataaatgacaagtataatgacatctatgattttactgcaatatgtatgctaatagcgtctacattgatagtgaccatatacgtgtttaaaaaaataaaaatgaactcttaattatgctatgctattagaaatggataaaatcaaaattacggttgattcaaaaattggtaatgttgttaccatatcgtataacttggaaaagataactattgatgtcacacctaaaaagaaaaaagaaaaggatgtattattagcgcaatcagttgctgtcgaagaggcaaaagatgtcaaggtagaagaaaaaaatattatcgatattgaagatgacgatgatatggatgtagaaagcgcgtaatacgatctataaaaataagtatataaatactttttatttactgtactcttactgtgtagtggtgataccctactcgattatttttttaaaaaaaaaatacttattctgattcttctagccatttccgtgttcgtttgaatgccacatcgacgtcaaagataggggagtagttgaaatctagttctgcattgttggtacgcacctcaaatgtagtgttggatatcttcaacgtatagttgttgagtagtgatggttttctaaatagaattctcttcatatcattcttgcacgcgtacatttttagcatccatcttggaatcctagatccttgttctattcccaatggtttcatcaatagaagattaaacatatcgtacgaacacgatggagagtaatcgtagcaaaagtaagcatttcctttaatcttagatcccggatactggatatattttgcagccaacacgtgcatccatgcagcatttcctacatatacccggctatgcaccgcgtcatcatcgactgtacgatacataatgttaccgtgttgcttacattgctcgtaaaagactttcatcaatttgtctccttctccgtaaattccagtgggtcttaggcaacaagtatacaattttgctccattcatgattacggaattattggctttcataaccagttgctcggccatacgtttactttttgcgtatacatgtcctggtgatatatcataaagggtatgctcatggccgatgaatggatcaccgtgtttattgggtcctattgcttccatgctactagtatagatcaaatacttgattcctaggtccacacaagctgccaaaatagtctgtgttccataatagtttactttcatgatttcattatcggtgtattttccaaatacatccactagagcagccgtatgaataatcagatttaccccatctagcgcttctctcaccttatcaaagtcgtttatatcacattgtatatagtttataaccttaactttcgaggttattggttgtggatcttctacaatatctatgactctgatttcttgaacatcatctgcactaattaacagttttactatatacctgcctagaaatccggcaccaccagtaaccgcgtacacggccattgctgccactcataatatcagactacttattctattttactaaataatggctgtttgtataatagaccacgataatatcagaggagttatttactttgaaccagtccatggaaaagataaagttttaggatcagttattggattaaaatccggaacgtatagtttgataattcatcgttacggagatattagtcaaggatgtgattccataggcagtccagaaatatttatcggtaacatctttgtaaacagatatggtgtagcatatgtttatttagatacagatgtaaatatatttacaattattggaaaggcgttatctatttcaaaaaatgatcagagattagcgtgtggagttattggtatttcttacataaatgaaaagataatacattttcttacaattaacgagaatggcgtttgatatatcagttaatgcgtctaaaacaataaatgcattagtttacttttctactcagcaaaataaattagtcatacgtaatgaagttaatgatacacactacactgtcgaatttgatagggacaaagtagttgacacgtttatttcatataatagacataatgacaccatagagataagaggggtgcttccagaggaaactaatattggttgcgcggttagtatgacttacttgtataataagtatagttttaaactgattttagcagaatatataagacacagaaatactatatccggcaatatttattcggcattgatgacactagatgatttggctattaaacagtatggagacattgatctattatttaatgagaaacttaaagtagactccgattcgggactatttgactttgtcaactttgtaaaggatatgatatgttgtgattctagaatagtagtagctctatctagtctagtatctaaacattgggaattgacaaataaaaaatataggtgtatggcattagccgaacatatatctgatagtattccaatatctgagctatctagactacgatacaatctatgtaagtatctacgcggacacactgagagcatagaggataaatttgattattttgaagacgatgattcgtctacatgttctgccgtaaccgacagggaaacggatgtataattttttttatagcgtgaaggatatgataaaaaatataattgttgtatttatcccattccaatcaccttatatgattctgtaacacaataaaggagtcttatagatgtatagaggtcagatactggtttgataaactgtttattccacataagtatgtttgactttatggttagacccgcatactttaacaaatcactgaaaattggagttaggtattgacctctcagaatcagttgccgttctggaacattaaatgtattttttatgatatactccaacgcatttatgtgggcatacaacaagtcattactaatggaatattccaagagttttagttgtctagtatttaacaagagaagagatttcaacagactgtttatgaactcgaatgccgcctcattgtcgcttatattgatgatgtcgaattctcccaatatcatcaccgatgagtagctcatcttgttatcgggatccaagttttctaaagatgtcattaaaccctcgatcatgaatggatttatcatcatcgtttttatgttggacatgagcttagtccgtttgtccacatctatagaagatgatttctgaattatttcatatatctctctctttaactccaggaacttgtcaggatggtctactttaatatgttctcgtctaagagatgaaaatctttggatggttgcacgcgacttttctctaaaggatgacgttgcccaagatcctctcttaaatgaatccatcttatccttggacaagatggacagtctattttccttagatggtttaatatttttgttacccatgatctataaaggtagacctaatcgtctcggatgaccatatatttattttcagttttattatacgcataaattgtaaaaaatatgttaggtttacgaaaatgtctcgtggggcattaatcgtttttgaaggattggacaaatctggaaaaacaacacaatgtatgaacatcatggaatcaataccttcaaacacaataaaataccttaactttcctcagagatccactgtcactggaaagatgatagatgactatctaactcgtaaaaaaacctataatgatcatatagttaatctattattttgtgcaaatagatgggagtttgcatcttttatacaagaacaactagaacagggaattactttaatagttgatagatacgcattttctggagtagcgtatgccgccgctaaaggcgcgtcaatgactctcagtaagagttatgaatctggattgcctaaacccgacttagttatattcttggaatctggtagcaaagaaattaatagaaacgtcggtgaggaaatttatgaagatgttacattccaacaaaaggtattacaagaatataaaaaaatgattgaagaaggagatattcattggcaaattatttcttctgaattcgaggaagatgtaaagaaggagttgattaagaatatagttatagaggctatacacacggttactggaccagtggggcaactgtggatgtaatagtgaaattacattttttataaatagatgttagtacagtgttataaatggatgaagcatattactctggcaacttggaatcagtactcggatacgtgtccgatatgcataccgaactcgcatcaatatctcaattagttattgccaagatagaaactatagataatgatatattaaacaaggacattgtaaattttatcatgtgtagatcaaacttggataatccatttatctctttcctagatactgtatatactattatagatcaagagaactatcagactgagttgattaattcattagacgacaatgaaattatcgattgtatagttaataagtttatgagcttttataaggataacctagaaaatatagtagatgctatcattactctaaaatatataatgaataatccagattttaaaactacgtatgccgaagtactcggttccagaatagccgatatagatattaaacaagtgatacgtaagaatatactacaattgtctaataatatccgcgaacgatatttgtgaaaatattaaaaaaaaatactttttttattaaatgacgtcttttcgtgaatttagaaaattatgctgtgctatatatcacgcatcaggatataaagaaaaatctaaattaattagagactttataacagatagggatgataaatatttgatcattaagctattgcttcccggattagacgatagaatttataacatgaacgataaacaaattataaaattatatagtataatatttaaacaatctcaggaagatatgctacaagatttaggatacggatatataggagacactattaggactttcttcaaagagaacacagaaatccgtccacgagataaaagcattttaactttagaagaagtggatagttttttaactacgttatcatccgtaactaaagaatcgcatcaaataaaattattgactgatgtagcatctgtttgtacatgtaatgatttaaaatgtgtagtcatgcttattgataaagatctaaaaattaaagcgggtcctcggtacgtacttaacgctattagtcctaatgcctatgatgtgtttagaaaatctaataacttgaaagagataatagaaaattcatctaaacaaaatctagactctatatctatttctgttatgactccaattaatcccatgttagcggaatcgtgtgattctgtcaataaggcgtttaaaaaatttccatcaggaatgtttgcggaagtcaaatacgatggtgaaagagtacaagttcataaaaataataacgagtttgccttctttagtagaaacatgaaaccagtactctctcataaagtggattatctcaaagaatacataccgaaagcatttaaaaaagctacgtctatcgtattggattctgaaattgttcttgtagacgaacataatgtaccgctcccgtttggaagtttaggtatacacaaaaagaaagaatataaaaactctaacatgtgtttgttcgtgtttgactgtttgtactttgatggattcgatatgacggacattccattgtacgaacgaagatcttttctcaaagatgttatggttgaaatacccaatagaatagtattctcagagttgacgaatattagtaacgagtctcagttaactgacgtattggatgatgcactaacgagaaaattagaaggattggtcttaaaagatattaatggagtatacgaaccgggaaagagaagatggttaaaaataaagcgagactatttgaacgagggttccatggcagattctgccgatttagtagtactaggtgcctactatggtaaaggagcaaagggtggtatcatggcagtctttctaatgggttgttacgacgatgaatccggtaaatggaagacggttaccaagtgttcaggacacgatgataatacgttaagggagttgcaagaccaattaaagatgattaaaattaacaaggatcccaaaaaaattccagagtggttagtagttaataaaatctatattcccgattttgtagtagaggatccgaaacaatctcagatatgggaaatttcaggagcagagtttacatcttccaagtcccataccgcaaatggaatatccattagatttcctagatttactaggataagagaggataaaacgtggaaagaatctactcatctaaacgatttagtaaacttgactaaatcttaatagttacatacaaactgaaaattaaaataacactatttagttggtggtcgccatggatggtgttattgtatactgtctaaacgcgctagtaaaacatggcgaggaaataaatcatataaaaaatgatttcatgattaaaccatgttgtgaaagagtttgtgaaaaagtcaagaacgttcacattggcggacaatctaaaaacaatacagtgattgcagatttgccatatatggataatgcggtatccgatgtatgcaattcactgtataaaaagaatgtatcaagaatatccagatttgctaatttgataaagatagatgacgatgacaagactcctactggtgtatataattattttaaacctaaagatgccattcctgttatcatatctataggaaaggataaagatgtctgtgaactattaatctcatcagacatatcgtgtgcatgcgtggagttaaattcatatcacgtagccattcttcccatggatgtttccttttttaccaaaggaaatgcatcattgattattctcctgtttgatttctctatcgatgcggcacctctcttaagaagtgtaaccgataataatgttattatatctagacaccagcgtctacatgacgagcttccgagttccaattggttcaagttttacataagtataaagtccgactattgttctatattatatatggttgttgatggatctgtgatgcatgcgatagctgataatagaactcacgcaattattagcaaaaatatattagacaatactacgattaacgatgagtgtagatgctgttattttgaaccacagattaggattcttgatagagatgagatgctcaatggatcatcgtgtgatatgaacagacattgtattatgatgaatttacctgatgtaggcgaatttggatctagtatgttggggaaatatgaacctgacatgattaagattgctctttcggtggctggtaatttaataagaaatcgagactacattcccgggagacgaggatatagctactacgtttacggtatagcctctagataatttttttaagcacgaaataaaaaacataattttaaaccaatctatttcatactattttgtgtgatcaccatggacataaagatagatattagtatttctggtgataaatttacggtgactactaggagggaaaatgaagaaagaaaaaaatatctacctctccaaaaagaaaaaactactgatgttatcaaacctgattatcttgagtacgatgacttgttagatagagatgagatgtttactattctagaggaatattttatgtacagaggtctattaggcctcagaataaaatatggacgactctttaacgaaattaaaaaattcgacaatgatgcggaagaacaattcggtactatagaagaactcaagcagaaacttagattaaattctgaagagggagcagataactttatagattatataaaggtacaaaaacaggatatcgtcaaacttactgtatacgattgcatatctatgataggattgtgtgcatgcgtggtagatgtttggagaaatgagaaactgttttctagatggaaatattgtttacgagcgattaaactgtttattgatgatcacatgcttgataagataaaatctatactgcagaatagactagtatatgtggaaatgtcatagaaagttaaaagttaatgagagcaaaaatatataaggttgtattccatatttgttatttttttctgtaatagttagaaaaatacattcgatggtctatctatcagattattatgtgttataaggtactttttctcataataaactagagtatgagtaagatagtgtttttcaaaacatataaatctaaaattgatggatgagatatacagctattaatttcgaaaatatattttaatctgataactttaaacatggatttttaatggtggtttaacgttttaaaaaaagattttgttattgtagtatatgataatattaaaagatggatataaagaatttgctgactgcatgtactattttttacattactacattggctacggcagatatacctacttcgtcactgccacacgctccggtaaacggggcatgtgacgagggagaatatcttgataagaggcataatcaatgttgtaatcagtgtccacctggagaatttgccaaggttagatgtaatggtaacgataacacaaaatgtgaacgctgcccacctcatacatataccgcaatccccaattactctaatggatgtcatcaatgtagaaaatgcccaacaggatcatttgataaggtaaagtgtaccggaacacagaacagtaaatgttcgtgtcttcctggttggtattgcgctactgattcttcacagactgaagattgtcgagattgtataccaaaaaggagatgtccatgcggatactttggtggaatagatgaacaaggaaatcctatttgtaaatcgtgttgtgttggtgaatattgcgactacctacgtaattatagacttgatccatttcctccatgcaaactatctaaatgtaattaattatgattttgatgataatgttaccatacattatatcgctacttggttagtgtattattcagtatgaagacctattaataattacttatcttttgacgatcttgttataattataatataaaaatacttatggcatagtaactcataattgctgacgcgataaattcgtaataatctgttttgttcaaatttttataaggaatctacaggcataaaaataaaaatataatttataatatactcttacagcgcgccatcatgaataacagcagtgaattgattgctgttattaatggatttagaaatagtggacgattttgtgatattaatatagttattaatgatgaaaggataaacgctcacagactcatcctatctggagcctccgaatatttttccattctgttttccaataattttatcgattctaatgaatacgaagttaatctaagtcatttagattatcaaagtgttaacgatttgatcgattacatttatgggatacctttgagcctaactaacgataacgtgaaatatattctttcaaccgctgattttttacaaattggatctgctattacggagtgtgaaaattacatacttaaaaatctttgttctagaaactgtatcgatttctacatatacgctgataaatataataacaagaaaatagaatcagcgtcgtttaacacaatattacaaaatattttgagactcatcaacgatgaaaactttaaatacttaacagaggaatcaatgataaaaattttaagcgatgatatgttaaatataaaaaatgaggatttcgccccactaattctcattaaatggttagagagtactcaacaaccatgcaccgtcgagttacttaaatgcctcagaatatcattgctttccccacaagttataaaatcactttatagtcatcgactggttagttcaatctacgaatgtataacattcttaaacaatatagcattcttggatgaatcatttcctagataccatagcatcgagttgatatctatcggtataagtaattcgcatgataagatttccataaactgctacaatcataaaaaaaatacatgggaaatgatatcttcacgtagatataggtgtagtttcgcagtggccgtcctggataatattatctatatgatgggtggatatgatcagtccccgtatagaagttcaaaggttatagcgtacaatacatgtacaaattcttggatatatgatataccagagctaaaatatcctcgttctaattgtgggggactggctgatgacgaatacatttattgtataggcggcatacgcgatcaggattcatcgttgacatctagtattgatagatggaagccatcaaaaccatattggcagaagtatgctaaaatgcgcgaaccaaaatgtgatatgggggttgcgatgttaaacggattaatatatgttataggtggaatcgttaaaggtgacacgtgtaccgacgcactagagagtttatcagaagatggatggatgaagcatcaacgtcttccaataaaaatgtccaatatgtcgacgattgttcatgatggcaagatttatatatctggaggttacaacaatagtagtgtagttaatgtaatatcgaatctagtccttagctataattcgatatatgatgaatggaccaaattatcatcattaaacattcctagaattaatcccgctctatggtcagcgcataataaattatatgtaggaggaggaatatctgatgatgttcgaactaatacatctgagacatacgacaaagaaaaagattgttggacattggataatggtcacgtgttaccacgcaattatataatgtataaatgcgaaccgattaaacataaatatccattggaaaaaacacagtacacgaatgattttctaaagtatttggaaagttttataggtagttgatagaacaaaatacataattttgtaaaaataaatcactttttatactaatatgacacgattaccaatacttttgttactaatatcattagtatacgctacaccttttcctcagacatctaaaaaaataggtgatgatgcaactctatcatgtaatcgaaataatacaaatgactacgttgttatgagtgcttggtataaggagcccaattccattattcttttagctgctaaaagcgacgtcttgtattttgataattataccaaggataaaatatcttacgactctccatacgatgatctagttacaactatcacaattaaatcattgactgctagagatgccggtacttatgtatgtgcattctttatgacatcaactacaaatgacactgataaagtagattatgaagaatactccacagagttgattgtaaatacagatagtgaatcgactatagacataatactatctggatctacacattcaccggaaactagttctgagaaacctgattatatagataattctaattgctcgtcggtattcgaaatctaagctcaaaaattgaaaaactagcgtctttttttgctcgaagtcgaccaccatggtgggtgaggatagcgtgctgatcaccgagaacatgcacatgaaactgtacatggagggcaccgtgaacgaccaccacttcaagtgcacatccgagggcgaaggcaagccctacgagggcacccagaccatgaagatcaaggtggtcgagggcggccctctccccttcgccttcgacatcctggctaccagcttcatgtacggcagcaaaacctttatcaaccacacccagggcatccccgacttctttaagcagtccttccctgagggcttcacatgggagaggatcaccacatacgaagacgggggcgtgctgaccgctacccaggacaccagcctccagaacggctgcctcatctacaacgtcaagatcaacggggtgaacttcccatccaacggccctgtgatgcagaagaaaacactcggctgggaggccagcaccgagatgctgtaccccgctgacagcggcctgagaggccatagccagatggccctgaagctcgtgggcgggggctacctgcactgctccctcaagaccacatacagatccaagaaacccgctaagaacctcaagatgcccggcttctacttcgtggacaggagactggaaagaatcaaggaggccgacaaagagacctacgtcgagcagcacgagatggctgtggccaggtactgcgacctgcctagcaaactggggcacagctgattaattaatttttatcgatctaattcaacaatgtctggagagcttcgcaggatcccgactccggaaccaattactgataaagaagatcatacagttacagacactgtctcatacactacagtaagtacatcatctggaattgtcactactaaatcaaccaccgatgatgcggatctttatgatacgtacaatgataatgatacagtaccaccaactactgtaggcggtagtacaacctctattagcaattataaaaccaaggactttgtagaaatatttggtattaccgcattaattatattgtcggccgtggcaattttctgtattacatattatatatataataaacgttcacgtaaatacaaaacagagaacaaagtctagatttttgacttacataaatgtctgggatagtaaaatctatcatattgagcggaccatctggtttaggaaagacagccatagccaaaagactatgggaatatatttggatttgtggtgtcccataccactagatttcctcgtcctatggaacgagaaggtgttgattaccattacgttaacagagaggccatctggaagggaatagccgccggaaactttctagaacatactgagtttttaggaaatatttacggaacttctaaaacagctgtgaatacagcggctattaataatcgtatttgtgtgatggatctaaacatcgacggtgttagaagtcttaaaaatacgtacctaatgccttactcggtgtatataagacctacctctcttaaaatggttgagaccaagcttcgtcgtagaaacactgaagctaacgatgagattcatcgtcgtgtgatgttggcaaaaactgacatggatgaggcaggtgaagccggtctattcgacactattatcattgaagatgatgtgaatttagcatatagtaagttaattcagatactacaggaccgtattagaatgtattttaacactaattagagacttaagacttaaaacttgataattaataatataactcgtttttatatgtgtctatttcaacgtctaatgtattagttaaatattaaaacttaccacgtaaaacttaaaatttaaaatgatatttcattgacagatagatcacacattatgaactttcaaggacttgtgttaactgacaattgcaaaaatcaatgggtcgttggaccattaataggaaaaggtggattcggtagtatttatactactaatgacaataattatgtagtaaaaatagagcccaaagctaacggatcattatttaccgaacaggcattttatactagagtacttaaaccatccgttatcgaagaatggaaaaaatctcacaatataaagcacgtaggtcttatcacgtgcaaggcatttggtctatacaaatccattaatgtggaatatcgattcttggtaattaatagattaggtgcagatctagatgcggtgatcagagccaataataatagactaccaaaaaggtcggtgatgttgatcggaatcgaaatcttaaataccatacaatttatgcacgagcaaggatattctcacggagatattaaagcgagtaatatagtcttagatcaaatagataagaataaattatatctagtggattacggattggtttctaaattcatgtctaatggcgaacatgttccatttataagaaatccaaataaaatggataacggtactctagaatttacacctatagattcgcataaaggatacgttgtatctagacgtggagatctagaaacacttggatattgtatgattagatggttgggaggtatcttaccatggactaagatatctgaaacaaagaattgtgcattagtaagtgccacaaaacagaaatatgttaacaatactgcgactttgttaatgaccagtttgcaatatgcacctagagaattgctgcaatatattaccatggtaaactctttgacatattttgaggaacccaattacgacaagtttcggcacatattaatgcagggtgtatattattaagtgtggtgtttggtcgataaaaattaaaaaataacttaatttattattgatctcgtgtgtacaaccgaaatcatggcgatgttttacgcacacgctctcggtgggtacgacgagaatcttcatgcctttcctggaatatcatcgactgttgccaatgatgtcaggaaatattctgttgtgtcagtttataataacaagtatgacattgtaaaagacaaatatatgtggtgttacagtcaggtgaacaagagatatattggagcactgctgcctatgtttgagtgcaatgaatatctacaaattggaaatccgatccatgatcaagaaggaaatcaaatctctatcatcacatatcgccacaaaaactactatgctctaagcggaatcgggtacgagagtctagacttgtgtttggaaggagtagggattcatcatcacgtacttgaaacaggaaacgctgtatatggaaaagttcaacatgattattctactatcaaagagaaggccaaagaaatgagtgcacttagtccaggacctatcatcgattaccacgtctggataggagattgtatctgtcaagttactgctgtggacgtacatggaaaggaaattatgaaaatgagattcaaaaagggtgcggtgcttccgatcccaaatctggtaaaagttaaacttggggagaatgatacagaaaatctttcttctactatatcggcggcaccatcgaggtaaccacctctctggaagacagcgtgaatcatgtactcatgaaacgtttggaaactatacgccatatgtggtctgttgtatatgatcattttgatattgtgaatggtaaagaatgctgttatgtgcatacgcattcatctaatcaaaatcctataccgagtactgtaaaaacaaatttgtacatgaagactatgggatcatgcattcaaatggattccatggaagctctagagtatcttagcgaactgaaggaatcaggtggatggagtcccagaccagaaatgcaggaatttgaatatccagatggagtggaagacactgaatcaattgagagattggcagaggagttcttcaatagatcagaacttcaggctggtgaatcagtcaaatttggtaattctattaattgttaaacatacatctgtttcagctaagcaactaagaacacgtatacggcagcagcttccttctatactctcatcttttaccaacacaaagggtggatatttgttcattggagttgataataatacacacaaagtatttggattcacggtgggttacgactacctcagactgatagagaatgatatagaaaagcatatcaaaagacttcgtgttgtgcatttctgtgagaagaaagaggacatcaagtacgcgtgtcgattcatcaaggtatataaacctggggatgagactacctcgacatacgtgtgcgctatcaaagtggaaagatgctgttgtgctgtgtttgcagattggccagaatcatggtatatggatactaatggtatcaagaagtattctccagatgaatgggtgtcacatataaaattttaattaatgtaactatagagaacaaataataaggttgtaatatcatatagacaataactaacaattaattagtaactgttatctcttttttaactaaccaactaactatatacctattaatacatcgtaattatagttcttaacatctattaatcattaattcgcttctttaattttttataaactaacattgttaattgaaaagggataacatgttacagaatataaattatatatggatttttttaaaaaggaaatacttgactggagtatatatttatctcttcattatatagcacgcgtgttttccaatttttccacatcccatataatacaggattataatctcgttcgaacatacgagaaagtggataaaacaatagttgattttttatctaggttgccaaatttattccatattttagaatatggggaaaatattctacatatttattctatggatgatgctaatacgaatattataattttttttctagatagagtattaaatattaataagaacgggtcatttatacacaatctcgggttatcatcatccattaatataaaagaatatgtatatcaattagttaataatgatcatccagataataggataagactaatgcttgaaaatggacgtagaacaagacattttttgtcctatatatcagatacagttaatatctatatatgtattttaataaatcatggattttatatagatgccgaagacagttacggttgtacattattacatagatgtatatatcactataagaaatcagaatcagaatcatacaatgaattaattaagatattgttaaataatggatcagatgtagataaaaaagatacgtacggaaacacaccttttatcctattatgtaaacacgatatcaacaacgtggaattgtttgagatatgtttagagaatgctaatatagactctgtagactttaatagatatacacctcttcattatgtctcatgtcgtaataaatatgattttgtaaagttattaatttctaaaggagcaaatgttaatgcgcgtaataaattcggaactactccattttattgtggaattatacacggtatctcgcttataaaactatatttggaatcagacacagagttagaaatagataatgaacatatagttcgtcatttaataatttttgatgctgttgaatctttagattatctattatccagaggagttattgatattaactatcgtactatatacaacgaaacatctatttacgacgctgtcagttataatgcgtataatacgttggtctatctattaaacaaaaatggtgattttgagacgattactactagtggatgtacatgtatttcggaagcagtcgcaaacaacaacaaaataataatggaagtactattgtctaaacgaccatctttgaaaattatgatacagtctatgatagcaattactaaacataaacagcataatgcagatttattgaaaatgtgtataaaatatactgcgtgtatgaccgattatgatactcttatagatgtacagtcgctacagcaatataaatggtatattttaagatgtttcgatgaaatagatatcatgaagagatgttatataaaaaataaaactgtattccaattagttttttgtatcaaagacattaatactttaatgagatacggtaaacatccttctttcgtgaaatgcactagtctcgacgtatacggaagtcgtgtacgtaatatcatagcatctattagatatcgtcagagattaattagtctattatccaagaagctggatcctggagataaatggtcgtgttttcctaacgaaataaaatataaaatattggaaaactttaacgataacgaactatccacatatctaaaaatcttataaacattattaaaatataaaatctaagtaggataaaatcacactacatcattgtttccttttagtgctcgacagtgtatactatttttaacgctcataaataaaaatgaaaacgatttccgttgttacgttgttatgcgtactacctgctgttgtttattcaacatgtactgtacccactatgaataacgctaaattaacgtctaccgaaacatcgtttaatgataaccagaaagttacgtttacatgtgatcagggatatcattctttggatccaaatgctgtctgtgaaacagataaatggaaatacgaaaatccatgcaaaaaaatgtgcacagtttctgattatgtctctgaactatataataaaccgctatacgaagtgaattccaccatgacactaagttgcaacggcgaaacaaaatattttcgttgcgaagaaaaaaatggaaatacttcttggaatgatactgttacgtgtcctaatgcggaatgtcaacctcttcaattagaacacggatcgtgtcaaccagttaaagaaaaatactcatttggggaatatatgactatcaactgtgatgttggatatgaggttattggtgcttcgtacataagttgtacagctaattcttggaatgttattccatcatgtcaacaaaaatgtgatatgccgtctctatctaacggattaatttccggatctacattttctatcggtggcgttatacatcttagttgtaaaagtggttttacactaacggggtctccatcatccacatgtatcgacggtaaatggaatcccatactcccaatatgtgtacgaactaacgaaaaatttgatccagtggatgatggtcccgacgatgagacagatttgagcaaactctcgaaagacgttgtacaatatgaacaagaaatagaatcgttagaagcaacttatcatataatcatagtggcgttgacaattatgggcgtcatatttttaatctccgttatagtattagtttgttcctgtgacaaaaataatgaccaatataagttccataaattgctaccgtaaatataaatccgttaaaataattaataatttaataacaaacaagtatcaaaagattaaagacttatagctagaatcaattgagatgtcttcttcagtggatgttgatatctacgatgccgttagagcatttttactcaggcactattataacaagagatttattgtgtatggaagaagtaacgccatattacataatatatacaggctatttacaagatgcgccgttataccgttcgatgatatagtacgtactatgccaaatgaatcacgtgttaaacaatgggtgatggatacacttaatggtataatgatgaatgaacgcgatgtttctgtaagcgttggcaccggaatactattcatggaaatgtttttcgattacaataaaaatagtatcaacaatcaactaatgtatgatataattaatagcgtatctataattctagctaatgagagatatagaagcgcttttaacgacgatggtatatacatccgtagaaatatgattaacaagttgtacggatacgcatctctaactactattggcacgatcgctggaggtgtttgttattatctgttgatgcatctagttagtttgtataaataattatttcaatatactagttaaaattttaagattttaaatgtataaaaaactaataacgtttttatttgtaataggtgcattagcatcctattcgaataatgagtacactccgtttaataaactgagtgtaaaactctatatagatggagtagataatatagaaaattcatatactgatgataataatgaattggtgttaaattttaaagagtacacaatttctattattacagagtcatgcgacgtcggatttgattccatagatatagatgttataaacgactataaaattattgatatgtataccattgactcgtctactattcaacgcagaggtcacacgtgtagaatatctaccaaattatcatgccattatgataagtacccttatattcacaaatatgatggtgatgagcgacaatattctattactgcagagggaaaatgctataaaggaataaaatatgaaataagtatgatcaacgatgatactctattgagaaaacatactcttaaaattggatctacttatatatttgatcgtcatggacatagtaatacatattattcaaaatatgatttttaaaaatttaaaatatattatcacttcagtgacagtagtcaaataacaaacaacaccatgagatatattataattctcgcagttttgttcattaatagtatacatgctaaaataactagttataagtttgaatccgtcaattttgattccaaaattgaatggactggggatggtctatacaatatatcccttaaaaattatggcatcaagacgtggcaaacaatgtatacaaatgtaccagaaggaacatacgacatatccgcatttccaaagaatgatttcgtatctttctgggttaaatttgaacaaggcgattataaagtggaagagtattgtacgggactatgcgtcgaagtaaaaattggaccaccgactgtaacattgactgaatacgacgaccatatcaatttgtacatcgagcatccgtatgctactagaggtagcaaaaagattcctatttacaaacgcggtgacatgtgtgatatctacttgttgtatacggctaacttcacattcggagattctaaagaaccagtaccatatgatatcgatgactacgattgcacgtctacaggttgcagcatagactttgtcacaacagaaaaagtgtgcgtgacagcacagggagccacagaagggtttctcgaaaaaattactccatggagttcgaaagtatgtctgacacctaaaaagagtgtatatacatgcgcaattagatccaaagaagatgttcccaatttcaaggacaaaatggccagagttatcaagagaaaatttaatacacagtctcaatcttatttaactaaatttctcggtagcacatcaaatgatgttaccacttttcttagcatgcttaacttgactaaatattcataactaatttttattaatgatacaaaaacgaaataaaactgcatattatacactggttaacgcccttataggctctaaccattttcaagatgaggtccctgattatagtccttctgttcccctctatcatctactccatgtctattagacgatgtgagaagactgaagaggaaacatggggattgaaaatagggttgtgtataattgccaaagatttctatcccgaaagaactgattgcagtgttcatctcccaactgcaagtgaaggattgataactgaaggcaatggattcagggatatacgaaacaccgataaattataaaaaaagcaatgtgtccgctgtttccgttaataatactattttcgtaactggcggattattcataaataactctaatagcacgatcgtggttaacaatatggaaaaacttgacatttataaagacaaacaatggtcgattatagaaatgcctatggctagggtatatcacggcattgactcgacatttggaatgttatattttgccggaggtctatccgttaccgaacaatatggtaatttagagaaaaacaacgagatatcttgttacaatcctagaacgaataagtggtttgatatttcatatactatttataagatatccatatcatcattgtgtaaactaaataacgtcttctatgtatttagtaaggacattggatatgtggaaaagtatgatggtgcatggaagttagtacatgatcgtctccccgctataaaggcattatcaacttctccttattgattgaaaatgaaaatataaatagtttttatgtatagcagtattaccctatagttttattgcttactactaacatggatacagatgttacaaatgtagaagatatcataaatgaaatagatagagagaaagaagaaatactaaaaaatgtagaaattgaaaataataaaaacattaacaagaatcatcccaatgaatatattagagaagcactcgttattaataccagtagtaatagtgattccattgataaagaagttatagaatgtatcagtcacgatgtaggaatatagatcatatctactaatttttataatcgatacaaaacataaaaaacaactcgttattacatagcaggcatggaatccttcaagtattgttttgataacgatggcaagaaatggattatcggaaatactttatattctggtaattcaatactctataaggtcagaaaaaatttcactagttcgttctacaattacgtaatgaagatagatcacaaatcacacaagccattgttgtctgaaatacgattctatatatctgtattggatcctttgactatcgacaactggacacgggaacgtggtataaagtatttggctattccagatctgtatggaattggagaaaccgatgattatatgttcttcgttataaagaattcgggaagagtattcgccccaaaggatactgaatcagtcttcgaagcatgcgtcactatgataaacacgttagagtttatacactctcgaggatttacccatggaaaaatagaaccgaggaatatactgattagaaataaacgtctttcactaattgactattctagaactaacaaactatacaagagtggaaactcacatatagattacaacgaggacatgataacttcaggaaatatcaattatatgtgtgtagacaatcatcttggagcaacagtttcaagacgaggagatttagaaatgttgggatattgcatgatagaatggttcggtggcaaacttccatggaaaaacgaaagtagtataaaagtaataaaacaaaaaaaagaatataaaaaatttatagctactttctttgaggactgttttcctgaaggaaatgaacctctggaattagttagatatatagaattagtatacacgttagattattctcaaactcctaattatgacagactacgtaaactgtttatacaagattgaaattatattcttttttttatagagtgtggtagtgttacggatatctaatattaatattagactatctctatcgcgctacacgaccaatatcgattactatggatatcttctatgaaaggagagaatgtatttatttctccagcgtcaatctcgtcagtattgacaatactgtattatggagctaatggatccactgctgaacagctatcaaaatatgtagaaacggaggagaacacggataaggttagcgctcagaatatctcattcaaatccatgaataaagtatatgggcgatattctgccgtgtttaaagattcctttttgagaaaaattggcgataagtttcaaactgttgacttcactgattgtcgcactatagatgcaatcaacaagtgtgtagatatctttactgaggggaaaatcaatccactattggatgaaccattgtctcctagcaattagtgccgtatactttaaagcaaaatggttgacgccattcgaaaaggaatttaccagtgattatcccttttacgtatctccgacggaaatggtagacgtaagtatgatgtctatgtacggcaaggcatttaatcacgcatctgtaaaagaatcattcggcaacttttcaatcatagaactgccatatgttggagatactagtatgatggtcattcttccagacaagattgatggattagaatccatagaacaaaatctaacagatacaaattttaagaaatggtgtgactttatggatgctatgtttatagatgttcacattcccaagtttaaggtaacaggctcgtataatctggtggatactctagtaaagtcaggactgacagaggtgttcggttcaactggagattatagcaatatgtgtaatttagatgtgagtgtcgacgctatgatccacaaaacgtatatagatgtcaatgaagagtatacagaagcagctgcagcaacttctgtactagtggcagactgtgcatcaacaattacaaatgagttctgtgcagatcatccgttcatctatgtgattaggcatgttgatggaaaaattcttttcgttggtagatattgctctccgacaactaattgttaaccattttttttaaaaaaaatagaaaaaacatgtggtattagtgcaggtcgttgttcttccaattgcaattggtaagatgacggccaactttagtacccacgtcttttcaccacagcactgtggatgtgacagactgaccagtattgatgacgtcaaacaatgtttgactgaatatatttattggtcgtcctatgcataccgcaacaggcaatgcgctggacaattgtattccacactcctctcttttagagatgatgcggaattagtgttcatcgacattcgcgagctggtaaaaaatatgccgtgggatgatgtcaaagattgtacagaaatcatccgttgttatataccggatgagcaaaaaaccatcagagagatttcggccatcatcggactttgtgcatatgctgctacttactggggaggtgaagaccatcccactagtaacagtctgaacgcattgtttgtgatgcttgagatgctaaattacgtggattataacatcatattccggcgtatgaattgatgagttgtacatcttgacattttctttcttctcttctccctttcttctcttctcccttcctccctcttctccctttcccagaaacaaacttttttacccactataaaataaaatgagtatactacctattatatttcttcctatatttttttattcttcattcgttcagacttttaacgcgtctgaatgtatcgacaaagggcaatattttgcatcattcatggagttagaaaacgagccagtaatcttaccatgtcctcaaataaatacgctatcatccggatataatatattagatattttatgggaaaaacgaggagcggataatgatagaattataccgatagataatggtagcaatatgctaattctgaacccgacacaatcagactctggtatttatatatgcattaccacgaacgaaacctactgtgacatgatgtcgttaaatttgacaatcgtgtctgtctcagaatcaaatatagatcttatctcgtatccacaaatagtaaatgagagatctactggcgaaatggtatgtcccaatattaatgcatttattgctagtaacgtaaacgcagatattatatggagcggacatcgacgccttagaaataagagacttaaacaacggacacctggaattattaccatagaagatgttagaaaaaatgatgctggttattatacatgtgttttagaatatatatacggtggcaaaacatataacgtaaccagaattgtaaaattagaggtacgggatagaataataccttctactatgcaattaccagatggcattgtaacttcaataggtagtaatttgactattgcatgcagagtatcgttgagacctcccacaacggacaccgacgtcttttggataagtaatggtatgtattacgaagaagatgatggggacggaaacggtagaataagtgtagcaaataaaatctatatgaccgataagagacgtgttattacatcccggttaaacattaatcctgtcaaggaagaagatgctacaacgtttacgtgtatggcgtttactattcctagcatcagcaaaacagttactgttagtataacgtgaatgtatgttgttacatttccatgtcaattgagtttataagaatttttatacattatcttccaacaaacaattgacgaacgtattgctatgattaactcccacgatactatgcatattattaatcattaacttgcagactatacctagtgctattttgacatactcgtgttcttgtgtaattgcggtatctatattattaaagtacgtaaatctagctatagttttattatttaattttagataatataccgtctccttatttttaaaaattgccacatcctttattaaatcatgaatgggaatttctatgtcatcgttagtatattgtgaacaacaagagcagatatctataggaaagggtggaatgcgatacattgatctatgtagttttaaaacacacgcgaactttgaagaatttatataaatcattccatcgatacatccttctatgttgacatgtatatatccaggaattcttttattaatgtcaggaaatgtataaactaaaacattgcccgaaagcggtgcctctatctgcgttatatccgttcttaacttacaaaatgtaaccaatacctttgcatgacttgttttgttcggcaacgttagtttaaacttgacgaatggattaattacaatagcatgatccgcgcatctattaagtttttttactttaacgcccttgtatgtttttacagagactttatctaaatttctagtgcttgtatgtgttataaatataacgggatatagaaccgaatcacctaccttagatacccaattacattttatcagatccagataataaacaaattttgtcgccctaactaattctatattgttatatattttacaattggttatgatatcatgtaataacttggagtctaacgcgcatcgtcgtacgtttatacaattgtgatttagtgtagtatatctacacatgtatttttccgcactatagtattctggactagtgataaaactatcgttatatctgtcttcaatgaactcatcgagatattgctctctgtcatattcatacacctgcataaactttctagacatcttacaatccgtgttattttaggatcatatttacatatttacgggtatatcaaagatgttagattagttaatgggaatcgtctataataatgaatattaaacaattatatgaggacttttaccacaaagcatcataaaaatgagtcgtcgtctgatttatgttttaaatatcaaccgcaaatcaactcataaaatacaagagaatgaaatatatacatattttagtcattgcaatatagaccatacttctacagaacttgattttgtagttaaaaactatgatctaaacagacgacaacctgtaactgggtatactgcactacactgctatttgtataataattactttacaaacgatgtactgaagatattattaaatcatgacgtaaatgtaacgatgaaaaccagtagcggacgtatgcctgtttatatattgcttactagatgttgtaatatttcacatgatgtagtgatagatatgatagacaaagataaaaaccacttattacatagagactattccaacctattactagagtatataaaatctcgttacatgttattgaaggaagaggatatcgatgagaacatagtatccactttattagataagggaatcgatcctaactttaaacaagacggatatacagcgttacattattattatttgtgtctcgcacacgtttataaactaggtgagtgtagaaaaccgataacgataaaaaaggccaagcgaattatttctttgtttatacaacatggagctaatctaaacgcgttagataattgtggtaatacaccattccatttgtatcttagtattgaaatgtgtaataatattcatatgactaaaatgctgttgacttttaatccgaatttcaaaatatgtaataatcatggattaacgcctatactatgttatataacttccgactacatacaacacgatattcttgttatgttaatacatcactatgaaacaaatgttggagaaatgccgatagatgagcgtcgtatgatcgtattcgagtttatcaaaacatattctacacgtccggcagattcgataacttatttgatgaataggtttaaaaatataaatatttatacccgctatgaaggaaagacattattacacgtagcatgtgaatataataatacacaagtaatagattatcttatacgtatcaacggagatataaatgcgttaaccgacaataacaaacacgctacacaactcattatagataacaaagaaaattccccatataccattaattgtttactgtatatacttagatatattgtagataagaatgtgataagatcgttggtggatcaacttccatctctacctatcttcgatataaaatcatttgagaaattcatatcctactgtatacttttagatgacacattttacgataggcacgttaagaatcgcgattctaaaacgtatcgatacgcattttcaaaatacatgtcgtttgataaatacgatggtataataactaaatgtcacgacgaaacaatgttactcaaactgtccactgttctagacactacactatatgcagttttaagatgtcataattcgagaaagttaagaagatacctcaacgagttaaaaaaatataataacgataagtcctttaaaatatattctaatattatgaatgagagataccttaatgtatattataaagatatgtacgtgtcaaaggtatatgataaactatttcctgttttcacagataaaaattgtctactaacattactaccttcagaaattatatacgaaatattatacatgctgacaattaacgatctttataatatatcgtatccacctaccaaagtatagttgtatttttctcatgcgatgtgtgtaaaaaaactgatattatataaatattttagtgccgtataataaagatgacgatgaaaatgatggtacatatatatttcgtatcattattgttattgctattccacagttacgccatagacatcgaaaatgaaatcacagaattcttcaataaaatgagagatactctaccagctaaagactctaaatggttgaatccagcatgtatgttcggaggcacaatgaatgatatagccgctctaggagagccattcagcgcaaagtgtcctcctattgaagacagtcttttatcgcacagatataaagactatgtggttaaatgggagaggctagaaaagaatagacggcgacaggtttctaataaacgtgttaaacatggtgatttatggatagccaactatacatctaaattcagtaaccgtaggtatttgtgcaccgtaactacaaagaatggtgactgtgttcagggtatagttagatctcatattaaaaaacctccttcatgcattccaaaaacatatgaactaggtactcatgataagtatggcatagacttatactgtggaattctttacgcaaaacattataataatataacttggtataaagataataaggaaattaatatcgacgacattaagtattcacaaacgggaaaggaattaattattcataatccagagttagaagatagcggaagatacgactgttacgttcattacgacgacgttagaatcaagaatgatatcgtagtatcaagatgtaaaatacttacggttataccgtcacaagaccacaggtttaaactaatactagatccgaaaatcaacgtaacgataggagaacctgccaatataacatgcactgctgtgtcaacgtcattattgatcgacgatgtactgattgaatgggaaaatccatccggatggcttataggattcgattttgatgtatactctgttttaactagtagaggcggtatcaccgaggcgaccttgtactttgaaaatgttactgaagaatatataggtaatacatataaatgtcgtggacacaactattattttgaaaaaacccttacaactacagtagtattggagtaaatatacaatgcatttttatatacattactgaattattattactgaattattattactgaattattattaattatatcgtatttgtgctatagaatggatgaagatacgcgactatctaggtatttgtatctcaccgatagagaacatataaatgtagactctattaaacagttgtgtaaaatatcagatcctaatgcatgttatagatgtggatgtacggctttacatgagtacttttataattatagatcagtcaacggaaaatacaagtatagatacaacggttactatcaatattattcatctagcgattatgaaaattataatgaatattattatgatagaactggtatgaacagtgagagtgataatatatcaatcaaaacagaatatgaattctatgatgaaacacaagatcaaagtacacaactagtaggttacgacattaaactcaaaaccaatgaggatgattttatggctatgatagatcagtgggtgtccatgattatatagatgaatcaattaataaagtagtatatggaagagagtctcacgtaagatggcgggatatatggcaagaacataatgatggcgtatacagtataggaaaggagtgcatagataatatatacgaagacaaccataccgtagacgaattctacaagatagacagcgtatcagatgtagatgacgcggaacacatatctccgataactaaaaaaccatagaatcagttgatgataatacctacatttctaatcttccgtataccatcaaatacaaaatattcgagcaacaataagtattttttatacctttaaaactgataaataaattttttctagtgatattttggcaagatgagaatcctatttctcatcgctttcatgtatgggtgtgttcactcatatgttaacgcggttgaaaccaaatgtccaaatctagacattgtaacatcttctggagaatttcattgttcaggatgtgtggaacatatgcctgagtttagctatatgtattggttggcaaaggatatgaaatcggacgaggataccaagtttatagaacatctgggtgatggcatcaaagaagatgaaaccgttcgtaccacagatagtggaatcgtcactctacgtaaagtccttcatgtgactgatactaataaatttgataattataggttcacttgtgtcctcgctacgctagatggcatttataaaaagaatgtttgctgaagtagttgtgtgctactatttttatttatgatataatctaatggaattaatttgaattgatatttatccaatactaaagattatattagaatcaaattaatcttttatacgagaaaaaataacgacatacgtcgtcaacaaattaaactttttatttattagttaactagcttatagaacttgctcattgttatgtttctaaaacgggtacggcatataggacaattatccgacgcaccggtttctcttcgtgttctatgccatatattgatgcatgttatgcaaaatatatgagtacacgaatccaataaaccaaagtatctatcgttttgagtaaacaacttcatagcaaattccacattctttttctttacttactctatacacgtcctcgtatttatttagtattttgatgatatccaactcagaaatggttgttgtattattgggtgtatttggagtataggtattattagctatgtaccaatttaccaaccctcttaatattgattgataatcacatcggttatccaattaataactaaattgtagtgtatatatagaccatatatgtttctatttttttgacagttacgtatagtttcagtaagttttgattgttgtattcctgtatctctagataagttagtcatatagtcccttccggcgatacgttttttccaagcccgaaattgattagccaaatgtgtatttatttttgtgatattgatataatatttcggataatgcatactgttagtcttatatcatttggttcatctatgtattgtaatattgttacatgatctatagatgatgtattgattttggcaggatcgaattccatatccgcgactaaacagtgaaaaaaatgtaaatactttttaaattttaaattagtaaaacttttttttattttttatgattccaaaaatactgaatacaaagtcctaaattataaatatggagatcatactaccacaacttattattatgtatacaaggccggtgtaatagatagatatatataattctattacaccggcagacaattaccgaccggtatttgtcgttaccaacataccgtataatatgtaatatacaattccataacccattgacagttgttatacatcaaaattgcaattcttttgattacgatgttataagaatgtagttaattgatgtatgatgttaatgtgtcctctttcctcttataacatcgtaatcaaaaacttttttataatatatacctaataatgtgtcttaatagttctcgtgattcgtcaaacaatcattcttataaaatataataaagcaacgtaaaaacacataaaaataagcgtaactaataagacaatggatatttacgacgataaaggtctacagactattaaactgtttaataatgaatttgattgtataaggaatgacatcagagaattatttaaacatgtaactgattccgatagtatacaacttccgatggaagacaattctgatattatagaaaatatcagaaaaatactatatagacgattaaaaaatgtagaatgtgttgacatcgataacacaataacttttatgaaatacgatccaaatgatgataataagcgtacgtgttctaattgggtacccttaactaataactatatggaatattgtctagtaatatatttggaaacaccgatatgtggaggcaaaataaaattataccaccctacaggaaatataaagtcggataaggatattatgtttgcaaagactctagactttaaatcaacgaaagtgttaactggacgtaaaacaattgccgttctagacatatccgtttcatataatagatcaatgactactattcactacaacgacgacgttgatatagatatacatactgataaaaatggaaaagagttatgttattgttatataacaatagatgatcattacttggttgatgtggaaactataggagttatagtcaatagatctggaaaatgtctgttagtaaataaccatctaggtataggtatcgttaaagataaacgtataagcgatagttttggagatgtatgtatggatacaatatttgacttttctgaagcacgagagttattttcattaactaatgatgataacaggaatatagcatgggacactgataaactagacgatgatacagatatatggactcccgtcacagaagatgattacaaatttctttctagactagtattgtatgcaaaatctcaatcggatactgtatttgactattatgttcttactggtgatacggaaccacccactgtattcattttcaaggtaactagattttactttaatatgccgaaataaaaaatttttgtataatatctagaggtagaggtattgtttagataaatacaaataacatagatacatcgcatacttagcatttttataaatatacataagacatacactttatacatttttgtaaaaatactcataaaaaaatttataaaaattatggcacaaccatatcttgtataggtagtttagttcgtcgagtgaacctataaacagataatagacaacacataataatgcctactaatacaagcataataccgggagatgggatatatgacgttgtagtgtttgggttttctgaacgttgatagtctactaatactacatgctgacatctaatgcctgtataaccatgagagcatctacaatacataccgtcaatatctctagcgtggatacagtcaccgtgtaaacaatatccatctccctctggaccgcataatctgatagctggaatatctgttgtagcgtttgtaatttctggcaatgtcgtttcgatagcgttaccactatcggcgaatgatctgattatcatagcagcgaacaacaacatcagataatttatcaacatttttgatggattctgtgtttatgctgtttctcagtgtgtgtttatgacaagattgggaattttatattattaattcagtaatataaactaataatatattgttaattgtgtaaataatataaaaataacaatacaatattgaatgtgttgctgttaaaaatgtatgtgttaatataatagaataaaataaatgagtatgatcattttagataacgattgattttatcattaccgcttcattcttatattctttgcttacggaacctatatttagaaacatctactaacaattttttatgcttgcattattaatggtatgtaatatgattgattgtgtacgcaataccaatttgttaagtatgaatacggggtacaaacataaattgaaatttaacattatttatttatgatatatatcgttatcgttaggtctataccatggatatctttaaagaactaatcttaaaacaccctgatgaaaatgttttgatttctccagtttccattttatctactttatctattctaaatcatggagcagctggttctacagctgaacaactatcaaaatatatagagaatatgaatgagaatacacccgatgacaataatgatgacatggaggtagatattccgtattgtgcgacactagctaccgcaaataaaatatacggtagcgatagtatcgagttccacgcctccttcctacaaaaaataaaagacgattttcaaactgtaaactttaataatgctaaccaaacaaaggaactaatcaacgaatgggttaagacaatgacaaatggtaaaattaattccttattgactagtccgctatccattaatactcgtatgacagttgttagcgccgtccattttaaagcaatgtggaaatatccattttctaaacatcttacatatacagacaagttttatatttctaagaatatagttaccagcgttgatatgatggtgggtaccgagaataacttgcaatatgtacatattaatgaattattcggaggattctctattatcgatattccatacgagggaaactctagtatggtaattatactaccggacgacatagaaggtatatataacatagaaaaaaatataacagatgaaaaatttaaaaaatggtgtggtatgttatctactaaaagtatagacttgtatatgccaaagtttaaagtggaaatgacagaaccgtataatctggtaccgattttagaaaatttaggacttactaatatattcggatattatgcagattttagcaagatgtgtaatgaaactatcactgtagaaaaatttctacatacgacgtttatagatgttaatgaggagtatacagaagcatcggccgttacaggagtatttacgattaacttttcgatggtatatcgtacgaaggtctacataaaccatccattcatgtacatgattaaagacaccacaggacgtatactttttatagggaaatactgctatccgcaataaatataaacaaatagacttttataaagagtcttcaacgataagtatatcgacatactacttatgctgcgaaagattctgaacgagaacgactatctcaccctcttggatcatatccgcactgctaaatactaaatctccactacactttttatcatcttatgaggaatgattgccttcgtgaaataggaataattagcaccagaatagctatggattattgtggtagagagtgcactattctatgtcgtctactggatgaagatgtgacgtacaaaaaaataaaactagaaattgaaacgtgtcacaacttatcaaaacatatagatagacgaggaaacaatgcgctacattgttacgtctccaataaatgcgatacagacattaagattgttctctcgcggagtcgagagactttgtagaaacaacgaaggattaactccgctaggagtatacagtaagcatagatacgtaaaatctcagattgtgcatctactgatatccagctattcaaattcctctaacgaactcaagtcgaatataaatgatttcgatctgtattcggataatatcgacttacgtctgctaaaatacctaattgtggataaacggatacgtccgtccaagaatacgaattatgcaatcaatggtctcggattggtggatatatacgtaacgacgcctaatccgagaccagaagtattgctatggcttcttaaatcagaatgttacagcaccggttacgtatttcgtacctgtatgtacgacagtgatatgtgtaagaactctcttcattactatatatcgtctcatagagaatctcaatctctatccaaggatgtaattaaatgtttgatcgataacaatgtttccatccatggcagagacgaaggaggatctttacccatccaatactactggtctttctcaaccatagatatagagattgttaaattattattaataaaggatgtggacacgtgtagagtatacgacgtcagccctatattagaggcgtattatctaaacaagcgatttagagtaaccccatataatgtagacatggaaatcgttaatcttcttattgagagacgtcatactcttgtcgacgtaatgcgtagtattacttcgtacgattccagagaatataaccactacatcatcgataacattctaaagagatttagacaacaggatgaatccatcgtacaagccatactgataaactacttacattacggcgatatggtcgttcgatgcatgttagataacggacaacaactatcctctacacgactactttgttaataataatctcgtcgatgtaaacgtcgtaaggtttatcgtggaaaatatggacacgcggctgtaaatcacgtatcgaacaatggccgtctatgtatgtacggtctgatattatcgagatttaataattgcgggtatcactgttatgaaaccatactgatagatgtatttgatatactaagcaagtacatggatgatatagatatgatcgataactctactatattacgcggtcgatgtcaataatatacaatttgcaaagcggttattggaatatggagcgagtatcacgctcgataatcaatacggccatccagaaaagcagttacagaagagaaaacaaaacgaaatcgttgttctacaagatgtctctccctacgacgattactacgtaaaaaagatactagcctactgcctattaagggacgagtcattcgcggaactacatagtaaattctgtttaaacgaggactataaaagtgtatttatgaaaaatatatcattcgataagatagattccatcatcgtgacataagtcgcctcaaagagattcgaatctccgacaccgacctgtatacggtatcacagctatcttaaagccatacattcagacagtcacatttcatttcccatgtacgacgatctcatagaacagtgccatctatcgatggagcgtaaaagtaaactcgtcgacaaagcactcaataaattagagtctaccatcggtcaatctagactatcgtatttgcctccggaaattatgcgcaatatcatctaaacagtatgttgtacggaaagaaccattacaaatattatccatgatagaaagaaaatatctatatgattggagaagtaggaaacaggaacaagacaacgattactacattattaaatcatgaagtccgtattatactcgtatatattgtttctctcatgtataataataaacggaagagatatagcaccgcatgcaccatccgatggaaagtgtaaagacaacgaatacaaacgccataatttgtgtccgggaacatacgcttccagattatgcgatagcaagactaacacacgatgtacgccgtgtggttcgggtaccttcacatctcgcaataatcatttacccgcttgtctaagttgtaacggaagacgcgatcgtgtaacacgactcacaatagaatctgtgaatgctctcccggatattattgtcttctcaaaggatcatccggatgcaaggcatgtgtttcccaaacaaaatgtggaataggatacggagtatccggagacgtcatctgttctccgtgtggtctcggaacatattctcacaccgtctcttccgcagataaatgcgaacccgtacccagaaatacgtttaactatatcgatgtggaaattaacctgtatccagttaacgacacgtcgtgtactcggacgaccactaccggtctcagcgaatccatctcaacgtcggaactaactattactatgaatcataaagactgtaatcccgtatttcgtgatggatacttctccgttcttaataaggtagcgacttcaggtttctttacaggagaaaggtgtgcactctgaatttcgagattaaatgcaataacaaagattcttcctccaaacagttaacgaaagcaaagaatgatactatcatgccgcattcggagacagtaactctagtgggcgacatctatatactatatagtaataccaatactcaagactacgaaactgatacaatctcttatcatgtgggtaatgttctcgatgtcgatagccatatgcccggtagttgcgatatacataaactgatcactaattccaaacccacccactttttatagtaagtttttcacccataaataataaatacaataattaatttctcgtaaaagtagaaaatatattctaatttattgcacggtaaggaagtagaatcataaagaacagtactcaatcaatagcaattatgaaacaatatatcgtcctggcatgcatgtgcctggcggcagctgctatgcctgccagtcttcagcaatcatcctcatcctcctcctcgtgtacggaagaagaaaacaaacatcatatgggaatcgatgttattatcaaagtcacaaagcaagaccaaacaccgaccaatgataagatttgccaatccgtaacggaaattacagagtccgagtcagatccagatcccgaggtggaatcagaagatgattccacatcagtcgaggatgtagatcctcctaccacttattactccatcatcggtggaggtctgagaatgaactttggattcaccaaatgtcctcagattaaatccatctcagaatccgctgatggaaacacagtgaatgctagattgtccagcgtgtccccaggacaaggtaaggactctcccgcgatcactcatgaagaagctcttgctatgatcaaagactgtgaagtgtctatcgacatcagatgtagcgaagaagagaaagacagcgacatcaagacccatccagtactcgggtctaacatctctcataagaaagtgagttacgaagatatcatcggttcaacgatcgtcgatacaaaatgcgtcaagaatctagagtttagcgttcgtatcggagacatgtgcaaggaatcatctgaacttgaggtcaaggatggattcaagtatgtcgacggatcggcatctgaaggtgcaaccgatgatacttcactcatcgattcaacaaaactcaaagcgtgtgtctgaatcgataactctattcatctgaaattggatgagtagggttaatcgaacgattcaggcacaccacgaattaaaaaagtgtaccggacactatattccggtttgcaaaacaaaaatgttcttaactacattcacaaaaagttacctctcgcgacttcttctttttctgtctcaatagtgtgatacgattatgacactattcctattcctattcctatttcctttcagagtatcacaaaaatattaaacctctttctgatggtctcataaaaaaagttttacaaaaatatttttattctctttctctctttgatggtctcataaaaaaagttttacaaaaatatttttattctctttctctctttgatggtctcataaaaaaagttttacaaaaatatttttattctctttctctctttgatggtctcataaaaaaagttttacaaaaatatttttattctctttctctctttgatggtctcataaaaaaagttttacaaaaatatttttattctctttctctctttgatggtctcataaaaaaagttttacaaaaatatttttattctctttctctctttgatggtctcataaaaaaagttttacaaaaatatttttattctctttctctctttgatggtctcataaaaaaagttttacaaaaatatttttattctctttctctctttgatggtctcataaaaaaagttttacaaaaatatttttattctctttctctctttgatggtctcataaaaaaagttttacaaaaatatttttattctctttctctctttgatggtctcataaaaaaagttttacaaaaatatttttattctctttctctctttgatggtctcataaaaaaagttttacaaaaatatttttattctctttctctctttgatggtctcataaaaaagttttacaaaaatatttttattctctttctctctttgatggtctcataaaaaagttttacaaaaatatttttattctctttctctctttgatggtctcataaaaaaagttttacaaaaatatttttattctctttctctctttgatggtctcataa

SEQ ID NO: 7 - DNA, 199502 bp, Artificial Sequence
  GLV-1h254 genome
ttatgagaccatcaaagagagaaagagaataaaaatatttttgtaaaactttttttatgagaccatcaaagagagaaagagaataaaaatatttttgtaaaacttttttatgagaccatcaaagagagaaagagaataaaaatatttttgtaaaacttttttatgagaccatcaaagagagaaagagaataaaaatatttttgtaaaactttttttatgagaccatcaaagagagaaagagaataaaaatatttttgtaaaactttttttatgagaccatcaaagagagaaagagaataaaaatatttttgtaaaactttttttatgagaccatcaaagagagaaagagaataaaaatatttttgtaaaactttttttatgagaccatcaaagagagaaagagaataaaaatatttttgtaaaactttttttatgagaccatcaaagagagaaagagaataaaaatatttttgtaaaactttttttatgagaccatcaaagagagaaagagaataaaaatatttttgtaaaactttttttatgagaccatcaaagagagaaagagaataaaaatatttttgtaaaactttttttatgagaccatcaaagagagaaagagaataaaaatatttttgtaaaactttttttatgagaccatcaaagagagaaagagaataaaaatatttttgtaaaactttttttatgagaccatcaaagagagaaagagaataaaaatatttttgtaaaactttttttatgagaccatcaaagagagaaagagaataaaaatatttttgtaaaactttttttatgagaccatcagaaagaggtttaatatttttgtgatactctgaaaggaaataggaataggaataggaatagtgtcataatcgtatcacactattgagacagaaaaagaagaagtcgcgagaggtaactttttgtgaatgtagttaagaacatttttgttttgcaaaccggaatatagtgtccggtacacttttttaattcgtggtgtgcctgaatcgttcgattaaccctactcatccaatttcagatgaatagagttatcgattcagacacacgctttgagttttgttgaatcgatgagtgaagtatcatcggttgcaccttcagatgccgatccgtcgacatacttgaatccatccttgacctcaagttcagatgattccttgcacatgtctccgatacgaacgctaaactctagattcttgacgcattttgtatcgacgatcgttgaaccgatgatatcttcgtaactcactttcttatgagagatgttagacccgagtactggatgggtcttgatgtcgctgtctttctcttcttcgctacatctgatgtcgatagacacttcacagtctttgatcatagcaagagcttcttcatgagtgatcgcgggagagtccttaccttgtcctggggacacgctggacaatctagcattcactgtgtttccatcagcggattctgagatggatttaatctgaggacatttggtgaatccaaagttcattctcagacctccaccgatgatggagtaataagtggtaggaggatctacatcctcgactgatgtggaatcatcttctgattccacctcgggatctggatctgactcggactctgtaatttccgttacggattggcaaatcttatcattggtcggtgtttggtcttgctttgtgactttgataataacatcgattcccatatgatgtttgttttcttcttccgtacacgaggaggaggatgaggatgattgctgaagactggcaggcatagcagctgccgccaggcacatgcatgccaggacgatatattgtttcataattgctattgattgagtactgttctttatgattctacttccttaccgtgcaataaattagaatatattttctacttttacgagaaattaattattgtatttattatttatgggtgaaaaacttactataaaaagtgggtgggtttggaattagtgatcagtttatgtatatcgcaactaccgggcatatggctatcgacatcgagaacattacccacatgataagagattgtatcagtttcgtagtcttgagtattggtattactatatagtatatagatgtcgcccactagagttactgtctccgaatgcggcatgatagtatcattctttgctttcgttaactgtttggaggaagaatctttgttattgcatttaatctcgaaattcagagtgcacacctttctcctgtaaagaaacctgaagtcgctaccttattaagaacggagaagtatccatcacgaaatacgggattacagtctttatgattcatagtaatagttagttccgacgttgagatggattcgctgagaccggtagtggtcgtccgagtacacgacgtgtcgttaactggatacaggttaatttccacatcgatatagttaaacgtatttctgggtacgggttcgcatttatctgcggaagagacggtgtgagaatatgttccgagaccacacggagaacagatgacgtctccggatactccgtatcctattccacattttgtttgggaaacacatgccttgcatccggatgatcctttgagaagacaataatatccgggagagcattcacagattctattgtgagtcgtgttacacgatcgcgtcttccgttacaacttagacaagcgggtaaatgattattgcgagatgtgaaggtacccgaaccacacggcgtacatcgtgtgttagtcttgctatcgcataatctggaagcgtatgttcccggacacaaattatggcgtttgtattcgttgtctttacactttccatcggatggtgcatgcggtgctatatctcttccgtttattattatacatgagagaaacaatatatacgagtataatacggacttcatgatttaataatgtagtaatcgttgtcttgttcctgtttcctacttctccaatcatatagatattttctttctatcatggataatatttgtaatggttctttccgtacaacatactgtttagatgatattgcgcataatttccggaggcaaatacgatagtctagattgaccgatggtagactctaatttattgagtgctttgtcgacgagtttacttttacgctccatcgatagatggcactgttctatgagatcgtcgtacatgggaaatgaaatgtgactgtctgaatgtatggctttaagatagctgtgataccgtatacaggtcggtgtcggagattcgaatctctttgaggcgacttatgtcacgatgatggaatctatcttatcgaatgatatatttttcataaatacacttttatagtcctcgtttaaacagaatttactatgtagttccgcgaatgactcgtcccttaataggcagtaggctagtatcttttttacgtagtaatcgtcgtagggagagacatcttgtagaacaacgatttcgttttgttttctcttctgtaactgcttttctggatggccgtattgattatcgagcgtgatactcgctccatattccaataaccgctttgcaaattgtatattattgacatcgaccgcgtaatatagtagagttatcgatcatatctatatcatccatgtacttgcttagtatatcaaatacatctatcagtatggtttcataacagtgatacccgcaattattaaatctcgataatatcagaccgtacatacatagacggccattgttcgatacgtgatttacagccgcgtgtccatattttccacgataaaccttacgacgtttacatcgacgagattattattaacaaagtagtcgtgtagaggatagttgttgtccgttatctaacatgcatcgaacgaccatatcgccgtaatgtaagtagtttatcagtatggcttgtacgatggattcatcctgttgtctaaatctctttagaatgttatcgatgatgtagtggttatattctctggaatcgtacgaagtaatactacgcattacgtcgacaagagtatgacgtctctcaataagaagattaacgatttccatgtctacattatatggggttactctaaatcgcttgtttagataatacgcctctaatatagggctgacgtcgtatactctacacgtgtccacatcctttattaataataatttaacaatctctatatctatggttgagaaagaccagtagtattggatgggtaaagatcctccttcgtctctgccatggatggaaacattgttatcgatcaaacatttaattacatccttggatagagattgagattctctatgagacgatatatagtaatgaagagagttcttacacatatcactgtcgtacatacaggtacgaaatacgtaaccggtgctgtaacattctgatttaagaagccatagcaatacttctggtctcggattaggcgtcgttacgtatatatccaccaatccgagaccattgattgcataattcgtattcttggacggacgtatccgtttatccacaattaggtattttagcagacgtaagtcgatattatccgaatacagatcgaaatcatttatattcgacttgagttcgttagaggaatttgaatagctggatatcagtagatgcacaatctgagattttacgtatctatgcttactgtatactcctagcggagttaatccttcgttgtttctacaaagtctctcgactccgcgagagaacaatcttaatgtctgtatcgcatttattggagacgtaacaatgtagcgcattgtttcctcgtctatctatatgttttgataagttgtgacacgtttcaatttctagttttatttttttgtacgtcacatcttcatccagtagacgacatagaatagtgcactctctaccacaataatccatagctattctggtgctaattattcctatttcacgaaggcaatcattcctcataagatgataaaaagtgtagtggagatttagtatttagcagtgcggatatgatccaagagggtgagatagtcgttctcgttcagaatctttcgcagcataagtagtatgtcgatatacttatcgttgaagactctttataaaagtctatttgtttatatttattgcggatagcagtatttccctataaaaagtatacgtcctgtggtgtctttaatcatgtacatgaatggatggtttatgtagaccttcgtacgatataccatcgaaaagttaatcgtaaatactcctgtaacggccgatgcttctgtatactcctcattaacatctataaacgtcgtatgtagaaatttttctacagtgatagtttcattacacatcttgctaaaatctgcataatatccgaatatattagtaagtcctaaattttctaaaatcggtaccagattatacggttctgtcatttccactttaaactttggcatatacaagtctatacttttagtagataacataccacaccattttttaaatttttcatctgttatatttttttctatgttatatataccttctatgtcgtccggtagtataattaccatactagagtttccctcgtatggaatatcgataatagagaatcctccgaataattcattaatatgtacatattgcaagttattctcggtacccaccatcatatcaacgctggtaactatattcttagaaatataaaacttgtctgtatatgtaagatgtttagaaaatggatatttccacattgctttaaaatggacggcgctaacaactgtcatacgagtattaatggatagcggactagtcaataaggaattaattttaccatttgtcattgtcttaacccattcgttgattagttcctttgtttggttagcattattaaagtttacagtttgaaaatcgtcttttattttttgtaggaaggaggcgtggaactcgatactatcgctaccgtatattttatttgcggtagctagtgtcgcacaatacggaatatctacctccatgtcatcattattgtcatcgggtgtattctcattcatattctctatatattttgatagttgttcagctgtagaaccagctgctccatgatttagaatagataaagtagataaaatggaaactggagaaatcaaaacattttcatcagggtgttttaagattagttctttaaagatatccatggtatagacctaacgataacgatatatatcataaataaataatgttaaatttcaatttatgtttgtaccccgtattcatacttaacaaattggtattgcgtacacaatcaatcatattacataccattaataatgcaagcataaaaaattgttagtagatgtttctaaatataggttccgtaagcaaagaatataagaatgaagcggtaatgataaaatcaatcgttatctaaaatgatcatactcatttattttattctattatattaacacatacatttttaacagcaacacattcaatattgtattgttatttttatattatttacacaattaacaatatattattagtttatattactgaattaataatataaaattcccaatcttgtcataaacacacactgagaaacagcataaacacagaatccatcaaaaatgttgataaattatctgatgttgttgttcgctgctatgataatcagatcattcgccgatagtggtaacgctatcgaaacgacattgccagaaattacaaacgctacaacagatattccagctatcagattatgcggtccagagggagatggatattgtttacacggtgactgtatccacgctagagatattgacggtatgtattgtagatgctctcatggttatacaggcattagatgtcagcatgtagtattagtagactatcaacgttcagaaaacccaaacactacaacgtcatatatcccatctcccggtattatgcttgtattagtaggcattattatgtgttgtctattatctgtttataggttcactcgacgaactaaactacctatacaagatatggttgtgccataatttttataaatttttttatgagtatttttacaaaaatgtataaagtgtatgtcttatgtatatttataaaaatgctaagtatgcgatgtatctatgttatttgtatttatctaaacaatacctctacctctagatattatacaaaaattttttatttcggcatattaaagtaaaatctagttaccttgaaaatgaatacagtgggtggttccgtatcaccagtaagaacataatagtcaaatacagtatccgattgagattttgcatacaatactagtctagaaagaaatttgtaatcatcttctgtgacgggagtccatatatctgtatcatcgtctagtttatcagtgtcccatgctatattcctgttatcatcattagttaatgaaaataactctcgtgcttcagaaaagtcaaatattgtatccatacatacatctccaaaactatcgcttatacgtttatctttaacgatacctatacctagatggttatttactaacagacattttccagatctattgactataactcctatagtttccacatcaaccaagtaatgatcatctattgttatataacaataacataactcttttccatttttatcagtatgtatatctatatcaacgtcgtcgttgtagtgaatagtagtcattgatctattatatgaaacggatatgtctagaacggcaattgttttacgtccagttaacactttcgttgatttaaagtctagagtctttgcaaacataatatccttatccgactttatatttcctgtagggtggtataattttattttgcctccacatatcggtgtttccaaatatattactagacaatattccatatagttattagttaagggtacccaattagaacacgtacgcttattatcatcatttggatcgtatttcataaaagttattgtgttatcgatgtcaacacattctacattttttaatcgtctatatagtatttttctgatattttctataatatcagaattgtcttccatcggaagttgtatactatcggaatcagttacatgtttaaataattctctgatgtcattccttatacaatcaaattcattattaaacagtttaatagtctgtagacctttatcgtcgtaaatatccattgtcttattagttacgcttatttttatgtgtttttacgttgctttattatattttataagaatgattgtttgacgaatcacgagaactattaagacacattattaggtatatattataaaaaagtttttgattacgatgttataagaggaaagaggacacattaacatcatacatcaattaactacattcttataacatcgtaatcaaaagaattgcaattttgatgtataacaactgtcaatgggttatggaattgtatattacatattatacggtatgttggtaacgacaaataccggtcggtaattgtctgccggtgtaatagaattatatatatctatctattacaccggccttgtatacataataataagttgtggtagtatgatctccatatttataatttaggactttgtattcagtatttttggaatcataaaaaataaaaaaaagttttactaatttaaaatttaaaaagtatttacatttttttcactgtttagtcgcggatatggaattcgatcctgccaaaatcaatacatcatctatagatcatgtaacaatattacaatacatagatgaaccaaatgatataagactaacagtatgcattatccgaaatattatatcaatatcacaaaaataaatacacatttggctaatcaatttcgggcttggaaaaaacgtatcgccggaagggactatatgactaacttatctagagatacaggaatacaacaatcaaaacttactgaaactatacgtaactgtcaaaaaaatagaaacatatatggtctatatatacactacaatttagttattaattggataaccgatgtgattatcaatcaatattaagagggttggtaaattggtacatagctaataatacctatactccaaatacacccaataatacaacaaccatttctgagttggatatcatcaaaatactaaataaatacgaggacgtgtatagagtaagtaaagaaaaagaatgtggaatttgctatgaagttgtttactcaaaacgatagatactttggtttattggattcgtgtactcatatattttgcataacatgcatcaatatatggcatagaacacgaagagaaaccggtgcgtcggataattgtcctatatgccgtacccgttttagaaacataacaatgagcaagttctataagctagttaactaataaataaaaagtttaatttgttgacgacgtatgtcgttattttttctcgtataaaagattaatttgattctaatataatctttagtattggataaatatcaattcaaattaattccattagattatatcataaataaaaatagtagcacacaactacttcagcaaacattctttttataaatgccatctagcgtagcgaggacacaagtgaacctataattatcaaatttattagtatcagtcacatgaaggactttacgtagagtgacgattccactatctgtggtacgaacggtttcatcttctttgatgccatcacccagatgttctataaacttggtatcctcgtccgatttcatatcctttgccaaccaatacatatagctaaactcaggcatatgttccacacatcctgaacaatgaaattctccagaagatgttacaatgtctagatttggacatttggtttcaaccgcgttaacatatgagtgaacacacccatacatgaaagcgatgagaaataggattctcatcttgccaaaatatcactagaaaaaatttatttatcagttttaaaggtataaaaaatacttattgttgctcgaatattttgtatttgatggtatacggaagattagaaatgtaggtattatcatcaactgattctatggttttatgtattctatcatgtttcactattgcgttggaaataatatcatatgcttccacatatattttattttgttttaactcataatactcacgtaattctggattattggcatatctatgaataattttagctccatgatcagtaaatattaatgagaacatagtattaccacctaccattatttttttcatctcattcaattcttaattgcaaagatctatataatcattatagcgttgacttatggactctggaatcttagacgatgtacagtcatctataatcatggcatatttaatacattgttttatagcatagtcgttatctacgatgttagatatttctctcaatgaatcaatcacacaatctaatgtaggtttatgacataatagcattttcagcagttcaatgtttttagattcgttgatggcaatggctatacatgtatatccgttatttgatctaatgttgacatctgaaccggattctagcagtaaagatactagagattgtttattatatctaacagccttgtgaagaagtgtttctcctcgtttgtcaatcatgttaatgtctttaagataaggtaggcaaatgtttatagtactaagaattgggcaagcataagacatgtcacaaagacccttttttgtatgtataagtgtaaaaattataacatccatagttggatttacataggtgtccaatcgggatctctccatcatcgagataattgatggcatctcccttccttttttagtagatatttcatcgtgtaagaatcaatattaatatttctaaagtatccgtgtatagcctctttatttaccacagctccatattccactagagggatatcgccgaatgtcatatactcaattagtatatgttggaggacatccgagttcattgttttcaatatcaaagagatggtttccttatcatttctccatagtggtacaatactacacattattccgtgcggctttccattttccaaaaacaatttgaccaaatctaaatctacatctttattgtatctataatcactatttagataatcagccataattcctcgagtgcaacatgttagatcgtctatatatgaataagcagtgttatctattcctttcattaacaatttaacgatgtctatatctatatgagatgacttaatataatattgaagagctgtacaatagtttttatctataaaagacggcttgattccgtgattaattagacatttaacaacttccggacgcacatatgctctcgtatccgactctgaatacagatgagagatgatatacagatgcaatacggtaccgcaatttcgtagttgataatcatcatacgcgtatcagtactcgtcctcataaagaacactgcagccattttctatgaacaaatcaataattttagaaacaggatcattgtcattacataattttctataactgaacgatggttttcacatttaacactcaagtcaaatccatgttctaccaacacctttatcaagtcaacgtctacatttttggatttcatatagctgaatatattaaagttatttatgttgctaaatccagtggcttctagtagagccatcgctatatccttattaactttaacatgtctactatttgtgtattcttctaatggggtaagctgtctccaatttttgcgtaatggattagtgccactgtctagtagtagtttgacgacctcgacattattacaatgctcattaaaaaggtatgcgtgtaaagcattattcttgaattggttcctggtatcattaggatctctgtctttcaacatctgtttaagttcatcaagagccacctcctcattttccaaatagtcaaacattttgactgaatgagctactgtgaactctatacacccacacaactaatgtcattaaatatcatgtcaaaaacttgtacaattattaataaaaataatttagtgtttaaattttaccagttccagattttacacctccgttaatacctccattaaccccactggacgatcctcctccccacattccaccgccaccagatgtataagttttagatcctttattactaccatcatgtccatggataaagacactccacatgccgccactaccccctttagaagacatattaataagacttaaggacaagtttaacaataaaattaatcacgagtaccctactaccaacctacactattatatgattatagtttctatttttacagtaccttgactaaagtttctagtcacaagagcaatactaccaacctacactattatatgattatagtttctatttttataggaacgcgtacgagaaaatcaaatgtctaatttctaacggtagtgttgataaacgattgttatccgcggatacctcctctatcatgtcgtctattttcttactttgttctattaacttattagcattatatattatttgattataaaacttatattgcttattagcccaatctgtaaatatcggattattaacatatcgtttctttgtaggtttatttaacatgtacatcactgtaagcatgtccttaccatttattttaatttgacgcatatccgcaatttctttttcgcagtcggttataaattctatatatgatggatacatgctacatgtgtacttataatcgactaatatgaagtacttgatacatattttcagtaacgatttattattaccacctatgaataagtacctgtgatcgtctaggtaatcaactgttttcttaatacattcgatggttggtaatttactcagaataatttccaatatcttaatatataattctgctatttctgggatatatttatctgccagtataacacaaatagtaatacatgtaaacccatattttgttattatattaatgtctgcgccattatctattaaccattctactaggctgacactatgcgactcaatacaatgataaagtatactacatccatgtttatctattttgtttatatcatcaatatacggcttacaaagttttagtatcgataacacatccaactcacgcatagagaaggtagggaataatggcataatatttattaggttatcatcattgtcattatctacaactaagtttccattttttaaaatatactcgacaactttaggatctctattgccaaatttttgaaaatatttatttatatgcttaaatctatataatgtagctccttcatcaatcatacatttaataacattgatgtatactgtatgataagatacatattctaacaatagatcttgtatagaatctgtatatcttttaagaattgtggatattaggatattattacataaactattacacaattctaaaatataaaacgtatcacggtcgaataatagttgatcaactatataattatcgattttgtgatttttcttcctaaactgtttacgtaaatagttagatagaatattcattagttcatgaccactatagttactatcgaataacgcgtcaaatatttcccgtttaatatcgcatttgtcaagataataatagagtgtggtatgttcacgataagtataataacgcatctctttttcgtgtgaaattaaatagtttattacgtccaaagatgtagcataaccatcttgtgacctagtaataatataataatagagaactgttttacccattctatcatcataatcagtggtgtagtcgtaatcgtaatcgtctaattcatcatcccaattataatattcaccagcacgtctaatctgttctattttgatcttgtatccatactgtatgttgctacatgtaggtattcctttatccaataatagtttaaacacatctacattgggatttgatgttgtagcgtatttttctacaatattaataccatttttgatactatttatttctatacctttcgaaattagtaatttcaataagtctatattgatgttatcagaacatagatattcgaatatatcaaaatcattgatatttttatagtcgactgacgacaataacaaaatcacaacatcgtttttgatattattatttttcttggtaacgtatgcctttaatggagtttcaccatcatactcatataatggatttgcaccactttctatcaatgattgtgcactgctggcatcgatgttaaatgttttacaactatcatagagtatcttatcgttaaccatgattggttgttgatgctatcgcattttttggtttctttcatttcagttatgtatggatttagcacgtttgggaagcatgagctcatatgatttcagtactgtagtgtcagtactattagtttcaataagatcaatctctagatctatagaatcaaaacacgataggtcagaagataatgaatatctgtaggcttcttgttgtactgtaacttctggttttgttagatggttgcatcgtgctttaacgtcaatggtacaaattttatcctcgctttgtgtatcatattcgtccctactataaaattgtatattcagattatcatgcgatgtgtatacgctaacggtatcaataaacggagcacaccatttagtcataaccgtaatccaaaaatttttaaagtatatcttaacgaaagaagttgtgtcattgtctacggtgtatggtactagatcctcataagtgtatatatctagagtaatgtttaatttattaaatggttgataatatggatcctcgtgacaatttccgaagatggaaataagacataaacacgcaataaatctaattgcggacatggttactccttaaaaaaatacgaataatcaccttggctatttagtaagtgtcatttaacactatactcatattaatccatggactcataatctctatacgggattaacggatgttctatatacggggatgagtagttctcttctttaactttatactttttactaatcatatttagactgatgtatgggtaatagtgtttgaagagctcgttctcatcatcagaataaatcaatatctctgtttttttgttatacagatgtattacagcctcatatattacgtaatagaacgtgtcatctaccttattaactttcaccgcatagttgtttgcaaatacggttaatcctttgacctcgtcgatttccgaccaatctgggcgtataatgaatctaaactttaattgcttgtaatcattcgaaataatttttagtttgcatccgtagttatcccctttatgtaactgtaaatttctcaacgcgatatctccattaataatgatgtcgaattcgtgctgtatacccatactgaatggatgaacgaataccgacggcgttaatagtaatttactttttcatctttacatattgggtactagttttactatcataagtttataaattccacaagctactatggaataagccaaccatcttagtataccacacatgtcttaaagtttattaattaattacatgttgttttatatatatcgctacgaatttaaagagaaattagtttaggaagaaaaattatctatctacatcatcacgtctctgtattctacgatagagtgctactttaagatgcgacagatccgtgtcatcaaatatatactccattaaaatgattattccggcagcgaacttgatattggatatatcacaacctttgttaatatctacgacaatagacagcagtcccatggttccataaacagtgagtttatctttctttgaagagatattttgtagagatcttataaaactgtcgaatgacatcgcatttatatctttagctaaatcgtatatgttaccatcgtaatatctaaccgcgtctatcttaaacgtttccatcgctttaaagacgtttccgatagatggtctcatttcatcagtcatactgagccaacaaatataatcgtgtataacatctttgatagaatcagactctaaagaaaacgaatcggctttattatacgcattcatgataaacttaatgaaaaatgtttttcgttgtttaagttggatgaatagtatgtcttaataattgttattatttcattaattaatatttagtaacgagtacactctataaaaacgagaatgacataactaatcataactagttatcaaagtgtctaggacgcgtaattttcatatggtatagatcctgtaagcattgtctgtattctggagctattttctctatcgcattagtgagttcagaatatgttataaatttaaatcgaataacgaacataactttagtaaagtcgtctatattaactcttttattttctagccatcgtaataccatgtttaagatagtatattctctagttactacgatctcatcgttgtctagaatatcacatactgaatctacatccaattttagaaattggtctgtgttacatatctcttctatattattgttgatgtattgtcgtagaaaactattacgtagaccattttctttataaaacgaatatatagtactccaattatctttaccgatatatttgcacacataatccattctctcaatcactacatctttaagattttcgttgttaagatatttggctaaactatataattctattagatcatcaacagaatcagtatatatttttctagatccaaagacgaactctttggcgtcctctataatattcccagaaaagatattttcgtgttttagtttatcgagatctgatctgttcatatacgccatgattgtacggtacgttatgataaccgcataaaataaaaatccattttcatttttaaccaatactattcataattgagattgatgtaatactttgttactttgaacgtaaagacagtacacggatccgtatctccaacaagcacgtagtaatcaaatttggtgttgttaaacttcgcaatattcatcaatttagatagaaacttatactcatcatctgttttaggaatccatgtattattaccactttccaacttatcattatcccaggctatgtttcgtccatcatcgttgcgcagagtgaataattcttttgtattcggtagttcaaatatatgatccatgcatagatcggcaaagctattgtagatgtgatttttcctaaatctaatataaaactcgtttactagcaaacactttcctgatttatcgaccaagacacatatggtttctaaatctatcaagtggtggggatccatagttatgacgcagtaacatatattattacattcttgactgtcgctaatatctaaatatttattgttatcgtattggattctgcatatagatggcttgtatgtcaaagatatagaacacataaccaatttatagtcgcgctttacattctcgaatctaaagttaagagatttagaaaacattatatcctcggatgatgttatcactgtttctggagtaggatatattaaagtctttacagatttcgtccgattcaaataaatcactaaataatatcccacattatcatctgttagagtagtatcattaaatctattatattttatgaaagatatatcactgctcacctctatatttcgtacatttttaaactgtttgtataatatctctctgatacaatcagatatatctattgtgtcggtagacgataccgttacatttgaattaatggtgttccattttacaacttttaacaagttgaccaattcatttctaatagtatcaaactctccatgattaaatattttaatagtatccattttatatcactacggacacaaagtagctgacataaaccattgtataatttttatgttttatgtttattagcgtacacattttggaagttccggcttccatgtatttcctggagagcaagtagatgatgaggaaccagatagtttatatccgtacttgcacttaaagtctacattgtcgttgtatgagtatgatcttttaaacccgctagacaagtatccgtttgatattgtaggatgtggacatttaacaatctgacacgtgggtggatcggaccattctcctcctgaacacaggacactagagttaccaatcaacgaatatccactattgcaactataagttacaacgctcccatcggtataaaaatcctcgtatccgttatgtcttccgttggatatagatggaggggattggcatttaacagattcacaaataggtgcctcgggattccataccatagatccagtagatcctaattcacaatacgatttagattcaccgatcaactgatatccgctattacaagagtacgttatactagagccaaagtctactccaccaatatcaagttggccattatcgatatctcgaggcgatgggcatctccgtttaatacattgattaaagagtgtccatccagtacctgtacatttagcatatataggtcccattttttgctttctgtatccaggtagacatagatattctatagtgtctcctatgttgtaattagcattagcatcagtctccacactattcttaaatttcatattaatgggtcgtgacggaatagtacagcatgatagaacgcatcctattcccaacaatgtcaggaacgtcacgctctccaccttcatatttatttatccgtaaaaatgttatcctggacatcgtacaaataataaaaagcccatatatgttcgctattgtagaaattgtttttcacagttgctcaaaaacgatggcagtgacttatgagttacgttacactttggagtctcatctttagtaaacatatcataatattcgatattacgagttgacatatcgaacaaattccaagtatttgattttggataatattcgtattttgcatctgctataattaagatataatcaccgcaagaacacacgaacatctttcctacatggttaaagtacatgtacaattctatccatttgtcttccttaactatatatttgtatagataattacgagtctcgtgagtaattccagtaattacatagatgtcgccgtcgtactctacagcataaactatactatgatgtctaggcatgggagacttttttatccaacgatttttagtgaaacattccacatcgtttaatactacatatttctcatacgtggtataaactccacccattacatatatatcatcgtttacgaataccgacgcgcctgaatatctaggagtaattaagtttggaagtcttatccatttcgaagtgccgtgtttcaaatattctgccacacccgttgaaatagaaaattctaatcctcctattacatataactttccatcgttaacacaagtactaacttctgattttaacgacgacatattagtaaccgttttccattttttcgttttaagatctacccgcgatacggaataaacatgtctattgttaatcatgccgccaataatgtatagacaattatgtaaaacatttgcattatagaattgtctatctgtattaccgactatcgtccaatattctgttctaggagagtaatgggttattgtggatatataatcagagtttttaatgactactatattatgttttataccatttcgtgtcactggctttgtagatttggatatagttaatcccaacaatgatatagcattgcgcatagtattagtcataaacttgggatgtaaaatgttgatgatatctacatcgtttggatttttatgtatccactttaataatatcatagctgtaacatcctcatgatttacgttaacgtcttcgtgggataagatagttgtcagttcatcctttgataattttccaaattctggatcggatgtcaccgcagtaatattgttgattatttctgacatcgacgcattatatagttttttaattccatatcttttagaaaagttaaacatccttatacaatttgtgaaattaatattatgaatcatagtttttacacatagatctactacaggcggaacatcaattattatggcagcaactagtatcatttctacattgtttatggtgatgtttatcttcttccagcgcatatagtctaatagcgattcaaacgcgtgatagtttataccattcaatataatcgcttcatcctttagatggtgatcctgaatgcgtttaaaaaaattatacggagacgccgtaataatttccttattcacttgtataatttccccattgatagaaaatattacgctttccattcttaaagtactataagtaattatagtataatgtaaacgtttatatattcaatatttttataaaaatcattttgacattaattcctttttaaatttccgtctatcatctatagaaacgtattctatgaatttataaaatgcttttacgtgtcctatcgtaggcgatagaaccgctaaaaagcctatcgaatttctacaaaagaatctgttatatggtatagggagagtataaaacattaaatgtccgtacttattaaagtattcagtagccaatcctaactctttcgaatacttattaatggctcttgttctgtacgaatctatttttttgaacaacggacctagtggtatatcttgttctatgtatctaaaataatgtctgactagatccgttagtttaatatccgcagtcatcttgtctagaatggcaaatctaactgcgggtttaggctttagtttagtttctatatctacatctatgtctttatctaacaccaaaaatataatagctaatattttattacaatcatccggatattcttctacgatctcactaactaatgtttctttggttatactagtatagtcactatcggacaaataaagaaaatcagatgatcgatgaataatacatttaaattcatcatctgtaagatttttgagatgtctcattagaatattattagggttagtactcattatcattcggcagctattacttattttattatttttcaccatatagatcaatcattagatcatcaaaatatgtttcaatcatcctaaagagtatggtgaatgactcttcccatctaatttctgaacgttcaccaatgtctctagccactttggcactaatagcgatcattcgcttagcgtcttctatattattaactggttgatttaatctatctagcaatggaccgtcggacagcgtcattctcatgttcttaatcaatgtacatacatcgccgtcatctaccaattcatccaacaacataagctttttaaaatcatcattataataggtttgatcgttgtcatttctccaaagaatatatctaataagtagagtcctcatgcttagttaacaactattttttatgttaaatcaattagtacaccgctatgtttaatacttattcatattttagtttttaggattgagaatcaatacaaaaattaatgcatcattaattttagaaatacttagtttccacgtagtcaatgaaacatttgaactcatcgtacaggacgttctcgtacaggacgtaactataaaccggtttatatttgttcaagatagatacaaatccgataactttttttacgaattctacgggatccactttaaaagtgtcataccgggttctttttatttttttaaacagatcaatggtgtgatgttgattaggtcttttacgaatttgatatagaatagcgtttacatattctccataatggtcaatcgccatttgttcgtatgtcataaattctttaattatatgacactgtgtattatttagttcatccttgttcattgttaggaatctatccaaaatggcaattatactagaactataggtgcgttgtatacacatattgatgtgtctgtttatacaatccatgatatttggatccatgctactaccttcgggtaaaattgtagcatcatataccatttctagtactttaggttcattattatccattgcagaggacgtcatgatcgaatcataaaaaaatatattatttttatgttattttgttaaaaataatcatcgaatacttcgtaagatactccttcatgaacataatcagttacaaaacgtttatatgaagtaaagtatctacgatttttacaaaagtccggatgcataagtacaaagtacgcgataaacggaataataatagatttatctagtctatctttttctatagctttcatagttagatacatggtctcagaagtaggattatgtaacatcagcttcgataaaatgactgggttatttagtcttacacattcgctcatacatgtatgaccgttaactacagagtctacactaaaatgattgaacaatagatagtctaccattgtttcgtattcagatagtacagcgtagtacatggcatcttcacaaattatatcattgtctaatagatatttgacgcatcttatggatcccacttcaacagccatcttaaaatcatattgctttcctttatcattaataatttctagaacatcatctctatcataaaagatacaaatattaactgtttgatccgtaataacattgctagtcaatagcaatttgttaataagatgcgctgggctcaatgtcttaataagaagtgtaagaggactatctccgaatttgttttgtttattaacatccgttgatggaagtaaaagatctataatgtctacattcttgactgttttagagcatacaatatggagaggtgtatttccatcatgatctggttttgagggactaattcctagtttcatcatccatgagattgtagaagcttttggattgtctgacataagatgtctatgaatatgatttttgccaaatttatccactatcctggcttcgaatccgatggacattatttttttaaacactctttctgaaggatctgtacacgccaacaacggaccacatccttcttcatcaaccgagttgttaatcttggctccatactgtaccaataaatttattctctctatgacttcatcatctgttcccgagagataatatagaggtgttttatgctgtttatcacacgcgtttggatctgcgccgtgcgtcagcagcatcgcgactattctattattattaattttagaagctatatgcaatggataatttccatcatcatccgtctcatttggagagtatcctctatgaagaagttcttcgacaaatcgttcatctagtcctttaattccacaatacgcatgtagaatgtgataattatttccagaaggttcgatagcttgtagcatattcctaaatacatctaaatttttactattatatttggcataaagagatagataatactcggccgacataatgttgtccattgtagtataaaaattaatatttctatttctatttctgtatatttgcaacaatttactctctataacaaatatcataacttagtttttttatgtcaagaaggcactggtttagttcatctataaatgtcacgccataactaccacgcatgccatactcagaattatgataaagatatttatccttggggtgtaggtaatggggattaatctttgttggatcagtctctaagttaacacatgtcacacatgatccatttatagttatatcacacgatgatgatttatgaattgattccggaagatcgctatcgtattttgtggttccacaattcatttccatacatgttattgtcacactaatattatgatgaactttatctagccgctgagtggtaaacaacagaacagatagtttattatctttaccaacaccctcagccgctgccacaaatctctgatccgtatccatgatggtcatgtttatttctagtccgtatccagtcaacactatgttagcatttctgtcgatatagctttcactcatatgacactcaccaataatagtagaattaatgtcgtaatttacaccaatagtgagttcggcggcaaagtaccaataccggtaatcttgtcgaggaggacatatagtattcttgtattctaccgaatacccgagagatgcgatacaaaagagcaagactaatttgtaaaccatcttactcaaaatatgtaacaatagtacgatgcaatgagtaagacaataggaaatctatcttatatacacataattattctatcaattttaccaattagttagtgtaatgttaacaaaaatgtgggagaatctaattagtttttctttacacaattgacgtacatgagtctgagttccttgtttttgctaattatttcatccaatttattattcttgacgatatcgagatcttttgtataggagtcaaacttgtattcaacatgcttttctataatcattttagctatttcggcatcatccaatagtacattttccagattagcagaatagatattaatgtcgtatttgaacagagcctgtaacatctcaatgtctttattatctatagccaatttaatgtccggaatgaagagaagggaattattggtgtttgtcgacgtcatatagtcgagcaagagaatcatcatatccacgtgtccattttttatagtgatgtgaatacaactaaggagaatagccagatcaaaagtagatggtatctctgaaagaaagtaggaaacaatacttacatcattaagcatgacggcatgataaaatgaagttttccatccagttttcccatagaacatcagtctccaatttttcttaacaaacagttttaccgtttgcatgttaccactatcaaccgcataatacaatgcggtgtttcccttgtcatcaaattgtgaatcatccagtccactgaatagcaaaatctttactattttggtatcttccaatgtggctgcctgatgtaatggaaattcattctctagaagatttttcaatgctccagcgttcaacaacgtacatactagacgcacgttattatcagctattgcataatacaaggcactatgtccatggacatccgccttaaatgtatctttactagagagaaagcttttcagctgcttagacttccaagtattaattcgtgacagatccatgtctgaaacgagacgctaattagtgtatattttttcattttttataattttgtcatattgcaccagaattaataatatctttaatagatctgattagtagatacatggctatcgcaaaacaacatatacacatttaataaaaataatatttattaagaaaattcagatttcacgtacccatcaatataaataaaataatgattccttacaccgtacccatattaaggagattccaccttacccataaacaatataaatccagtaatatcatgtctgatgatgaacacaaatggtgtattaaattccagtttttcaggagatgatctcgccgtagctaccataatagtagatgcctctgctacagttccttgttcgtcgacatctatctttgcattctgaaacattttataaatatataatgggtccctagtcatatgtttaaacgacgcattatctggattaaacatactaggagccatcatttcggctatcgacttaatatccctcttattttcgatagaaaatttagggagtttaagattgtacactttattccctaattgagacgaccaatagtctaattttgcagccgtgatagaatctgtgaaatgggtcatattatcacctattgccaggtacatactaatattagcatccttatacggaaggcgtaccatgtcatattctttgtcatcgattgtgattgtatttccttgcaatttagtaactacgttcatcatgggaaccgttttcgtaccgtacttattagtaaaactagcattgcgtgttttagtgatatcaaacggatattgccatatacctttaaaatatatagtattaatgattgcccatagagtattattgtcgagcatattagaatctactacattagacataccggatctacgttctactatagaattaattttattaaccgcatctcgtctaaagtttaatctatataggccgaatctatgatattgttgataatacgacggtttaatgcacacagtattatctacgaaactttgataagttagatcagtgtacgtatatttagatgttttcagcttagctaatcctgatattaattctgtaaatgctggacccagatctctttttctcaaatccatagtcttcaataattctattctagtattacctgatgcaggcaatagcgacataaacatagaaaacgaataaccaaacggtgagaagacaatattatcatcttgaatatttttatacgctactataccggcattggtaaatccttgtagacgataggcggacgctgaacacgctaacgatagtatcaataacgcaatcatgattttatggtattaataattaaccttatttttatgttcggtataaaaaaattattgatgtctacacatccttttgtaattgacatctatatatccttttgtataatcaactctaatcactttaacttttacagttttccctaccagtttatccctatattcaacatatctatccatatgcatcttaacactctctgccaagatagcttcagagtgaggatagtcaaaaagataaatatatagagcataatcattctcgtatactctgccctttattacatcacccgcattgggcaacgaataacaaaatgcaagcatcttgttaacgggctcgtaaattgggataaaaattatgtttttattgtcttatatctattttattcaagagaatattcaggaatttctttttccggttgtatctcgtcgcagtatatatcatttgtacattgtttcatattttttaatagtttacaccttttagtaggactagtatcgtacaattcatagctgtattttgaattccaatcacgcataaaaatatcttccaattgttgacgaagacctaatccatcatccggtgtaatattaatagatgctccacatgtatccgtaaagtaatttcctgtccaatttgaggtacctatataggccgttttatcggttaccatatatttggcatggtttaccctagaatacggaatgggaggatcagcatctggtacaataaatagctttacttctatatttatgtttttagattttagcatagcgatagatcttaaaaagtttctcatgataaacgaagatcgttgccagcaactaatcaatagcttaacggatacttgtctgtctatagcggatcttcttaattcatcttctatataaggccaaaacaaaattttacccgccttcgaataaataatagggataaagttcataacagatacataaacgaatttactcgcatttctaatacatgacaataaagcggttaaatcattggttctttccatagtacatagttgttgcggtgcagaagcaataaatacagagtgtggaacgccgcttacgttaatactaagaggatgatctgtattataatacgacggataaaagtttttccaattatatggtagattgttaactccaagataccagtatacctcaaaaatttgagtgagatccgctgccaagttcctattattgaagatcgcaatacccaattccttgacctgagttagtgatctccaatccatgttagcgcttcctaaataaatatgtgtattatcagatatccaaaattttgtatgaagaactcctcctaggatatttgtaatatctatgtatcgtacttcaactccggccatttgtagtctttcaacatcctttaatggtttgttagatttattaacggctactctaactcgtactcctcttttgggtaattgtacaatctcgtttaatattatcgtgccgaaattcgtacccacttcatccgataaactccaataaaaagatgatatatctagtgtttttgtggtattggatagaatttccctccacatgttaaatgtagacaaatatactttatcaaattgcatacctataggaatagtttctgtaatcactgcgattgtattatccggattcattttatttgttaaaagaataatcctatatcacttcactctattaaaaatccaagtttctatttctttcatgactgattttttaacttcatccgtttccttatgaagatgatgtttggcaccttcataaatttttatttctctattacaatttgcatgttgcatgaaataatatgcacctaaaacatcgctaatcttattgtttgttccctggagtatgagagtcggggggtgttaatcttggaaattatttttctaaccttgttggtagccttcaagacctgactagcaaatccagccttaattttttcatgattgactaatgggtcgtattggtatttataaactttatccatatctctagatactgattctggacatagctttccgactggcgcatttggtgtgatggttcccataagtttggcagctagcagattcagtcttgaaacagcatctgcattaactagaggagacattagaatcattgctgtaaacaagtttggattatcgtaagaggctagctcccatggaatgacccaataagtagatttaatagttaccacgtgctgtaccaaagtcatcaatcatcattttttcaccattacttcttccatgtccaatatgatcatgtgagaatactaaaattcctaacgatgatatgttttcagctagttcgtcataacgtccagaatgtttaccagctccatgacttatgaatactaatgccttaggatatgtaataggtttccaatatttacaatatatgtaatcattgtccagattgaacatacagtttgcactcatgattcacgttatataactatcaatattaacagttcgtttgatgatcatattatttttatgttttattgataattgtaaaaacatacaattaaatcaatatagaggaaggagacggctactgtcttttgtaagatagtcatggcgactaaattagattatgaggatgctgttttttactttgtggatgatgataaaatatgtagtcgcgactccatcatcgatctaatagatgaatatattacgtggagaaatcatgttatagtgtttaacaaagatattaccagttgtggaagactgtacaaggaattgatgaagttcgatgatgtcgctatacggtactatggtattgataaaattaatgagattgtcgaagctatgagcgaaggagaccactacatcaattttacaaaagtccatgatcaggaaagtttattcgctaccataggaatatgtgctaaaatcactgaacattggggatacaaaaagatttcagaatctagattccaatcattgggaaacattacagatttgatgaccgacgataatataaacatcttgatactttttctagaaaaaaaattgaattgatgatataggggtcttcataacgcataattattacgttagcattctatatccgtgttaaaaaaaattatcctatcatgtatttgagagttttatatgtagcaaacatgatagctgtgatgccaataagctttagatattcacgcgtgctagtgttagggatggtattatctggtggtgaaatgtccgttatataatctacaaaacaatcatcgcatatagtatgcgatagtagagtaaacatttttatagtttttactggattcatacatcgtctacccaattcggttataaatgaaattgtcgccaatcttacacccaaccccttgttatccattagcatagtattaacttcgttatttatgtcataaactgtaaatgattttgtagatgccatatcatacatgatattcatgtccctattataatcattactaactttatcacaatatatgttgataatatctatatatgatctagtctttgtgggcaactgtctatacaagtcgtctaaacgttgtttactcatatagtatcgaacagccatcattacatggtcccgttccgttgatagataatcgagtatgttagtggacttgtcaaatctatataccatattttctggaagtggatatacatagtcgtgatcaacattattgctagcctcatcttctatatcctgtactataccattatctatatcatctacataatctatgatattattacacataaacatcgacaacatactattgtttattatctaagtcctgttgatccaaacccttgatctcctctatttgtactatctagagattgtacttcttccagttctggataatatatacgttgatagattagctgagctattctatctccagtatttacattaaacgtacattttccattattaataagaatgactcctatgtttcccctataatcttcgtctattacaccacctcctatatcaatgccttttagtgacagaccagacctaggagctattctaccatagcagaacttaggcatggacatactaatatctgtcttaattaactgtctttctcctggagggatagtataatcgtaagcgctatacaaatcatatccggcagcacccggcgattgcctagtaggagatttagctctgttagtttccttaacaaatctaactggtgagttaatattcatgttgaacataaaactaatattttatttcaaaattatttaccatcccatatattccatgaataagtgtgatgattgtacacttctatagtatctatatacgatccacgataaaatcctcctatcaatagcagtttattatccactatgatcaattctggattatccctcggataaataggatcatctatcagagtccatgtattgctggattcacaataaaattccgcatttctaccaaccaagaataaccttctaccgaacactaacgcgcatgatttataatgaggataataagtggatggtccaaactgccactgatcatgattgggtagcaaatattctgtagttgtatcagtttcagaatgtcctcccattacgtatataacattgtttatggatgccactgctggattacatctaggtttcagaagactcggcatattaacccaagcagcatccccgtggaaccaacgctcaacagatgtgggatttggtagacctcctactacgtataatttattgttagcgggtatcccgctagcatacagtctggggctattcatcggaggaattggaatccaattgtttgatatataatttacagctatagcattgttatgtatttcattgttcatccatccaccgatgagatatactacttctccaacatgagtacttgtacacatatggaatatatctataatttgatccatgttcataggatactctatgaatggatacttgtatgatttgcgtggttgtttatcacaatgaaatattttggtacagtctagtatccattttacattatttatacctctgggagaaagataatttgacctgattacatttttgataaggagtagcagatttcctaatttatttcttcgcctcatataccacttaatgacaaaatcaactacataatcctcatctggaacatttagttcatcgctttctagaataagtttcatagatagataatcaaaattgtctatgatgtcatcttccagttccaaaaagtgtttggcaataaagtttttagtatgacataagagattggatagtccgtattctatacccatcatgtaacactcgacacaatattcctttctaaaatctcgtaagataaagtttatacaagtgtagatgataaattctacagaggttaatatagaagcacgtaataaattgacgacgttatgactatctatatatacctttccagtatatgagtaaataactatagaagttaaactgtgaatgtcaaggtctagacaaacccttgtaactggatctttatttttcgtgtatttttgacgtaaatgtgtgcgaaagtaaggagataactttttcaatatcgtagaattgactattatattgcctcctatggcatcaataattgttttgaatttcttagtcatagacaatgctaatatattcttacagtacacagtattgacaaatatcggcatttatgtttctttaaaagtcaacatctagagaaaaatgattatctttttgagacataactcccattttttggtattcacccacacgtttttcgaaaaaattagtttttccttccaatgatatattttccatgaaatcaaacggattggtaacattataaatttttttaaatcccaattcagaaatcaatctatccgcgacgaattctatatatgttttcatcatttcacaattcattcctataagtttaactggaagagccgcagtaagaaattcttgttcaatggatactgcatctgttataatagatctaacggtttcttcactcggtggatgcaataaatgtttaaacatcaaacatgcgaaatcgcagtgcagaccctcgtctctactaattagttcgttggaaaacgtgagtccgggcattaggccacgctttttaagccaaaatatggaagcgaatgatccagaaaagaaaattccttctactgcagcaaaggcaataagtctctctccataaccggcgctgtcatgtatccacttttgagcccaatcggccttcttttttacacaaggcatcgtttctatggcattaaagagatagtttttttcattactatctttaacataagtatcgatcaaaagactatacatttccgaatgaatgttttcaatggccatctgaaatccgtagaaacatctagcctcggtaatctgtacttctgtacaaaatcgttccgccaaattttcattcactattccgtcactggctgcaaaaaacgccaatacatgttttataaaatatttttcgtctggtgttagtttattccaatcattgatatctttagatatatctacttcttccactgtccaaaatgatgcctctgcctttttatacatgttccagatgtcatgatattggattgggaaaataacaaatctatttggatttggtgcaaggatgggttccataactaaattaacaataacaataaattttttttcagttatctatatgcctgtacttggattttttgtacatcgatatcgccgcaatcactacaataattacaagtattattgatagcattgttattagtactatcataattaaattatctacattcatgggtgctgaataatcgttattatcatcattatcattttgtaattgtgacatcatactagataaatcgtttgcgagattgttgtgggaagcgggcatggaggatgcattatcattattatttaacgccttccatttggattcacaaatgttacgcacattcaacattttatggaaactataattttgtgaaaacaaataacaagaaaactcgtcatcgttcaaatttttaacgatagtaaaccgattaaacgtcgagctaatttctaacgctagcgactctgttggatatgggtttccagatatatatcttttcagttcccctacgtatctataatcatctgtaggaaatggaagatatttccatttatctactgttcctaatatcatatgtggtggtgtagtagaaccattaagcgcgaaagatgttatttcgcatcgtattttaacttcgcaataatttctggttagataacgcactctaccagtcaagtcaatgatattagcctttacagatatattcatagtagtcgtaacgatgactccatcttttagatgcgatactcctttgtatgtaccagaatcttcgtacctcaaactcgatatatttaaacaagttaatgagatattaacgcgttttatgaatgatgatatataaccagaagttttatcctcggtggctagcgctataaccttatcattataataccaactagtgtgattaatatgtgacacgtcagtgtgggtacaaatatgtacattatcgtctacgtcgtattcgatacatccgcatacagccaacaaatataaaatgacaaatactctaacgccgttcgtacccatcttgatgcggtttaataaatgttttgatttcaatttattgtaaaaaaagattcggttttatactgttcgatattctcattgcttatattttcatctatcatctccacacagtcaaatccgtggttagcatgcacctcatcaaccggtaaaagactatcggactcttctatcattataactctagaatatttaatttggtcattattaatcaagtcaattatcttatttttaacaaacgtgagtattttactcattttttataaaaacttttagaaatatacagactctatcgtgtgtctatatcttctttttatatccaatgtatttatgtctgatttttcttcatttatcatatataatggtccaaattctacacgtgcttcggattcatccagatcattaaggttcttataattgtaacatccttctcttccctcttctacatcttccttcttattcttattcttagcgtcacagaatctaccacagcaggatcccatgacgagcgtcatattaaactaatccattttcaattataatatatgattagtaatgaccattaaaataaaaaatattcttcataaccggcaagaaagtgaaaagttcacattgaaactatgtcagtagtatacatcatgaaatgatgatatatatatactctattttggtggaggattatatgatataattcgtggataatcatttttaagacacatttctttattcgtaaatcttttcacgttaaatgagtgtccatattttgcaatttcttcatatgatggcggtgtacgtggacgaggctgctcctgttcttgttgtggtcgccgactgtcgtgtctgcgtttagatccctccattatcgcgattgcgtagatggagtactattttataccttgtaattaaatttttttattaattaaacgtataaaaacgttccgtatctgtatttaagagccagatttcgtctaatagaacaaatagctacagtaaaaataactagaataattgctacacccactagaaaccacggatcgtaatacggcaatcggttttcgataataggtggaacgtatattttatttaaggacttaacaattgtctgtaaaccacaatttgcttccgcggatcctgtattaactatctgtaaaagcatatgttgaccgggcggagccgaacattctccgatatctaatttctgtatatctataatattattaacctccgcatacgcattacagttcttttctagcttggataccgcactaggtacatcgtctagatctattcctatttcctcagcgatagctcttctatccttttccggaagcaatgaaatcacttcaataaatgattcaaccatgagtgtgaaactaagtcgagaattactcatgcatttgttagttattcggagcgcgcaatttttaaactgtcctataacctctcctatatgaatagcacaagtgacattagtagggatagaatgttgagctaatttttgtaaataactatctataaaaagattatacaaagttttaaactctttagtttccgccatttatccagtctgagaaaatgtctctcataataaatttttccaagaaactaattgggtgaagaatggaaacctttaatctatatttatcacagtctgttttggtacacatgatgaattcttccaatgccgtactaaattcgatatctttttcgatttctggatatgtttttaataaagtatgaacaaagaaatggaaatcgtaataccagttatgtttaactttgaaattgttttttattttcttgttaatgattccagccacttgggaaaagtcaaagtcgtttaatgccgatttaatacgttcattaaaaacaaactttttatcctttagatgaattattattggttcattggaatcaaaaagtaagatattatcgggtttaagatctgcgtgtaaaaagttgtcgcaacagggtagttcgtagattttaatgtataacagagccatctgtaaaaagataaactttatgtattgtaccaaagatttaaatcctaatttgatagctaactcggtatctactttatctgccgaatacagtgctaggggaaaaattataatgtttcctctttcatattcgtagttagttctcttttcatgttcgaaaaagtgaaacatgcggttaaaatagtttataacattaatattactgttaataactgccggataaaagtgggatagtaatttcacgaatttgatactgtcctttctctcgttaaacgcctttaaaaaaactttagaagaatatctcaatgagagttcctgaccatccatagtttgtatcaataatagcaacatatgaagaacacgtttatacagagtatgtaaaaatgttaatttatagtttaatcccatggcccacgcacacacgattaattttttttcatctccctttagattgttgtatagaaatttgggtactgtgaactccgccgtagtttccatgggactatataattttgtggcctcgaatacaaattttactacatagttatctatcttaaagactataccatatcctcctgtagatatgtgataaaaatcgtcgtttataggataaaatcgtttatccttttgttggaaaaaggatgaattaatgtaatcattctcttctatctttagtagtgtttccttattaaaattcttaaaataatttaacaatctaactgacggagcccaattttggtgtaaatctaattgggacattatattgttaaaatacaaacagtctcctaatataacagtatctgataatctatggggagacatccattgatattcaggggatgaatcattggcaacacccatttattgtacaaaaagccccaatttacaaacgaaagtccaggtttgatagagacaaacaattaactattttgtctctgtttttaacacctccacagtttttaatttctttagtaatgaaattattcacaatatcagtatcttctttatctaccagagattttactaacttgataaccttggctgtctcattcaatagggtagtaatatttgtatgtgtgatattgatatctttttgaattgtttcttttagaagtgattctttgatggtgccagcatacgaattacaataatgcagaaactcggttaacatgcaggaattatagtaagccaattccaattgttgcctgtgttgtattagagtgtcaatatgagcaatggtgtccttgcgtttctctgatagaatgcgagcagcgattttggcgttatcatttgacgatatttctggaatgacgaatcctgtttctactaactttttggtaggacaaagtgaaacaatcaagaagatagcttctcctcctatttgtggaagaaattgaactcctctagatgatctactgacgatagtatctccttgacagatattggaccgaattacagaagtacctggaatgtaaagccctgaaaccccctcattttttaagcagattgttgccgtaaatcctgcactatgcccaagatagagagctcctttggtgaatccatctctatgtttcagtttaaccaagaaacagtcagctggtctaaaatttccatctctatctaatacagcatctaacttgatgtcaggaactatgaccggtttaatgttatatgtaacattgagtaaatccttaagttcataatcatcactgtcatcagttatgtacgatccaaacaatgtttctaccggcatagtggatacgaagatgctatccatcagaatgtttccctgattagtattttctatatagctattcttctttaaacgattttccaaatcagtaactatgttcatttttttaggagtaggacgcctagccagtatggaagaggattttctagatcctctcttcaacatctttgatctcgatggaatgcaaaaccccatagtgaaacaaccaacgataaaaataatattgtttttcactttttataattttaccatctgactcatggattcattaatatctttataagagctactaacgtataattctttataactgaactgagatatatacaccggatctatggtttccataattgagtaaatgaatgctcggcaataactaatggcaaatgtatagaacaacgaaattatactagagttgttaaagttaatattttctatgagctgttccaataaattatttgttgtgactgcgttcaagtcataaatcatcttgatactatccagtaaaccgtttttaagttctggaatattatcatcccattgtaaagcccctaattcgactatcgaatatcctgctctgatagcagtttcaatatcgacggacgtcaatactgtaataaaggtggtagtattgtcatcatcgtgataaactacgggaatatggtcgttagtaggtacggtaactttacacaacgcgatatataactttccttttgtaccatttttaacgtagttgggacgtcctgcagggtattgttttgaagaaatgatatcgagaacagatttgatacgatatttgttggattcctgattattcactataatataatctagacagatagatgattcgataaatagagaaggtatatcgttggtaggataatacatccccattccagtattctcggatactctattgatgacactagttaagaacatgtcttctattctagaaaacgaaaacatcctacatggactcattaaaacttctaacgctcctgattgtgtctcgaatgcctcgtacaaggatttcaaggatgccatagattctttgaccaacgatttagaattgcgtttagcatctgatttttttattaaatcgaatggtcggctctctggtttgctaccccaatgataacaatagtcttgtaaagataaaccgcaagaaaatttatacgcatccatccaaataaccctagcaccatcggatgatattaatgtattattatagattttccatccacaattattgggccagtatactgttagcaacggtatatcgaatagattactcatgtaacctactagaatgatagttcgtgtactagtcataatatctttaatccaatctaaaaaatttaaaattagattttttacactgttaaagttaacaaaagtattacccgggtacgtggatatcatatatggcattggtccattatcagtaatagctccataaactgatacggcgatggtttttatatgtgtttgatctaacgaggaagaaattcgcgcccacaattcatctctagatatgtatttaatatcaaacggtaacacatcaatttcgggacgcgtatatgtttctaaatttttaatccaaatataatgatgacctatatgccctattatcatactgtcaactatagtacacctagggaacttacgatacatctgtttcctataatcgttaaattttacaaatctataacatgctaaaccttttgacgacagccattcattaatttctgatatggaatctgtattctcgataccgtatcgttctaaagccagtgctatatctccctgttcgtgggaacgctttcgtataatatcgatcaacggataatctgaagtttttggagaataatatgactcatgatctatttcgtccataaacaatctagacataggaattggaggcgatgatcttaattttgtgcaatgagtcgtcaatcctataacttctaatcttgtaatattcatcatcgacataatactatctatgttatcatcgtatattagtataccatgaccttcttcatttcgtgccaaaatgatatacagtcttaaatagttacgcaatatctcaatagtttcataattgttagctgttttcatcaaggtttgtatcctgtttaacatgatggcgttctataacgtctctattttctatttttaattttttaaatttttaacgatttactgtggctagatacccaatctctctcaaatatttttttagcctcgcttacaagctgtttatctatactattaaaactgacgaatccgtgattttggtaatgggttccgtcgaaatttgccgaagtgatatgaacatattcgtcgtcgactatcaacaattttgtattattctgaatagtgaaaaccttcacagatagatcattttgaacacacaacgcatctagacttttggcggttgccatagaatatacgtcgttcttatcccaattaccaactagaagtctgatcttaactcctctattaatggctgcttctataatggagttgtaaatgtcgggccaatagtagctattaccgtcgacacgtgtagtgggaactatggccaaatgttcaatatctatactagtcttagctgacctgagtttatcaataactacatcggtatctagatctctagaatatcccaataggtgttccggagaatcagtaaagaacactccacctataggattcttaatatgatacgcagtgctaactggcaaacaacaagccgcagagcataaattcaaccatgaattttttgcgctattaaaggctttaaaagtatcaaatcttctacgaagatctgtggccagcgggggataatcagaatatacacctaacgttttaatcgtatgtatagatcctccagtaaatgacgcgtttcctacataacatctttcatcatctgacacccaaaaacaaccgagtagtagtcccacattattttttttatctatattaacggttataaaatttatatccgggcagtgactttgtagctctcccagatttcttttccctcgttcatctagcaaaactattattttaatccctttttcagatgcctcttttagtttatcaaaaataagcgctcccctagtcgtactcagaggattacaacaaaaagatgctatgtatatatatttcttagctagagtgataatttcgttaaaacattcaaatgttgttaaatgatcggatctaaaatccatattttctggtagtgtttctaccagcctacattttgctcccgcaggtaccgatgcaaatggccacatttagttaacataaaaacttatacatcctgttctatcaacgattctagaatatcatcggctatatcgctaaaattttcatcaaagtcgacatcacaacctaactcagtcaatatattaagaagttccatgatgtcatcttcgtctatttctatatccgtatccattgtagattgttgaccgattatcgagtttaaatcattactaatactcaatccttcagaatacaatctgtgtttcattgtaaatttataggcggtgtatttaagttggtagattttcaattatgtattaatatagcaacagtagttcttgctcctccttgattctagcatcctcttcattattttcttctacgtacataaacatgtccaatacgttagacaacacaccgacgatggcggccgcaggatcctgcgaagcttacagacacgaatatgactaaaccgatgaccatttaaaaacccctctctagctttcacttaaactgtatcgatcattcttttagcacatgtataatataaaaacattattctatttcgaatttaggcttccaaaaatttttcatccgtaaaccgataataatatatatagacttgttaatagtcggaataaatagattaatgcttaaactatcatcatctccacgattagagatacaatatttacattctttttgctgtttcgaaactttatcaatacacgttaatacaaacccaggaaggagatattgaaactgaggctgttgaaaatgaaacggtgaatacaataattcagataatgtaaaatcatgattccgtattctgatgatattagaactgctaatggatgtcgatggtatgtatctaggagtatctattttaacaaagcatcgatttgctaatatacaattatccttttgattaattgttattttattcatattcttaaaaggtttcatatttatcaattcttctacattaaaaatttccatttttaatttatgtagccccgcaatactcctcattacgtttcattttttgtctataatatccattttgttcatctcggtacatagattatccaattgagaagcgcatttagtagttttgtacattttaagtttattgacgaatcgtcgaaaactagttatagttaacattttattatttgataccctgatattaatacccctgccgttactattatttataactgatgtaatccacgtaacattggaattaactatcgatagtaatgcatcgacgcttccaaaattgtctattataaactcaccgataatttttttattgcatgttttcatattcattaggattatcaaatctttaatcttattacgattgtatgcgttgatattacaagacgtcattctaaaagacggaggatctccatcaaatgccagacaatcacgtacaaagtacatggaaataggttttgttctattgcgcatcatagatttatatagaacacccgtagaaatactaatttgttttactctataaaatactaatgcatctatttcatcgttttgtataacgtctttccaagtgtcaaattccaaatttttttcattgatagtaccaaattcttctatctctttaactacttgcatagataggtaattacagtgatgcctacatgccgttttttgaaactgaatagatgcgtctagaagcgatgctacgctagtcacaatcaccactttcatatttagaatatatatatgtaaaaatatagtagaatttcattttgtttttttctatgctataaatgaattctcattttgcatctgctcatactccgttttatattaataccaaagaaggaagatatctggttctaaaagccgttaaagtatgcgatgttagaactgtagaatgcgaaggaagtaaagcttcctgcgtactcaaagtagataaaccctcatcgcccgcgtgtgagagaagaccttcgtccccgtccagatgcgagagaatgaataaccctggaaaacaagttccgtttatgaggacggacatgctacaaaatatgttcgcggctaatcgcgataatgtagcttctagacttttgtcctaaaatactattatatccttttcgatattaataaatccgtgtcgtccaggttttttatctctttcagtatgtgaatagataggtattttatctctattcatcatcgaatttaagagatccgataaacattgtttgtattctccagatgtcagcatctgatacaacaatatatgtgcacataaacctctggcacttatttcatgtaccttccccttatcactaaggagaatagtatttgagaaatatgtatacatgatattatcatgaattagatatacagaatttgtaacactctcgaaatcacacgatgtgtcggcgttaagatctaatatatcactcgataacacattttcatctagatacactagacattttttaaagctaaaatagtctttagtagtaacagtaactatgcgattattttcatcgatgatacatttcatcggcatattattacgcttaccatcaaagactataccatgtgtatatctaacgtattctagcatggttgccatacgcgcattaaacttttcaggatctttggatagatcttccaatctatctatttgagaaaacatttttatcatgttcaatagttgaaacgtcggatccactatatagatattatctataaagattttaggaactacgttcatggtatcctggcgaatattaaaactatcaatgatatgattatcgttttcatcttttatcaccatatagtttctaagatatgggattttacttaatataatattatttcccgtgataaattttattagaaaggccaaatctataagaaaagtcctagaattagtctgaagaatatctatatcgccgtatagtatatttggattaattagatatagagaatatgatccgtaacatatacaacttttattatggcgtctaagatattcttccatcaacttattaacatttttgactagggaagatacattatgacgtcccattacttttgccttgtctattactgcgacgttcatagaatttagcatatctcttgccaattcttccattgatgttacattataagaaattttagatgaaattacatttggagctttaatagtaagaactcctaatatgtccgtgtatgtggtcactaatacagattgtagttctataatcgtaaataatttacctatattatatgtttgagtctgtttagaaaagtagctaagtatacgatcttttatttctgatgcagatgtattaacatcggaaaaaaatctttttttattcttttttactaaagatacaaatatgtctttgttaaaaacagttattttctgaatatttctagcttgtaattttaacatatgatattcgttcacactaggtactctgcctaaataggtttctataatctttaatgtaatattaggaaaagtattctgatcaggattcctattcattttgaggatttaaaactctgattattgtctaatatggtctctacgcaaactttttcacagagcgatagagtttttgataactcgtttttcttaagaaatataaaactactgtctccagagctcgctctatcttttattttatctaattcgatacaaactcctgatactggttcagaaagtaattcattaattttcagtcctttatagaagatatttaatatagataatacaaaatcttcagtttttgatatcgatctgattgatcctagaactagatatattaataacgtgctcattaggcagtttatggcagcttgataattagatatagtatattccagttcatatttattagataccgcattgcccagattttgatattctatgaattcctctgaaaataaatccaaaataactagacattctattttttgtggattagtgtactctcttccctctatcatgttcactactggtgtccacgatgataaatatctagagggaatataatatagtccataggatgccaatctagcaatgtcgaataactgtaattttattcttcgctcttcattatgaattgattcttgaggtataaacctaacacaaattatattattagacttttcgtatgtaatgtctttcatgttataagtttttaatcctggaatagaatctattttaatgaggcttttaaacgcagagttctccaacgagtcaaagcataatactctgttgtttttcttatatacgatgttacgattttcttctttgaatggaataggtttttgaattagtttataattacaacataatagataaggaagtgtgcaaatagtacgcggaaaaaacataatagctcccctgttttcatccatggttttaagtaaatgatcactggcttctttagtcaatggatattcgaacattaaccgtttcatcatcattggacagaatccatatttcttaatgtaaagagtgatcaaatcattgtgtttattgtaccatcttgttgtaaatgtgtattcggttatcggatctgctcctttttctattaaagtatcgatgtcaatctcgtctaagaattcaactatatcgacatatttcatttgtatacacataaccattactaacgtagaatgtataggaagagatgtaacgggaacagggtttgttgattcgcaaactattctaatacataattcttctgttaatacgtcttgcacgtaatctattatagatgccaagatatctatataattattttgtaagatgatgttaactatgtgatctatataagtagtgtaataattcatgtattttgatatatgttccaactctgtctttgtgatgtctagtttcgtaatatctatagcatcctcaaaaaatatattcgcatatattcccaagtcttcagttctatcttctaaaaaatcttcaacgtatggaatataataatctattttacctcttctgatatcattaatgatatagtttttgacactatcttctgtcaattgattcttattcactatatctaagaaacggatagcgtccctaggacgaactactgccattaatatctctattatagcttctggacataattcatctattataccagaattaatgggaactattccgtatctatctaacatagttttaagaaagtcagaatctaagacttgatgttcatatattggttcatacatgaaatgatctctattgatgatagtgactatttcattctctgaaaattggtaactcattctatatatgctttccttgttgatgaaggatagaatatactcaatagaatttgtaccaacaaactgttctcttatgaatcgtatatcatcatctgaaataatcatgtaaggcatacatttaacaattagagacttgtctcctgttatcaatatactattcttgtgataatttatgtgtgaggcaaatttgtccacgttctttaattttgttatagtagatatcaaatccaatggagctacagttcttggcttaaacagatatagtttttctggaacaaattctacaacattattataaaggactttgggtagataagtgggatgaaatcctattttaattaatgcgatagccttgtcctcgtgcagatatccaaacgcttttgtgatagtatggcattcattgtctagaaacgctctacgaatatctgtgacagatatcatctttagagaatatactagtcgcgttaatagtactacaatttgtattttttaatctatctcaataaaaaaattaatatgtatgattcaatgtataactaaactactaactgttattgataactagaatcagaatctaatgatgacgtaaccaagaagtttatctactgccaatttagctgcattatttttagcatctcgtttagattttccatcggccttatcgaatactcttccgtcgatgtctacacaggcataaaatgtaggagagttactaggcccaactgattcaatacgaaaagaccaatctctcctagtaatttggcagtactcattaataacggtgacagggttagcatctttccaatcaataatttttttagccggaataacatcatcaaaagacttatgatcctctctcattgatttttcgcgggatacatcatctattatgacgtcagccatagcatcagcatccggcttatccgcctccgttgtcataaaccaacgaggaggaatatcgtcggagctgtacaccatagcactacgttgaagatcgtacagagctttattaacttctcgcttctccatattaagttgtctagttagttgtgcagcagtagctccttcgattccaatgtttttaatagccgcacacacaatctctgcgtcagaacgctcgtcaatatagatcttagacatttttagagagaactaacgcaaccagcaataaaactgaacctactttatcatttttttattcatcatcctctggtggttcgtcgttcctatcaaatgtagctctgattaacccgtcatctataggtgatgctggttctggagattctggaggagatggattattatctggaagaatctctgttatttccttgttttcatgtatcgattgcgttgtaacattaagattgcgaaatgctctaaatttgggaggcttaaagtgttgtttgcaatctctacacgcgtgtctaactagtggaggttcgtcagctgctctagtttgaatcatcatcggcgtagtattcctacttttacagttaggacacggtgtattgtatttctcgtcgagaacgttaaaataatcgttgtaactcacatcctttattttatctatattgtattctactcctttcttaatgcattttataccgaataagagatagcgaaggaattctttttcggtgccgctagtacccttaatcatatcacatagtgttttatattccaaatttgtggcaatagacggtttatttctatacgatagtttgtttctggaatcctttgagtattctataccaatattattctttgattcgaatttagtttcttcgatattagattttgtattacctatattcttgatgtagtactttgatgatttttccatggcccattctattaagtcttccaagttggcatcatccacatattgtgatagtaattctcggatatcagtagcggctaccgccattgatgtttgttcattggatgagtaactactaatgtatacattttccatttataacacttatgtattaactttgttcatttatattttttcattattatgttgatattaacaaaagtgaatatatatatgttaataattgtattgtggttatacggctacaattttataatgagtgaaagtcagtgtccgatgatcaatgacgatagctttactctgaaaagaaagtatcaaatcgatagtgcggagtcaacaataaaaatggataagaagaggataaagtttcagaatagagccaaaatggtaaaagaaataaatcagacaataagagcagcacaaactcattacgagacattgaaactaggatacataaaatttaagagaatgattatgactactactctagaagatatagcaccatctattccaaataatcagaaaacttataaactattctcggacatttcagccatcggcaaagcatcacagaatccgagtaagatggtatatgctctgctgctttacatgtttcccaatttgtttggagatgatcatagattcattcgttatagaatgcatccaatgagtaaaatcaaacacaagatcttctctcctttcaaacttaatcttattagaatattagtggaagaaagattctataataatgaatgcagatctaataaatggagaataattggaacacaagttgataaaatgttgatagctgaatctgataaatatacaatagatgcaaggtataacctaaaacccatgtatagaatcaagggagaatctgaagaagataccctctttatcaaacagatggtagaacaatgtgtgacatcccaggaattggtggaaaaagtgttgaagatactgtttagagatttgttcaagagtggagaatacaaagcgtacagatacgatgatgatgtagaaaatggatttattggattggatacactaaaattaaacattgttcatgatatagttgaaccatgtatgcctgttcgtaggccagtggctaagatactgtgtaaagaaatggtaaataaatactttgagaatccgctacatattattggtaaaaatcttcaagagtgcattgactttgttagtgaataggcatttcatctttctccaatactaattcaaattgttaaattaataatggatagtataaatagttattagttataagatagtaaaaataattattagaataagagtgtagtatcatagataactctcttctataaaaatggattttattcgtagaaagtatcttatatacacagtagaaaataatatagattttttaaaggatgatacattaagtaaagtaaacaattttaccctcaatcatgtactagctctcaagtatctagttagcaattttcctcaacacgttattactaaggatgtattagctaataccaatttttttgttttcatacatatggtacgatgttgtaaagtgtacgaagcggttttacgacacgcatttgatgcacccacgttgtacgttaaagcattgactaagaattatttatcgtttagtaacgcaatacaatcgtacaaggaaaccgtgcataaactaacacaagatgaaaaatttttagaggttgccgaatacatggacgaattaggagaacttataggcgtaaattatgacttagttcttaatccattatttcacggaggggaacccatcaaagatatggaaatcatttttttaaaactgtttaagaaaacagacttcaaagttgttaaaaaattaagtgttataagattacttatttgggcatacctaagcaagaaagatacaggcatagagtttgcggataatgatagacaaaatatatacactctatttcaacaaactggtagaatcgtccatagcaatctaacagaaacgtttagagattatatctttcccggagataagactagctattgggtgtggttaaacgaaagtatagctaatgatgcggatatcgttcttaatagacacgccattaccatgtatgataaaattcttagttatatatactctgagataaaacaaggacgcgttaataaaaacatgcttaagttagtttatatctttgagcctgaaaaagatatcagagaacttctgctagaaatcatatatgatattcctggagatatcctatctattattgatgcaaaaaacgacgattggaaaaaatattttattagtttttataaagctaattttattaacggtaatacatttattagtgatagaacgtttaacgaggacttattcagagttgttgttcaaatagatcccgaatatttcgataatgaacgaattatgtctttattctctacgagtgctgcggacattaaacgatttgatgagttagatattaataacagttatatatctaatataatttatgaggtgaacgatatcacattagatacaatggatgatatgaagaagtgtcaaatctttaacgaggatacgtcgtattatgttaaggaatacaatacatacctgtttttgcacgagtcggatcccatggtcatagagaacggaatactaaagaaactgtcatctataaaatccaagagtagacggctgaacttgtttagcaaaaacattttaaaatattatttagacggacaattggctcgtctaggtcttgtgttagatgattataaaggagacttgttagttaaaatgataaaccatcttaagtctgtggaggatgtatccgcattcgttcgattttctacagataaaaaccctagtattcttccatcgctaatcaaaactattttagctagttataatatttccatcatcgtcttatttcaaaggtttttgagagataatctatatcatgtagaagaattcttggataaaagcatccatctaaccaagacggataagaaatatatacttcaattgataagacacggtagatcatagaacagaccaaatatattattaataatttgtatatacatagatataattatcacacatttttgataaatgggaactgctgcaacaattcagactcccaccaaattaatgaataaagaaaatgcagaaatgattttggaaaaaattgttgatcatatagttatgtatattagtgacgaatcaagtgattcagaaaataatcctgaatatattgattttcgtaacagatacgaagactatagatctctcattataaaaagtgatcacgagtttgtaaagctatgtaaaaatcatgcggagaaaagttctccagaaacgcaacaaatgattatcaaacacatatacgaacaatatcttattccagtatctgaagtactattaaaacctataatgtccatgggtgacataattacatataacggatgtaaagacaatgaatggatgctagaacaactctctaccctaaactttaacaatctccgcacatggaactcatgtagcataggcaatgtaacgcgtctgttttatacattttttagttatctgatgaaagataaactaaatatataagtataatcccattctaatactttaacctgatgtattagcatcttattagaatattaacctaactaaaagacataacataaaaactcattacatagttgataaaaagcggtaggatataaatattatggctgccaccgttccgcgttttgacgacgtgtacaaaaatgcacaaagaagaattctagatcaagaaacattttttagtagaggtctaagtagaccgttaatgaaaaacacatatctatttgataattacgcgtatggatggataccagaaactgcaatttggagtagtagatacgcaaacctagatgctagtgactattatcccatttcgttgggattacttaaaaagttcgagtttctcatgtctctatataaaggtcctattcccgtatatgaagaaaaagtaaatactgaattcatagccaatggatcgttctctggtagatacgtatcatatcttcgaaagttttctgcccttccaacaaacgagtttattagttttttgttactgacttccattccaatctataatatcttgttctggtttaaaaacacacagtttgatattactaaacacacattattcagatacgtctatacagataatgccaaacacctggcgttggctaggtatatgcatcaaacaggagactataagcctttgtttagtcgtctcaaagagaattatatatttaccggtcccgttccaataagtatcaaagatatagatcaccctaatcttagtagagcaagaagtccatccgattatgagacattagctaatattagtactatattgtactttaccaagtatgatccggtattaatgtttttattgttttacgtacctgggtattcaattactacaaaaattactccagccgtagaatatctaatggataaactgaatctaacaaagagcgacgtacaactgttgtaaattattttatgcttcgtaaaatgtaggttttgaaccaaacattctttcaaagaatgagatgcataaaactttattatccaatagattgactatttcggacgtcaatcgtttaaagtaaacttcgtaaaatattctttgatcactgccgagtttaaaacttctatcgataattgtctcatatgttttaatatttacaagttttttggtccatggtacattagccggacaaatatatgcaaaataatatcgttctccaagttctatagtttctggattatttttattatattcagtaactaaatacatattagggttatctgcggatttataatttgagtgatgcattctactcaacataaataattctagaggagacgatctactatcaaattcggatcgtaaatctgtttctaaagaacggagaatatctatacatacctgattagaattcatccgtccttcagacaacatctcagacagtctggttttgtacatcttaatcatattcttatgaaacttggaaacatctcttctagtttcactagtacctttattaattctctcaggtacagattttgaattcgacgatgctgagtatttcatcgttgtatatttcttcttcgattgcataatcagattcttatataccgcctcaaactctattttaaaattattaaacaatactctattattaatcagtcgttctaactctttcgctatttctatagacttatctacatcttgactgtctatctctgtaaacacggagtcggtatctccatacacgctacgaaaacgaaatctgtaatctataggcaacgatgttttcacaatcggattaatatctctatcgtccatataaaatggattacttaatggattggcaaaccgtaacataccgttagataactctgctccatttagtaccgattctagatacaagatcattctacgtcctatggatgtgcaactcttagccgaagcgtatgagtatagagcactatttctaaatcccatcagaccatatactgagttggctactatcttgtacgtatattgcatggaatcatagatggccttttcagttgaactggtagcctgttttagcatctttttatatctggctctctctgccaaaaatgttcttaatagtctaggaatggttccttctatcgatctatcgaaaattgctatttcagagatgaggttcggtagtctaggttcacaatgaaccgtaatatatctaggaggtggatatttctgaagcaatagctgattatttatttcttcttccaatctattggtactaacaacgacaccgactaatgtttccggagatagatttccaaagatacacacattaggatacagactgttataatcaaagattaatacattattactaaacattttttgttttggagcaaataccttaccgccttcataaggaaacttttgttttgtttctgatctaactaagatagttttagtttccaacaatagctttaacagtggacccttgatgactgtactcgctctatattcgaataccatggattgaggaagcacatatgttgacgcacccgcgtctgtttttgtttctactccataatactcccacaaatactgacacaaacaagcatcatgaatacagtatctagccatatctaaagctatgtttagattataatccttatacatctgagctaaatcaacgtcatcctttccgaaagataatttatatgtatcattaggtaaagtaggacataatagtacgactttaaatccattttcccaaatatctttacgaattactttacatataatatcctcatcaacagtcacataattacctgtggttaaaacctttgcaaatgcagcggctttgcctttcgcgtctgtagtatcgtcaccgatgaacgtcatttctctaactcctctatttaatactttacccatgcaactgaacgcgttcttggatatagaatccaatttgtacgaatccaatttttcaaatttttgaatgaatgaatatagatcgaaaaatatagttccattattgttattaacgtgaaacgtagtattggccatgccgcctactcccttatgactagactgatttctctcataaatacagagatgtacagcttcctttttgtccggagatctaaagataattttctctcctgttaataactctagacgattagtaatatatctcagatcaaagttatgtccgttaaaggtaacgacgtagtcgaacgttagttccaacaattgtttagctattcgtaacaaaactatttcagaacatagaactagttctcgttcgtaatccatttccattagtgactgtatcctcaaacatcctctatcgacggcttcttgtatttcctgttccgttaacatctcttcattaatgagcgtaaacaataatcgtttaccacttaaatcgatataacagtaacttgtatgcgagattgggttaataaatacagaaggaaacttcttatcgaagtgacactctatatctagaaataagtacgatcttgggatatcgaatctaggtatttttttagcgaaacagttacgtggatcgtcacaatgataacatccattgttaatctttgtcaaatattgctcgtccaacgagtaacatccgtctggagatatcccgttagaaatataaaaccaactaatattgagaaattcatccatggtggcattttgtatgctgcgtttctttggctcttctatcaaccacatatctgcgacggagcattttctatctttaatatctagattataacttattgtctcgtcaatgtctatagttctcatctttcccaacggcctcgcattaaatggaggaggagacaatgactgatatatttcgtccgtcactacgtaataaaagtaatgaggaaatcgtataaatacggtctcgccatttcgacatctggatttcagatataaaaatctgttttcaccgtgactttcaaaccaattaatgcaccgaacatccatttatagaatttagaaatatattttcatttaaatgaatcccaaacattggggaagagccgtatggaccattatttttatagtactttcgcaagcgggtttagacggcaacatagaagcgtgtaaacgaaaactatatactatagttagcactcttccatgtcctgcatgtagacggcacgcgactatcgctatagaggacaataatgtcatgtctagcgatgatctgaattatatttattattttttcatcagattatttaacaatttggcatctgatcccaaatacgcgatcgatgtgacaaaggttaaccctttataaacttaacccattataaaacttatgattagtcacaactgaaataaccgcgtgattattttttggtataattctacacggcatggtttctgtgactatgaattcaacccccgttacattagtgaaatctttaacaaacagcaagggttcgtcaaagacataaaactcattgtttacaatcgaaatagaccccctatcacacttaaaataaaaaatatccttatcctttaccaccaaataaaattctgattggtcaatgtgaatgtattcacttaacagttccacaaatttatttattaactccgaggcacatacatcgtcggtattttttatggcaaactttactcttccagcatccgtttctaaaaaaatattaacgagttccatttatatcatccaatattattgaaatgacgttgatggacagatgatacaaataagaaggtacggtacctttgtccaccatctcctccaattcatgctctattttgtcattaactttaatgtatgaaaacagtacgccacatgcttccatgacagtgtgtaacactttggatacaaaatgtttgacattagtataattgtccaagactgtcaatctataatagatagtagctataatatattctatgatggtattgaagaagatgacaaccttggcatattgatcatttaacacagacatggtatcaacagatagcttgaatgaaagagaatcagtaattggaataagcgtcttctcgatagagtgtccgtataccaacatgtctgatattttgatgtattccattaaattatttagttttttctttttattctcgttaaacagcatttctgtcaacggaccccaacatcgttgaccgattaagttttgattgatttttccgtgtaaggcgtatctagtcagatcgtatagcctatccaataatccatcgtctgtgtgtagatcacatcgtacactttttaattctctatagaagagcgacagacatctggagcaattacagacagcaatttctttattctctacagatgtaagatacttgaagacattcctatgatgatgcagaattttggataacacggtattgatggtatctgttaccataattcctttgatggctgatagtgtcagagcacaagatttccaatctttgacaatttttagcaccattatctttgttttgatatctatatcagacagcatggtgcgtctgacaacacagggattaagacggaaagatgaaatgattctctcaacatcttcaatagataccttgctattttttctggcattatctatatgtgcgagaatatcctctagagaatcagtatcctttttgatgatagtggatctcaatgacatgggacgtttaaaccttcttattctatcaccagattgcatggtgatttgtcttctttcttttatcataatgtaatctctaaattcatcggcaaattgtctatatctaaaatcataatatgagatgtttacctctacaaatatctgttcgtccaatgttagagtatttacatcagttttgtattccaaattaaacatggcaacggatttaattttatattcctctattaagtcctcgtcgataataacagaatgtagataatcatttaatccgtcgtacatggttggaagatgcttgttgacaaaatctttaattgtcttgatgaaggtgggactatatctaacatcttgattaataaaatttataacattgtccataggatactttgtaactagttttatacacatctcttcatcggtaagtttagacagaatatcgtgaacaggtggtatattatattcatcagatatacgaagaacaatgtccaaatctatattgtttaatatattatatagatgtagcgtagctcctacaggaatatctttaactaagtcaatgatttcatcaaccgttagatctattttaaagttaatcatataggcattgatttttaaaaggtatgtagccttgactacattctcattaattaaccattccaagtcattgtgtgtaagaagattatattctatcataagcttgactacatttggtcccgataccattaaagaattcttatgatataaggaaacagattttaggtactcatctactctacaagaattttggagagccttaacgatatcagtgacgtttattatttcaggaggaaagaatctaacattgagaatatcggaattaatagcttccagatacagtgattttggcaatagtccgtgtaatccataatccagtaacacgagctggtgcttgctagacaccttttcaatgtttaatttttttgaaataagctttgataaagccttcctcgcaaattccggatacatgaacatgtcggcgacatgattaagtattgttttttcattatttttatattttctcaacaagttctcaataccccaatagatgatagaatatcacccaatgcgtccatgttgtctatttccaacaggtcgctatatccaccaatagaagtttttccaaaaaagattctaggaacagttctaccaccagtaatttgttcaaaataatcccgcaattcattttcgggtttaaattctttaatatcgacaatttcatacgctcctcttttgaaactaaacttatttagaatatccagtgcatttctacaaaaaggacatgtatacttgacaaaaattgtcactttgttattggccaacctttgttgtacaaattcctcggccattttaatatttaagtgatataaaactatctcgacttatttaactctttagtcgagatatatggacgcagatagctatatgatagccaactacagaaggcaaacgctataaaaaacataattacgacgagcatatttataaatatttttattcagcattacttgatatagtaatattaggcacagtcaaacattcaaccactctcgatacattaactctctcattttctttaacaaattctgcaatatcttcgtaaaaagattcttgaaactttttagaatatctatcgactctagatgaaatagcgttcgtcaacatactatgttttgtatacataaaggcgcccattttaacagtttctagtgacaaaatgctagcgatcctaggatcctttagaatcacatagattgacgattcgtctctcttagtaactctagtaaaataatcatacaatctagtacgcgaaataatattatccttgacttgaggagatctaaacaatctagttttgagaacatcgataagttcatcgggaatgacatacatactatctttaatagaactcttttcatccagttgaatggattcgtccttaaccaactgattaatgagatcttctattttatcattttccagatgatatgtatgtccattaaagttaaattgtgtagcgcttctttttagtctagcagccaatactttaacatcactaatatcgatatacaaaggagatgatttatctatggcattaagaattcgtttttcgacatccgtcaaaaccaattcctttttgcctgtatcatccagttttccatcctttgtaaagaaattattttctactagactattaataagactgataaggattcctccataattgcacaatccaaactttttaacaaaactagactttacgagatctacaggaatgcgtacttcaggttttttagcttgtgattttttcttttgcggacattttctagtaaccaactcatctaccatttcattgattttagcagtgaaataagctttcaatgcacgggcactgatactattgaaaacgagttgatcttcaaattccgccatttaagttcaccaaacaacttttaaatacaaatatatcaatagtagtagaataagaactataaaaaaaataataattaaccaaccccaacaaccggtattattagttgatgtggtagttttctcatcacttagaacagatttaacaatttctataaagtctgtcaaatcatcttccggagaccccataaatacaccaaatatagcggcgtacaacttatccatttatacattgaatattggcttttctttatcgctatcttcatcatattcatcatcaatatcaacaagtcccagattacgagccagatcttcttctacattttcagtcattgatacacgttcactatctccagagagtccgataacgttagccaccacttctctatcaatgattagtttcttgagcgcgaaagtaatttttgtttccgttccggatctatagaagacgataggtgtgataattgccttggccaattgtctttctcttttactgagtgattctagttcaccttctatagatctgagaatggatgattctccagtcgaaacatattctaccatggatccgtttaatttgttgatgaagatggattcatccttaaatgttttctctgtaatagtttccaccgaaagactatgcaaagaatttggaatgcgttccttgtgcttaatgtttccatagacggcttctagaagttgatacaacataggactagccgcggtaacttttatttttagaaagtatccatcgcttctatcttgtttagatttatttttataaagtttagtctctccttccaacataataaaagtggaagtcatttgactagataaactatcagtaagttttatagagatagacgaacaattagcgtattgagaagcatttagtgtaacgtattcgatacattttgcattagatttactaatcgattttgcatactctataacacccgcacaagtctgtagagaatcgctagatgcagtaggtcttggtgaagtttcaactctcttcttgattaccttactcatgattaaacctaaataattgtactttgtaatataatgatatatattttcactttatctcatttgagaataaaaatgtttttgtttaaccactgcatgatgtacagatttcggaatcgcaaaccaccagtggttttattttatccttgtccaatgtgaattgaatgggagcggatgcgggtttcgtacgtagatagtacattcccgtttttagaccgagactccatccgtaaaaatgcatactcgttagtttggaataactcggatctgctatatggatattcatagattgactttgatcgatgaaggctcccctgtctgcagccatttttatgatcgtcttttgtggaatttcccaaatagttttataaactcgcttaatatcttctggaaggtttgtattctgaatggatccaccatctgccataatcctattcttgatctcatcattccataattttctctcggttaaaactctaaggagatgcggattaactacttgaaattctccagacaatactctccgagtgtaaatattactggtatacggttccaccgactcattatttcccaaaatttgagcagttgatgcagtcggcataggtgccaccaataaactatttctaagaccgtatgttctgattttatcttttagaggttcccaattccaaagatccgacggtacaacattccaaagatcatattgtagaataccgttactggcgtacgatcctacatatgtatcgtatggtccttccttctcagctagttcacaactcgcctctaatgcaccgtaataaatggtttcgaagatcttcttatttagatcttgtgcttccaggctatcaaatggataatttaagagaataaacgcgtccgctaatccttgaacaccaataccgataggtctatgtctcttattagagatttcagcttctggaataggataataattaatatctataattttattgagatttctgacaattactttgaccacatccttcagtttgagaaaatcaaatcgcccatctattacaaacatgttcaaggcaacagatgccagattacaaacggctacctcattagcatccgcatattgtattatctcagtgcaaagattactacacttgatagttcctaaattttgttgattactctttttgttacacgcatccttataaagaatgaatggagtaccagtttcaatctgagattctataatcgctttccagacgactcgagcctttattatagatttgtatctcctttctctttcgtatagtgtatacaatcgttcgaactcgtctccccaaacattgtccaatccaggacattcatccggacacatcaacgaccactctccgtcatccttcactcgtttcataaagagatcaggaatccaaagagctataaatagatctctggttctatgttcctcgtttcctgtattctttttaagatcgaggaacgccataatatcagaatgccacggttccaagtatatggccataactccaggccgtttgtttcctccctgatctatgtatctagcggtgttattataaactctcaacattggaataataccgtttgatataccattggtaccggagatatagcttccactggcacgaatattactaattgatagacctattccccctgccattttagagattaatgcgcatcgttttaacgtgtcatagataccctctatgctatcatcgatcatgttaagtagaaaacagctagacatttggtgacgactagttcccgcattaaataaggtaggagaagcgtgcgtaaaccatttttcagaaagtagattgtacgtctcaatagctgagtctatatcccattgatgaattcctactgcgacacgcattaacatgtgctgaggtctttcaacgatcttgttgtttattttcaacaagtaggatttttccaaagttttaaaaccaaaatagttgtatgaaaagtctcgttcgtaaataataaccgagttgagtttatccttatatttgttaactatatccatggtgatacttgaaataatcggagaatgtttcccatttttaggattaacatagttgaataaatcctccatcacttcactaaatagtttttttgtttccttgtgtagatttgatacggctattctggcggctagaatggcataatccggatgttgtgtagtacaagtggctgctatttcggctgccagagtgtccaattctaccgttgttactccattatatattccttgaataaccttcatagctattttaataggatctatatgatccgtgtttaagccataacataattttctaatacgagacgtgattttatcaaacatgacattttccttgtatccatttcgtttaatgacaaacatttttgttggtgtaataaaaaaattatttaacttttcattaatagggatttgacgtatgtagcgtacaaaatgattgttcctggtatatagataaagagtcctatatatttgaaaatcgttacggctcgattaaactttaatgattgcatagtgaatatatcattaggatttaactccttgactatcatggcggcgccagaaattaccatcaaaagcattaatacagttataccgatcgcagttagaacggttatagcatccaccatttatatctaaaaattagatcaaagaatatgtgacaaagtcctagttgtatactgagaattgacgaaacaatgtttcttacatatttttttcttattagtaaccgacttaatagtaggaactggaaaactagacttgattattctataagtatagatacccttccaaataatattctctttgataaaagttccagaaaatgtagaattttttaaaaagttatcttttgctattaccaagattgtgtttagacgcttattattaatatgagtgatgaaatccacaccgcctctagatatcgcctttatttccacattagatggtaaatccaatagtgaaactatctttttaggaatgtatggactcgcgtttagaggagtaaacgtcttaggcgtcggaaaggatgattcatcaaacgaataaacaatttcacaaatggatgttaatgtattagtaggaaattttttgacgctattggaattgaagattctaatggatgatgttctacctatttcatccgataacatgttaatttccgacaccaacggttttaatatttcgatgatatacggtagtctctctttcggacttatatagcttattccacaatacgagtcattatatactccaaaaaacaaaataactagtataaaatctgtatcgaatgggaaaaacgaaattatcgacataggtatagaatccggaacattgaacgtattaatacttaattctttttctgtggtaagtaccgataggttattgacattgtatggttttaaatattctataacttgagacttgatagatattagtgatgaattgaaaattatttttatcaccacgtgtgtttcaggatcatcgtcgacgcccgtcaaccaaccgaacggagtaaaataaatatcattaatatatgctctagatattagtatttttatcaatcctttgattatcatcttctcgtaggcgaatgattccatgatcaagagtgatttaagaacatcctccggagtattaatgggcttagtaaacagtccatcgttgcaataataaaagttatccaagttaaaggatattatgcattcgtttaaagatatcacctcatctgacggagacaattttttggtaggttttagagactttgaagctacttgtttaacaaagttattcatcgtcgtctactattctatttaattttgtagttaatttatcacatatcacattaattgactttttggtccacttttccatacgtttatattcttttaatcctgcgttatccgtttccgttatatccagggatagatcttgcaagttaaatagaatgctcttaaataatgtcattttcttatccgctaaaaatttaaagaatgtataaacctttttcagagatttgaaactcttaggtggtgtcctagtacacaatatcataaacaaactaataaacattccacattcagattccaacagctgattaacttccacattaatacagcctattttcgctccaaatgtacattcgaaaaatctgaataaaacatcgatgtcacaatttgtattatccaatacagaatgtttgtgattcgtgttaaaaccatcggagaaggaatagaaataaaaattattatagtggtggaattcagttggaatattgcctccggagtcataaaaggatactaaacattgttttttatcataaattacacatttccaatgagacaaataacaaaatccaaacattacaaatctagaggtagaacttttaattttgtctttaagtatatacgataagatatgtttattcataaacgcgtcaaatttttcatgaatcgctaaggagtttaagaatctcatgtcaaattgtcctatataatccacttcggatccataagcaaactgagagactaagttcttaatacttcgattgctcatccaggctcctctctcaggctctattttcatcttgacgacctttggattttcaccagtatgtattcctttacgtgataaatcatcgattttcaaatccatttgtgagaagtctatcgccttagatactttttcccgtagtcgaggtttaaaaaaatacgctaacggtatactagtaggtaactcaaagacatcatatatagaatggtaacgcgtctttaactcgtcggttaactctttcttttgatcgagttcgtcgctactattgggtctgctcaggtgccccgactctactagttccaacatcataccgataggaatacaagacactttgccggcggttgtagatttatcatatttttccactacatatccgttacaatttgttaaaaatttagatacatctatattgctacataatccagctagtgaatatatatgacataataaattggtaaatcctagttctggtattttactaattactaaatctgtatatctttccatttatcatggaaaagaatttaccagatatcttcttttttccaaactgcgttaatgtattctcttacaaatattcacaagatgaattcagtaatatgagtaaaacggaacgtgatagtttctcattggccgtgtttccagttataaaacatagatggcataacgcacacgttgtaaaacataaaggaatatacaaagttagtacagaagcacgtggaaaaaaagtatctcctccatcactaggaaaacccgcacacataaacctaaccgcgaagcaatatatatacagtgaacacacaataagctttgaatgttatagttttctaaaatgtataacaaatacagaaatcaattcgttcgatgagtatatattaagaggactattagaagctggtaatagtttacagatattttccaattccgtaggtaaacgaacagatactataggtgtactagggaataagtatccatttagcaaaattccattggcctcattaactcctaaagcacaacgagagatattttcagcgtggatttctcatagacctgtagttttaactggaggaactggagtgggtaagacgtcacaggtacccaagttattgctttggtttaattatttatttggtggattctctactctagataaaatcactgactttcacgaaagaccagtcattctatctcttcctaggatagctttagttagattgcatagcaataccattttaaaatcattgggatttaaggtactagatggatctcctatttctttacggtacggatctataccggaagaattaataaacaaacaaccaaaaaaatatggaattgtattttctacccataagttatctctaacaaaactatttagttatggcactcttattatagacgaagttcatgagcatgatcaaataggagatattattatagcagtagcgagaaagcatcatacgaaaatagattctatgtttttaatgactgccacgttagaggatgacagggaacggctaaaagtatttttacctaatcccgcatttatacatattcctggagatacactgtttaaaattagcgaggtatttattcataataagataaatccatcttccagaatggcatacatagaagaagaaaagagaaatttagttactgctatacagatgtatactcctcctgatggatcatccggtatagtctttgtggcatccgttgcacagtgtcacgaatataaatcatatttagaaaaaagattaccgtatgatatgtatattattcatggtaaggtcttagatatagacgaaatattagaaaaagtgtattcatcacctaatgtatcgataattatttctactccttatttggaatccagcgttactatacgcaatgttacacacatttatgatatgggtagagtttttgtccccgctccttttggaggatcgcaacaatttatttctaaatctatgagagatcaacgaaaaggaagagtaggaagagttaatcctggtacatacgtctatttctatgatctgtcttatatgaagtctatacagcgaatagattcagaatttctacataattatatattgtacgctaataagtttaatctaacactccccgaagatttgtttataatccctacaaatttggatattctatggcgtacaaaggaatatatagactcgttcgatattagtacagaaacatggaataaattattatccaattattatatgaagatgatagagtatgctaaactttatgtactaagtcctattctcgctgaggagttggataactttgagaggacgggagaattaactagtattgtacgagaagccattttatctctaaatttacaaattaagattttaaattttaaacataaagatgatgatacgtatatacacttttgtaaaatattattcggtgtctataacggaacaaacgctactatatattatcatagacctctaacgggatatatgaatatgatttcagatactatatttgttcctgtagataataactaaaaatcaaactctaatgaccacatctttttttagagatgaaaaattttccacatctccttttgtagacacgactaaacattttgcagaaaaaagtttattagtgtttagataatcgtatacttcatcagtgtagatagtaaatgtgaacagataaaaggtattcttgctcaatagattggtaaattccatagaatatattaatcctttcttcttgagatcccacatcatttcaaccagagacgttttatccaatgatttacctcgtactataccacatacaaaactagattttgcagtgacgtcgtacctggtattcctaccaaacaaaattttacttttagttcttttagaaaattctaaggtagaatctctatttgccaatatgtcatctatggaattaccactagcaaaaaatgatagaaatatatattgatacatcgcagctggttttgatctactatactttaaaaacgaatcagattccataattgcctgtatatcatcagctgaaaaactatgttttacacgtattccttcggcatttctttttaatgatatatcttgtttagacaatgataaagttatcatgtccatgagagacgcgtctccgtatcgtataaatatttcattagatgttagacgcttcattaggggtatacttctataaggtttcttaatcagtccatcattggttgcgtcaagaactactatcggatgttgttgggtatctctagtgttacacatggccttactaaagtttgggtaaataactatgatatctctattaattatagatgcatatatttcattcgtcaaggatattagtatcgacttgctatcgtcattaatacgtgtaatgtaatcatataaatcatgcgatagccaaggaaaatttaaatagatgttcatcatataatcgtcgctataattcatattaatacgttgacattgactaatttgtaatatagcctcgccacgaagaaagctctcgtattcagtttcatcgataaaggataccgttaaatataactggttgccgatagtctcatagtctattaagtggtaagtttcgtacaaatacagaatccctaaaatattatctaatgttggattaatctttaccataactgtataaaatggagacggagtcataactattttaccgtttgtacttactggaatagatgaaggaataatctccggacatgctggtaaagacccaaatgtctgtttgaagaaatccaatgttccaggtcctaatctcttaacaaaaattacgatattcgatcccgatatcctttgcattctatttaccagcatatcacgaactatattaagattatctatcatgtctattctcccaccgttatataaatcgcctccgctaagaaacgttagtatatccatacaatggaatacttcatttctaaaatagtattcgttttctaattctttaatgtgaaatcgtatactagaaagggaaaaattatctttgagttttccgttagaaaagaaccacgaaactaatgttctgattgcgtccgattccgttgctgaattaatggatttacaccaaaaactcatataacttctagatgtagaagcattcgctaaaaaattagtagaatcaaaggatataagtagatgttccaacaagtgagcaattcccaagatttcatctatatcattctcgaatccgaaattagaaattcccaagtagatatcctttttcatccgatcgttgatgaaaatacgaactttattcggtaagacaatcatttactaaggagtaaaataggaagtaatgttcgtatgtcgttatcatcgtataaattaaaggtgtgttttttaccattaagtgacattataattttaccaatattggaattataatataggtgtatttgcgcactcgcgacggttgatgcatcggtaaatatagctgtatctaatgttctagtcggtatttcatcatttcgctgtctaataatagcgttttctctatctgtttccattacagctgcctgaagtttattggtcggataatatgtaaaataataagaaatacatacgaataacaaaaataaaataagatataataaagatgccatttagagatctaattttgtttaacttgtccaaattcctacttacagaagatgaggaatcgttggagatagtgtcttccttatgtagaggatttgaaatatcttataatgacttgataacttactttccagataggaaataccataaatatatttataaagtatttgaacatgtagatttatcggaggaattaagtatggaattccatgatacaactctgagagatttagtctatcttagattgtacaagtattccaagtgtatacggccgtgttataaattaggagataatctaaaaggcatagttgttataaaggacaggaatatttatattagggaagcaaatgatgacttgatagaatatctcctcaaggaatacactcctcagatttatacatattctaatgagcgcgtccccataactggttcaaaattaattctttgtggattttctcaagttacatttatggcgtatacaacgtcgcatataacaacaaataaaaaggtagatgttctcgtttccaaaaaatgtatagatgaactagtcgatccaataaattatcaaatacttcaaaatttatttgataaaggaagcggaacaataaacaaaatactcaggaagatattttattcggtaacaggtggccaaactccataggtagctttttctatttcggattttagaatttccaaattcaccagcgatttatcggttttggtgaaatccaaggatttattaatgtccacaaatgccatttgttttgtctgtggattgtatttgaaaatggaaacgatgtagttagatagatgcgctgcgaagtttcctattagggttccgcgcttcacgtcacccagcatacttgaatcaccatcctttaaaaaaaatgataagatatcaacatggagtatatcatactcgaattttaattcttctactgactcactgacattttcacaaatactacaatacggtttaccgaaaataatcagtacgttcttcatttatgggtatcaaaaacttaaaatcgttactgctggaaaataaatcactgacgatattagatgataatttatacaaagtatacaatggaatatttgtggatacaatgagtatttatatagccgtcgccaattgtgtcagaaacttagaagagttaactacggtattcataaaatacgtaaacggatgggtaaaaaagggagggcatgtaaccctttttatcgatagaggaagtataaaaattaaacaagacgttagagacaagagacgtaaatattctaaattaaccaaggacagaaaaatgttagaattagaaaagtgtacatccgaaatacaaaatgttaccggatttatggaagaagaaataaaggcagaaatgcaattaaaaatcgataaactcacatttcaaatatatttatctgattctgataacataaaaatatcattgaatgagatactaacacatttcaacaataatgagaatgttacattattttattgtgatgaacgagacgcagaattcgttatgtgtctcgaggctaaaacacatttctctaccacaggagaatggccgttgataataagtaccgatcaggatactatgctatttgcatctgctgataatcatcctaagatgataaaaaacttaactcaactgtttaaatttgttccctcggcagaggataactatttagcaaaattaacggcgttagtgaatggatgtgatttctttcctggactctatggggcatctataacacccaccaacttaaacaaaatacaattgtttagtgattttacaatcgataatatagtcactagtttggcaattaaaaattattatagaaagactaactctaccgtagacgtgcgtaatattgttacgtttataaacgattacgctaatttagacgatgtctactcgtatattcctccttgtcaatgcactgttcaagaatttatattttccgcattagatgaaaaatggaatgaatttaaatcatcttatttagaaagcgtgccgttaccctgccaattaatgtacgcgttagaaccacgcaaggagattgatgtttcagaagttaaaactttatcatcttatatagatttcgaaaatactaaatcagatatcgatgttataaaatctatatcctcgatcttcggatattctaacgaaaactgtaacacgatagtattcggcatctataaggataatttactactgagtataaataattcattttactttaacgatagtctgttaataaccaatactaaaagtgataatataataaatataggttactagattaaaaatggtgttccaactcgtgtgctctacatgcggtaaagatatttctcacgaacgatataaattgattatacgaaaaaaatcattaaaggatgtactcgtcagtgtaaagaacgaatgttgtaggttaaaattatctacacaaatagaacctcaacgtaacttaacagtgcaacctctattggatataaactaatatggatccggttaattttatcaagacatatgcgcctagaggttctattatttttattaattataccatgtcattaacaagtcatttgaatccatcgatagaaaaacatgtgggtatttattatggtacgttattatcggaacacttggtagttgaatctacctatagaaaaggagttcgaatagtcccattggatagtttttttgaaggatatcttagtgcaaaagtatacatgttagagaatattcaagttatgaaaatagcagctgatacgtcattaactttattgggtattccgtatggatttggtcatgatagaatgtattgttttaaattggtagctgactgttataaaaatgccggtattgatacatcgtctaaacgaatattgggcaaagatatttttctgagccaaaacttcacagacgataatagatggataaagatatatgattctaataatttaacattttggcaaattgattaccttaaagggtgagttaatatgcataactactcctccgttgttttttccctcgttctttttcttaacgttgtttgccatcactctcataatgtaaagatattctaaaatggtaaacttttgcatatcggacgcagaaattggtataaatgttgtaattgtattatttcccgtcaatggactagtcacagctccatcagttttatatcctttagagtatttctcactcgtgtctaacattctagagcattccatgatctgtttatcgttgatattggccggaaagatagattttttattttttattatattactattggcaattgtagatataacttctggtaaatatttttctaccttttcaatctcttctattttcaagccggctatatattctgctatattgttgctagtatcaataccttttctggctaagaagtcatatgtggtattcactatatcagttttaactggtagttccattagcctttccacttctgcagaataatcagaaattggttctttaccagaaaatccagctactataataggctcaccgatgatcattggcaaaatcctatattgtaccagattaatgagagcatatttcatttccaataattctgctagttcttgagacattgatttatttgatgaatctagttggttctctagatactctaccatttctgccgcatacaataacttgttagataaaatcagggttatcaaagtgtttagcgtggctagaatagtgggcttgcatgtattaaagaatgcggtagtatgagtaaaccgttttaacgaattatatagtctccagaaatctgtggcgttacatacatgagccgaatgacatcgaagattgtccaatatttttaatagctgctctttgtccattatttctatatttgactcgcaacaattgtagataccattaatcaccgattcctttttcgatgccggacaatagcacaattgtttagctttggactctatgtattcagaattaatagatatatctctcaatacagattgcactatacattttgaaactatgtcaaaaattgtagaacgacgctgttctgcagccatttaactttaaataatttacaaaaatttaaaatgagcatccgtataaaaatcgataaactgcgccaaattgtggcatatttttcagagttcagtgaagaagtgtctataaatgtagactcgacggatgagttaatgtatatttttgccgccttgggcggatctgtaaacatttgggcaattatacctctaagtgcatcagtgttttaccgaggagccgaaaatattgtgtttaatcttcctgtgtccaaggtaaaatcgtgtttgtgtagttttcacaatgatgccatcatagatatagaacctgatctggaaaataatctagtaaaactttctagttatcatgtagtaagtgtcgattgtaacaaggaactgatgcctattaggacagatactactatttgtctaagtatagatcaaaagaaatcttacgtgtttaattttcacaagtatgaagaaaaatgttgtggtagaaccgtcattcatctagaatggttgttgggctttatcaagtgtattagtcagcatcagcatctggctattatgtttaaagatgacaatattattatgaagactcctggtaatactgatgcgttttccagggaatattctatgactgaatgttctcaagaactacaaaagttttctttcaaaatagctatctcgtctctcaacaaactacgaggattcaaaaagagagtcaatgtttttgaaactagaatcgtaatggataatgacgataacattttaggaatgttgttttcggatagagttcaatcctttaagatcaacatctttatggcgtttttagattaatactttcaatgagataaatatgggtggcggagtaagtgttgagctccctaaacgggatccgcctccgggagtacccactgatgagatgttattaaacgtggataaaatgcatgacgtgatagctcccgctaagcttttagaatatgtgcatataggaccactagcaaaagataaagaggataaagtaaagaaaagatatccagagtttagattagtcaacacaggacccggtggtctttcggcattgttaagacaatcgtataatggaaccgcacccaattgctgtcgcacttttaatcgtactcattattggaagaaggatggaaagatatcagataagtatgaagagggtgcagtattagaatcgtgttggccagacgttcacgacactggaaaatgcgatgttgatttattcgactggtgtcagggggatacgttcgatagaaacatatgccatcagtggatcggttcagcctttaataggagtaatagaactgtagagggtcaacaatcgttaataaatctgtataataagatgcaaacattatgtagtaaagatgctagtgtaccaatatgcgaatcatttttgcattatttacgcgcacacaatacagaagatagcaaagagatgatcgattatattctaagacaacagtctgcggactttaaacagaaatatatgagatgtagttatcccactagagataagttagaagagtcattaaaatatgcggaacctcgagaatgttgggatccagagtgttcgaatgccaatgttaatttcttactaacacgtaattataataatttaggactttgcaatattgtacgatgtaataccagcgtgaacaacttacagatggataaaacttcctcattaagattgtcatgtggattaagcaatagtgatagattttctactgttcccgtcaatagagcaaaagtagttcaacataatattaaacactcgttcgacctaaaattgcatttgatcagtttattatctctcttggtaatatggatactaattgtagctatttaaatgggtgccgcggcaagcatacagacgacggtgaatacactcagcgaacgtatctcgtctaaattagaacaagaagcgaacgctagtgctcaaacaaaatgtgatatagaaatcggaaatttttatatccgacaaaaccatggatgtaacctcactgttaaaaatatgtgctctgcggacgcggatgctcagttggatgctgtgttatcagccgctacagaaacatatagtggattaacaccggaacaaaaagcatacgtgccagctatgtttactgctgcgttaaacattcagacgagtgtaaacactgttgttagagattttgaaaattatgtgaaacagacttgtaattctagcgcggtcgtcgataacaaattaaagatacaaaacgtaatcatagatgaatgttacggagccccaggatctccaacaaatttggaatttattaatacaggatctagcaaaggaaattgtgccattaaagcgttgatgcaattgacgactaaggccactactcaaatagcacctagacaagttgctggtacaggagttcagttttatatgattgttatcggtgttataatattggcagcgttgtttatgtactatgccaagcgtatgttgttcacatccaccaatgataaaatcaaacttattttagccaataaggaaaacgtccattggactacttacatggacacattctttagaacttctccgatggttattgctaccacggatatgcaaaactgaaaatatattgataatattttaatagattaacatggaagttatcgctgatcgtctagacgatatagtgaaacaaaatatagcggatgaaaaatttgtagattttgttatacacggtctagagcatcaatgtcctgctatacttcgaccattaattaggttgtttattgatatactattatttgttatagtaatttatatttttacggtacgtctagtaagtagaaattatcaaatgttgttggtggtgctagtcatcacattaactattttttattactttatactataatagtactagactgacttctaacaaacatctcacctgccataaataaatgcttgatattaaagtcttctatttctaacactattccatctgtggaaaataatactctgacattatcgctaattgacacatcggtgagtgatatgcctataaagtaataatcttctttgggcacatataccagtgtaccaggttctaacaacctatttactggtgctcctgtagcatactttttctttaccttgagaatatccatcgtttgcttggtcaatagcgatatgtgattttttatcaaccactcaaaaaagtaattggagtgttcatatcctctacgggctattgtctcatggccgtgtatgaaatttaagtaacacgactgtggtagatttgttctatagagccgattgccgcaaatagatagaactaccaatatgtctgtacaaatgttaaacattaattgattaacagaaaaaacaatgttcgttctgggaatagaaaccagatcaaaacaaaattcgttagaatatatgccacgtttatacatggaatataaaataactacagtttgaaaaataacagtatcatttaaacatttaacttgcggggttaatctcacaactttactgtttttgaactgttcaaaatatagcatcgatccgtgagaaatacgtttagccgcctttaatagaggaaatcccaccgcctttctggatctcaccaacgacgatagttctgaccagcaactcatttcttcatcatccacctgttttaacatataataggcaggagatagatatccgtcattgcaatattccttctcgtaggcacacaatctaatattgataaaatctccattctcttctctgcatttattatcttgtctcggtggctgattaggctgtggtcttggtttaggccttggtctatcgttgttgaatctattttggtcattaaatctttcatttcttcctggtatatttctatcacctcgtttggttggatttttgtctatattatcgtttgtaacatcggtacgggtattcatttatcacaaaaaaaacttctctaaatgagtctactgctagaaaacctcatcgaagaagataccatattttttgcaggaagtatatctgagtatgatgatttacaaatggttattgccggcgcaaaatccaaatttccaagatctatgctttctatttttaatatagtacctagaacgatgtcaaaatatgagttggagttgattcataacgaaaatatcacaggagcaatgtttaccacaatgtataatataagaaacaatttgggtctaggagatgataaactaactattgaagccattgaaaactatttcttggatcctaacaatgaagttatgcctcttattattaataatacggatatgactgccgtcattcctaaaaaaagtggtaggagaaagaataagaacatggttatcttccgtcaaggatcatcacctatcttgtgcattttcgaaactcgtaaaaagattaatatttataaagaaaatatggaatccgcgtcgactgagtatacacctatcggagacaacaaggctttgatatctaaatatgcgggaattaatgtcctgaatgtgtattctccttccacatccataagattgaatgccatttacggattcaccaataaaaataaactagagaaacttagtactaataaggaactagaatcgtatagttctagccctcttcaagaacccattaggttaaatgattttctgggactattggaatgtgttaaaaagaatattcctctaacagatattccgacaaaggattgattactataaatggagaatgttcctaatgtatactttaatcctgtgtttatagagcccacgtttaaacattctttattaagtgtttataaacacagattaatagttttatttgaagtattcgttgtattcattctaatatatgtattttttagatctgaattaaatatgttcttcatgcctaaacgaaaaatacccgatcctattgatagattacgacgtgctaatctagcgtgtgaagacgataaattaatgatctatggattaccatggatgacaactcaaacatctgcgttatcaataaatagtaaaccgatagtgtataaagattgtgcaaagcttttgcgatcaataaatggatcacaaccagtatctcttaacgatgttcttcgcagatgatgattcattttttaagtatttggctagtcaagatgatgaatcttcattatctgatatattgcaaatcactcaatatctagactttctgttattattattgatccaatcaaaaaataaattagaagctgtgggtcattgttatgaatctctttcagaggaatacagacaattgacaaaattcacagactttcaagattttaaaaaactgtttaacaaggtccctattgttacagatggaagggtcaaacttaataaaggatatttgttcgactttgtgattagtttgatgcgattcaaaaaagaatcctctctagctaccaccgcaatagatcctgttagatacatagatcctcgtcgcaatatcgcattttctaacgtgatggatatattaaagtcgaataaagtgaacaataattaattctttattgtcatcatgaacggcggacatattcagttgataatcggccccatgttttcaggtaaaagtacagaattaattagacgagttagacgttatcaaatagctcaatataaatgcgtgactataaaatattctaacgataatagatacggaacgggactatggacgcatgataagaataattttgaagcattggaagcaactaaactatgtgatgtcttggaatcaattacagatttctccgtgataggtatcgatgaaggacagttctttccagacattgttgaattagatcgataaaaattaattaattacccgggtaccaggcctagatctgtcgagatccggtggtggtgcaaatcaaagaactgctcctcagtggatgttgcctttacttctaggcctgtacggaagtgttacttctgctctaaaagctgctgcagggggggggggggggtgggggggccggttagggccgccatcccctcagagcgtcgggatatcgggtggcggctcgggacggaggacgcgctagtgttcttctgtgtggcagttcagaatgatggatcaagctagatcagcattctctaacttgtttggtggagaaccattgtcatatacccggttcagcctggctcggcaagtagatggcgataacagtcatgtggagatgaaacttgctgtagatgaagaagaaaatgctgacaataacacaaaggccaatgtcacaaaaccaaaaaggtgtagtggaagtatctgctatgggactattgctgtgatcgtctttttcttgattggatttatgattggctacttgggctattgtaaaggggtagaaccaaaaactgagtgtgagagactggcaggaaccgagtctccagtgagggaggagccaggagaggacttccctgcagcacgtcgcttatattgggatgacctgaagagaaagttgtcggagaaactggacagcacagacttcaccagcaccatcaagctgctgaatgaaaattcatatgtccctcgtgaggctggatctcaaaaagatgaaaatcttgcgttgtatgttgaaaatcaatttcgtgaatttaaactcagcaaagtctggcgtgatcaacattttgttaagattcaggtcaaagacagcgctcaaaactcggtgatcatagttgataagaacggtagacttgtttacctggtggagaatcctgggggttatgtggcgtatagtaaggctgcaacagttactggtaaactggtccatgctaattttggtactaaaaaagattttgaggatttatacactcctgtgaatggatctatagtgattgtcagagcagggaaaatcacctttgcagaaaaggttgcaaatgctgaaagcttaaatgcaattggtgtgttgatatacatggaccagactaaatttcccattgttaacgcagaactttcattctttggacatgctcatctggggacaggtgacccttacacacctggattcccttccttcaatcacactcagtttccaccatctcggtcatcaggattgcctaatatacctgtccagacaatctccagagctgctgcagaaaagctgtttgggaatatggaaggagactgtccctctgactggaaaacagactctacatgtaggatggtaacctcagaaagcaagaatgtgaagctcactgtgagcaatgtgctgaaagagataaaaattcttaacatctttggagttattaaaggctttgtagaaccagatcactatgttgtagttggggcccagagagatgcatggggccctggagctgcaaaatccggtgtaggcacagctctcctattgaaacttgcccagatgttctcagatatggtcttaaaagatgggtttcagcccagcagaagcattatctttgccagttggagtgctggagactttggatcggttggtgccactgaatggctagagggatacctttcgtccctgcatttaaaggctttcacttatattaatctggataaagcggttcttggtaccagcaacttcaaggtttctgccagcccactgttgtatacgcttattgagaaaacaatgcaaaatgtgaagcatccggttactgggcaatttctatatcaggacagcaactgggccagcaaagttgagaaactcactttagacaatgctgctttccctttccttgcatattctggaatcccagcagtttctttctgtttttgcgaggacacagattatccttatttgggtaccaccatggacacctataaggaactgattgagaggattcctgagttgaacaaagtggcacgagcagctgcagaggtcgctggtcagttcgtgattaaactaacccatgatgttgaattgaacctggactatgagaggtacaacagccaactgctttcatttgtgagggatctgaaccaatacagagcagacataaaggaaatgggcctgagtttacagtggctgtattctgctcgtggagacttcttccgtgctacttccagactaacaacagatttcgggaatgctgagaaaacagacagatttgtcatgaagaaactcaatgatcgtgtcatgagagtggagtatcacttcctctctccctacgtatctccaaaagagtctcctttccgacatgtcttctggggctccggctctcacacgctgccagctttactggagaacttgaaactgcgtaaacaaaataacggtgcttttaatgaaacgctgttcagaaaccagttggctctagctacttggactattcagggagctgcaaatgccctctctggtgacgtttgggacattgacaatgagttttaaatgtgatacccatagcttccatgagaacagcagggtagtctggtttctagacttgtgctgatcgtgctaaattttcagtagggctacaaaacctgatgttaaaattccatcccatcatcttggtactactagatgtctttaggcagcagcttttaatacagggtagataacctgtacttcaagttaaagtgaataaccacttaaaaaatgtccatgatggaatattcccctatctctagaattttaagtgctttgtaatgggaactgcctctttcctgttgttgttaatgaaaatgtcagaaaccagttatgtgaatgatctctctgaatcctaagggctggtctctgctgaaggttgtaagtggtcgcttactttgagtgatcctccaacttcatttgatgctaaataggagataccaggttgaaagaccttctccaaatgagatctaagcctttccataaggaatgtagctggtttcctcattcctgaaagaaacagttaactttcagaagagatgggcttgttttcttgccaatgaggtctgaaatggaggtccttctgctggataaaatgaggttcaactgttgattgcaggaataaggccttaatatgttaacctcagtgtcatttatgaaaagaggggaccagaagccaaagacttagtatattttcttttcctctgtcccttcccccataagcctccatttagttctttgttatttttgtttcttccaaagcacattgaaagagaaccagtttcaggtgtttagttgcagactcagtttgtcagactttaaagaataatatgctgccaaattttggccaaagtgttaatcttaggggagagctttctgtccttttggcactgagatatttattgtttatttatcagtgacagagttcactataaatggtgtttttttaatagaatataattatcggaagcagtgccttccataattatgacagttatactgtcggttttttttaaataaaagcagcatctgctaataaaacccaacagatactggaagttttgcatttatggtcaacacttaagggttttagaaaacagccgtcagccaaatgtaattgaataaagttgaagctaagatttagagatgaattaaatttaattaggggttgctaagaagcgagcactgaccagataagaatgctggttttcctaaatgcagtgaattgtgaccaagttataaatcaatgtcacttaaaggctgtggtagtactcctgcaaaattttatagctcagtttatccaaggtgtaactctaattcccattttgcaaaatttccagtacctttgtcacaatcctaacacattatcgggagcagtatcttccataatgtataaagaacaaggtagtttttacctaccacagtgtctgtatcggagacagtgatctccatatgttacactaagggtgtaagtaattatcgggaacagtgtttcccataattttcttcatgcaatgacatcttcaaagcttgaagatcgttagtatctaacatgtatcccaactcctataattccctatcttttagttttagttgcagaaacattttgtggtcattaagcattgggtgggtaaattcaaccactgtaaaatgaaattactacaaaatttgaaatttagcttgggtttttgttacctttatggtttctccaggtcctctacttaatgagatagtagcatacatttataatgtttgctattgacaagtcattttaactttatcacattatttgcatgttacctcctataaacttagtgcggacaagttttaatccagaattgaccttttgacttaaagcagagggactttgtatagaaggtttgggggctgtggggaaggagagtcccctgaaggtctgacacgtctgcctacccattcgtggtgatcaattaaatgtaggtatgaataagttcgaagctccgtgagtgaaccatcattataaacgtgatgatcagctgtttgtcatagggcagttggaaacggcctcctagggaaaagttcatagggtctcttcaggttcttagtgtcacttacctagatttacagcctcacttgaatgtgtcactactcacagtctctttaatcttcagttttatctttaatctcctcttttatcttggactgacatttagcgtagctaagtgaaaaggtcatagctgagattcctggttcgggtgttacgcacacgtacttaaatgaaagcatgtggcatgttcatcgtataacacaatatgaatacagggcatgcattttgcagcagtgagtctcttcagaaaacccttttctacagttagggttgagttacttcctatcaagccagtacgtgctaacaggctcaatattcctgaatgaaatatcagactagtgacaagctcctggtcttgagatgtcttctcgttaaggagatgggccttttggaggtaaaggataaaatgaatgagttctgtcatgattcactattctagaacttgcatgacctttactgtgttagctctttgaatgttcttgaaattttagactttctttgtaaacaaatgatatgtccttatcattgtataaaagctgttatgtgcaacagtgtggagattccttgtctgatttaataaaatacttaaacactgaaaaaaaaaaaaaaaaaaaaaaaaaaaaaaaaaaaaaaaaaaaaaaaaaaaaaaaaaaaaaaaaaaaaaaaaaaaaaaaaagtaccttctgaggcggaaagaaccagccggatctcgacttcgagcttatttatattccaaaaaaaaaaaataaaatttcaatttttaagctttcactaattccaaacccacccgctttttatagtaagtttttcacccataaataataaatacaataattaatttctcgtaaaagtagaaaatatattctaatttattgcacggtaaggaagtagatcataactcgagcatgggagatcccgtcgttttacaacgtcgtgactgggaaaaccctggcgttacccaacttaatcgccttgcagcacatccccctttcgccagctggcgtaatagcgaagaggcccgcaccgatcgcccttcccaacagttgcgcagcctgaatggcgaatggcgctttgcctggtttccggcaccagaagcggtgccggaaagctggctggagtgcgatcttcctgaggccgatactgtcgtcgtcccctcaaactggcagatgcacggttacgatgcgcccatctacaccaacgtgacctatcccattacggtcaatccgccgtttgttcccacggagaatccgacgggttgttactcgctcacatttaatgttgatgaaagctggctacaggaaggccagacgcgaattatttttgatggcgttaactcggcgtttcatctgtggtgcaacgggcgctgggtcggttacggccaggacagtcgtttgccgtctgaatttgacctgagcgcatttttacgcgccggagaaaaccgcctcgcggtgatggtgctgcgctggagtgacggcagttatctggaagatcaggatatgtggcggatgagcggcattttccgtgacgtctcgttgctgcataaaccgactacacaaatcagcgatttccatgttgccactcgctttaatgatgatttcagccgcgctgtactggaggctgaagttcagatgtgcggcgagttgcgtgactacctacgggtaacagtttctttatggcagggtgaaacgcaggtcgccagcggcaccgcgcctttcggcggtgaaattatcgatgagcgtggtggttatgccgatcgcgtcacactacgtctgaacgtcgaaaacccgaaactgtggagcgccgaaatcccgaatctctatcgtgcggtggttgaactgcacaccgccgacggcacgctgattgaagcagaagcctgcgatgtcggtttccgcgaggtgcggattgaaaatggtctgctgctgctgaacggcaagccgttgctgattcgaggcgttaaccgtcacgagcatcatcctctgcatggtcaggtcatggatgagcagacgatggtgcaggatatcctgctgatgaagcagaacaactttaacgccgtgcgctgttcgcattatccgaaccatccgctgtggtacacgctgtgcgaccgctacggcctgtatgtggtggatgaagccaatattgaaacccacggcatggtgccaatgaatcgtctgaccgatgatccgcgctggctaccggcgatgagcgaacgcgtaacgcgaatggtgcagcgcgatcgtaatcacccgagtgtgatcatctggtcgctggggaatgaatcaggccacggcgctaatcacgacgcgctgtatcgctggatcaaatctgtcgatccttcccgcccggtgcagtatgaaggcggcggagccgacaccacggccaccgatattatttgcccgatgtacgcgcgcgtggatgaagaccagcccttcccggctgtgccgaaatggtccatcaaaaaatggctttcgctacctggagagacgcgcccgctgatcctttgcgaatacgcccacgcgatgggtaacagtcttggcggtttcgctaaatactggcaggcgtttcgtcagtatccccgtttacagggcggcttcgtctgggactgggtggatcagtcgctgattaaatatgatgaaaacggcaacccgtggtcggcttacggcggtgattttggcgatacgccgaacgatcgccagttctgtatgaacggtctggtctttgccgaccgcacgccgcatccagcgctgacggaagcaaaacaccagcagcagtttttccagttccgtttatccgggcaaaccatcgaagtgaccagcgaatacctgttccgtcatagcgataacgagctcctgcactggatggtggcgctggatggtaagccgctggcaagcggtgaagtgcctctggatgtcgctccacaaggtaaacagttgattgaactgcctgaactaccgcagccggagagcgccgggcaactctggctcacagtacgcgtagtgcaaccgaacgcgaccgcatggtcagaagccgggcacatcagcgcctggcagcagtggcgtctggcggaaaacctcagtgtgacgctccccgccgcgtcccacgccatcccgcatctgaccaccagcgaaatggatttttgcatcgagctgggtaataagcgttggcaatttaaccgccagtcaggctttctttcacagatgtggattggcgataaaaaacaactgctgacgccgctgcgcgatcagttcacccgtgcaccgctggataacgacattggcgtaagtgaagcgacccgcattgaccctaacgcctgggtcgaacgctggaaggcggcgggccattaccaggccgaagcagcgttgttgcagtgcacggcagatacacttgctgatgcggtgctgattacgaccgctcacgcgtggcagcatcaggggaaaaccttatttatcagccggaaaacctaccggattgatggtagtggtcaaatggcgattaccgttgatgttgaagtggcgagcgatacaccgcatccggcgcggattggcctgaactgccagctggcgcaggtagcagagcgggtaaactggctcggattagggccgcaagaaaactatcccgaccgccttactgccgcctgttttgaccgctgggatctgccattgtcagacatgtataccccgtacgtcttcccgagcgaaaacggtctgcgctgcgggacgcgcgaattgaattatggcccacaccagtggcgcggcgacttccagttcaacatcagccgctacagtcaacagcaactgatggaaaccagccatcgccatctgctgcacgcggaagaaggcacatggctgaatatcgacggtttccatatggggattggtggcgacgactcctggagcccgtcagtatcggcggaattccagctgagcgccggtcgctaccattaccagttggtctggtgtcaaaaataataataaccgggcaggggggatccaattctgtgagcgtatggcaaacgaaggaaaaatagttatagtagccgcactcgatgggacatttcaacgtaaaccgtttaataatattttgaatcttattccattatctgaaatggtggtaaaactaactgctgtgtgtatgaaatgctttaaggaggcttccttttctaaacgattgggtgaggaaaccgagatagaaataataggaggtaatgatatgtatcaatcggtgtgtagaaagtgttacatcgactcataatattatattttttatctaaaaaactaaaaataaacattgattaaattttaatataatacttaaaaatggatgttgtgtcgttagataaaccgtttatgtattttgaggaaattgataatgagttagattacgaaccagaaagtgcaaatgaggtcgcaaaaaaactgccgtatcaaggacagttaaaactattactaggagaattattttttcttagtaagttacagcgacacggtatattagatggtgccaccgtagtgtatataggatctgctcccggtacacatatacgttatttgagagatcatttctataatttaggagtgatcatcaaatggatgctaattgacggccgccatcatgatcctattttaaatggattgcgtgatgtgactctagtgactcggttcgttgatgaggaatatctacgatccatcaaaaaacaactgcatccttctaagattattttaatttctgatgtgagatccaaacgaggaggaaatgaacctagtacggcggatttactaagtaattacgctctacaaaatgtcatgattagtattttaaaccccgtggcgtctagtcttaaatggagatgcccgtttccagatcaatggatcaaggacttttatatcccacacggtaataaaatgttacaaccttttgctccttcatattcagctgaaatgagattattaagtatttataccggtgagaacatgagactgactcgagttaccaaattagacgctgtaaattatgaaaaaaagatgtactaccttaataagatcgtccgtaacaaagtagttgttaactttgattatcctaatcaggaatatgactattttcacatgtactttatgctgaggaccgtgtactgcaataaaacatttcctactactaaagcaaaggtactatttctacaacaatctatatttcgtttcttaaatattccaacaacatcaactgaaaaagttagtcatgaaccaatacaacgtaaaatatctagcaaaaattctatgtctaaaaacagaaatagcaagagatccgtacgcggtaataaatagaaacgtactactgagatatactaccgatatagagtataatgatttagttactttaataaccgttagacataaaattgattctatgaaaactgtgtttcaggtatttaacgaatcatccataaattatactccggttgatgatgattatggagaaccaatcattataacatcgtatcttcaaaaaggtcataacaagtttcctgtaaattttctatacatagatgtggtaatatctgacttatttcctagctttgttagactagatactacagaaactaatatagttaatagtgtactacaaacaggcgatggtaaaaagactcttcgtcttcccaaaatgttagagacggaaatagttgtcaagattctctatcgccctaatataccattaaaaattgttagatttttccgcaataacatggtaactggagtagagatagccgatagatctgttatttcagtcgctgattaatcaattagtagagatgagataagaacattataataatcaataatatatcttatatcttatatcttatatcttatatcttgtttagaaaaatgctaatattaaaatagctaacgctagtaatccaatcggaagccatttgatatctataatagggtatctaatttcctgatttaaatagcggacagctatattctcggtagctactcgtttggaatcacaaacattatttacatctaatttactatctgtaatggaaacgtttcccaatgaaatggtacaatccgatacattgcattttgttatatttttttttaaagaggctggtaacaacgcatcgcttcgtttacatggctcgtaccaacaataatagggtaatcttgtatctattcctatccgtactatgcttttatcaggataaatacatttacatcgtatatcgtctttgttagcatcacagaatgcataaatttgttcgtccgtcatgataaaaatttaaagtgtaaatataactattatttttatagttgtaataaaaagggaaatttgattgtatactttcggttctttaaaagaaactgacttgataaaaatggctgtaatctctaaggttacgtatagtctatatgatcaaaaagagattaatgctacagatattatcattagtcatgttaaaaatgacgacgatatcggtaccgttaaagatggtagactaggtgctatggatggggcattatgtaagacttgtgggaaaacggaattggaatgtttcggtcactggggtaaagtaagtatttataaaactcatatagttaagcctgaatttatttcagaaattattcgtttactgaatcatatatgtattcactgcggattattgcgttcacgagaaccgtattccgacgatattaacctaaaagagttatcgggacacgctcttaggagattaaaggataaaatattatccaagaaaaagtcatgttggaacagtgaatgtatgcaaccgtatcaaaaaattactttttcaaagaaaaaggtttgtttcgtcaacaagttggatgatattaacgttcctaattctctcatctatcaaaagttaatttctattcatgaaaagttttggccattattagaaattcatcaatatccagctaacttattttatacagactactttcccatccctccgttgattattagaccggctattagtttttggatagatagtatacccaaagagaccaatgaattaacttacttattaggtatgatcgttaagaattgtaacttgaatgctgatgaacaggttatccagaaggcggtaatagaatacgatgatattaaaattatttctaataacactaccagtatcaatttatcatatattacatccggcaaaaataatatgattagaagttatatcgtcgcccgacgaaaagatcagaccgctagatctgtaattggtcccagtacatctatcaccgttaatgaggtaggaatgcccgcatatattagaaatacacttacagaaaagatatttgttaatgcctttacagtggataaagttaaacaactattagcgtcaaaccaagttaaattttactttaataaacgattaaaccaattaacaagaatacgccaaggaaagtttattaaaaataaaatacatttattgcctggtgattgggtagaagtagctgttcaagaatatacaagtattatttttggaagacagccgtctctacatagatacaacgtcatcgcttcatctatcagagctaccgaaggagatactatcaaaatatctcccggaattgccaactctcaaaatgctgatttcgacggggatgaggaatggatgatattagaacaaaatcctaaagctgtaattgaacaaagtattcttatgtatccgacgacgttactcaaacacgatattcatggagcccccgtttatggatctattcaagatgaaatcgtagcagcgtattcattgtttaggatacaagatctttgtttagatgaagtattgaacatcttggggaaatatggaagagagttcgatcctaaaggtaaatgtaaattcagcggtaaagatatctatacttacttgataggtgaaaagattaattatccgggtctcttaaaggatggtgaaattattgcaaacgacgtagatagtaattttgttgtggctatgaggcatctgtcattggctggactcttatccgatcataagtcgaacgtggaaggtatcaactttattatcaagtcatcttatgtttttaagagatatctatctatttacggttttggggtgacattcaaagatctgagaccaaattcgacgttcactaataaattggaggccatcaacgtagaaaaaatagaacttatcaaagaagcatacgccaaatatctcaacgatgtaagagacgggaaaatagttccattatctaaagctttagaggcggactatgtggaatccatgttatccaacttgacaaatcttaatatccgagagatagaagaacatatgagacaaacgctgatagatgatccagataataacctcctgaaaatggccaaagcgggttataaagtaaatcccacagaactaatgtatattctaggtacgtatggacaacaaaggattgatggtgaaccagcagagactcgagtattgggtagagttttaccttactatcttccagactctaaggatccagaaggaagaggttacattcttaattctttaacaaaaggattaacgggttctcaatattacttttcgatgctggttgccagatctcaatctactgatatcgtctgtgaaacatcacgtaccggaacactggctagaaaaatcattaaaaagatggaggatatggtggtcgacggatacggacaagtagttataggtaatacgctcatcaagtacgccgccaattataccaaaattctaggctcagtatgtaaacctgtagatcttatctatccagatgagtccatgacttggtatttggaaattagtgctctgtggaataaaataaaacagggattcgtttactctcagaaacagaaacttgcaaagaagacattggcgccgtttaatttcctagtattcgtcaaacccaccactgaggataatgctattaaggttaaggatctgtacgatatgattcataacgtcattgatgatgtgagagagaaatacttctttacggtatctaatatagattttatggagtatatattcttgacgcatcttaatccttctagaattagaattacaaaagaaacggctatcactatctttgaaaagttctatgaaaaactcaattatactctaggtggtggaactcctattggaattatttctgcacaggtattgtctgagaagtttacacaacaagccctgtccagttttcacactactgaaaaaagtggtgccgtcaaacaaaaacttggtttcaacgagtttaataacttgactaatttgagtaagaataagaccgaaattatcactctggtatccgatgatatctctaaacttcaatctgttaagattaatttcgaatttgtatgtttgggagaattaaatccaaacatcactcttcgaaaagaaacagataaatatgtagtagatataatagtcaatagattatacatcaagagagcagaaataaccgaattagtcgtcgaatatatgattgaacgatttatctcctttagcgtcattgtaaaggaatggggtatggagacattcattgaggacgaggataatattagatttactgtctacctaaatttcgttgaaccggaagaattgaatcttagtaagtttatgatggttcttccgggggcagccaacaagggaaagattagtaaattcaagattcctatctctgattatacgggatatgacgacttcaatcaaacaaaaaagctcaataagatgactgtagaactcatgaatctaaaagaattgggttctttcgatttggaaaacgtcaacgtgtatcctggagtatggaatacatacgatatcttcggtatcgaggccgctcgtgaatacttgtgcgaagccatgttaaacacctatggagaagggttcgattatctgtatcagccttgtgatcttctcgctagtttactatgtgctagttacgaaccagaatcagtgaataaattcaagttcggcgcagctagtactcttaagagagctacgttcggagacaataaagcattgttaaacgcggctcttcataaaaagtcagaacctattaacgataatagtagctgccacttttttagcaaggtccctaatataggaactggatattacaaatactttatcgacttgggtcttctcatgagaatggaaaggaaactatctgataagatatcttctcaaaagatcaaggaaatggaagaaacagaagacttttaattcttatcaataacatatttttctatgatctgtcttttaaacgatggattttccacaaatgcgcctctcaagtccctcatagaatgatacacgtataaaaaatatagcataggcaatgactccttatttttagacattagatatgccaaaatcatagccccgcttctatttactcccgcagcacaatgaaccaacacgggctcgtttcgttgatcacatttagataaaaaggcggttacgtcgtcaaaatatttactaatatcggtagttgtatcatctaccaacggtatatgaataatattaatattagagttaggtaatgtatatttatccatcgtcaaatttaaaacatatttgaacttaacttcagatgatggtgcatccatagcatttttataatttcccaaatacacattattggttacccttgtcattatagtgggagatttggctttgtgcatatctccagttgaacgtagtagtaagtatttatacaaacttttcttatccatttataacgtacaaatggataaaactactttatcggtaaacgcgtgtaatttagaatacgttagagaaaaggctatagtaggcgtacaagcagccaaaacatcaacacttatattctttgttattatattggcaattagtgcgctattactctggtttcagacgtctgataatccagtctttaatgaattaacgagatatatgcgaattaaaaatacggttaacgattggaaatcattaacggatagcaaaacaaaattagaaagtgatagaggtagacttctagccgctggtaaggatgatatatttgaattcaaatgtgtggatttcggcgcctattttatagctatgcgattggataagaaaacatatctgccgcaagctattaggcgaggtactggagacgcgtggatggttaaaaaggcggcaaaggtcgatccatctgctcaacaattttgtcagtatttgataaaacacaagtctaataatgttattacttgtggtaatgagatgttaaatgaattaggttatagcggttattttatgtcaccgcattggtgttccgattttagtaatatggaatagtgttagataaatgcggtaacgaatgttcctgtaaggaaccataacagcttagatttaacgttaaagatgagcataaacataataaacaaaattacaatcaaacttataacattaatatcaaacaatccaaaaaatgaaatcagtggagtagtaaacgcgtacataactcctggataacgtttagcagctgccgttcctattctagaccaaaaattcggtttcatgttttcgaaacggtattctgcaacaagtcgaggatcgtgttctacatatttggcggcattatccagtatctgcctattgatcttcatttcgttttcgattctggctatttcaaaataaaatcccgatgatagacctccagactttataatttcatctacgatgttcagcgccgtagtaactctaataatataggctgataagctaacatcataccctcctgtatatgtgaatatggcatgatttttgtccattacaagctcggttttaactttattgcctgtaataatttctctcatctgtaggatatctatttttttgtcatgcattgccttcaagacgggacgaagaaacgtaatatcctcaataacgttatcgttttctacaataactacatattctacctttttattttctaactcggtaaaaaaattagaatcccatagggctaaatgtctagcgatatttcttttcgtttcctctgtacacatagtgttacaaaaccctgaaaagaagtgagtatacttgtcatcatttctaatgtttcctccagtccactgtataaacgcataatccttgtaatgatctggatcatccttgactaccacaacatttcttttttctggcataacttcgttgtcctttacatcatcgaacttctgatcattaatatgctcatgaacattaggaaatgtttctgatggaggtctatcaataactggcacaacaataacaggagttttcaccgccgccatttagttattgaaattaatcatatacaactctttaatacgagttatattttcgtctatccattgtttcacattgacatatttcgacaaaaagatataaaatgcgtattccaatgcttctctgtttaatgaattactaaaatatacaaacacgtcactgtctggcaataaatgatatcttagaatattgtaacaatttattttgtattgcacatgttcgtgatctatgagttcttcttcgaatggcataggatctccgaatctgaaaacgtataaataggagttagaataataatatttgagagtattggtaatatataaactctttagcggtataattagtttttttctctcaatttctatttttagatgtgatggaaaaatgactaattttgtagcattagtatcatgaactctaatcaaaatcttaatatcttcgtcacacgttagctctttgaagtttttaagagatgcatcagttggttctacagatggagtaggtgcaacaattttttgttctacacatgtatgtactggagccattgttttaactataatggtgcttgtatcgaaaaactttaatgcagatagcggaagctcttcgccgcgactttctacgtcgtaattgggttctaacgccgatctctgaatggatactagttttctaagttctaatgtgattctctgaaaatgtaaatccaattcctccggcattatagatgtgtatacatcggtaaataaaactatagtatccaacgatcccttctcgcaaattctagtcttaaccaaaaaatcgtatataaccacggagatggcgtatttaagagtggattcttctaccgttttgttcttggatgtcatataggaaactataaagtccgcactactgttaagaatgattactaacgcaactatatagtttaaattaagcattttggaaacataaaataactctgtagacgatacttgactttcgaataagtttgcagacaaacgaagaaagaacagacctctcttaatttcagaagaaaactttttttcgtattcctgacgtctagagtttatatcaataagaaagttaagaattagtcggttaatgttgtatttcattacccaagtttgagatttcataatattatcaaaagacatgataatattaaagataaagcgctgactatgaacgaaatagctatatggttcgctcaagaatatagtcttgttaaacgtggaaacgataactgtatttttaatcacgtcagcggcatctaaattaaatataggtatatttattccacacactctacaatatgccacaccatcttcataataaataaattcgttagcaaaattattaattttagtgaaatagttagcgtcaactttcatagcttccttcaatctaatttgatgctcacacggtgcgaattccactctaacatcccttttccatgcctcaggttcatcgatctctataatatctagttttttgcgtttcacaaacacaggctcgtctctcgcgatgagatctgtatagtaactatgtaaatgataactagatagaaagatgtagctatatagatgacgatcctttaagagaggtataataactttaccccaatcagatagactgttgttatggtcttcggaaaaagaatttttataaatttttccagtattttccaaatatacgtacttaacatctaaaaaatccttaatgataataggaatggataatccgtctattttataaagaaatacatatcgcacattatacttttttttggaaatgggaataccgatgtgtctacataaatatgcaaagtctaaatattttttagagaatcttagttggtccaaattcttttccaagtacggtaatagatttttcatattgaacggtatcttcttaatctctggttctagttccgcattaaatgatgaaactaagtcactatttttataactaacgattacatcacctctaacatcatcatttaccagaatactgatcttcttttgtcgtaaatacatgtctaatgtgttaaaaaaaagatcatacaagttatacgtcatttcatctgtggtattcttgtcattgaaggataaactcgtactaatctcttctttaacagcctgttcaaatttatatcctatatacgaaaaaatagcaaccagtgtttgatcatccgcgtcaatattctgttctatcgtagtgtataacaatcgtatatcttcttctgtgatagtcgatacgttataaaggttgataacgaaaatatttttatttcgtgaaataaagtcatcgtaggattttggacttatattcgcgtctagtagatatgcttttatttttggaatgatctcaattagaatagtctctttagagtccatttaaagttacaaacaactaggaaattggtttatgatgtataatttttttagtttttatagattctttattctatacttaaaaaatgaaaataaatacaaaggttcttgagggttgtgttaaattgaaagcgagaaataatcataaattatttcattatcgcgatatccgttaagtttgtatcgtaatggcgtggtcaattacgaataaagcggatactagtagcttcacaaagatggctgaaatcagagctcatctaaaaaatagcgctgaaaataaagataaaaacgaggatattttcccggaagatgtaataattccatctactaagcccaaaaccaaacgagccactactcctcgtaaaccagcggctactaaaagatcaaccaaaaaggaggaagtggaagaagaagtagttatagaggaatatcatcaaacaactgaaaaaaattctccatctcctggagtcagcgacattgtagaaagcgtggccgctgtagagctcgatgatagcgacggggatgatgaacctatggtacaagttgaagctggtaaagtaaatcatagtgctagaagcgatctctctgacctaaaggtggctaccgacaatatcgttaaagatcttaagaaaattattactagaatctctgcagtatcgacggttctagaggatgttcaagcagctggtatctctagacaatttacttctatgactaaagctattacaacactatctgatctagtcaccgagggaaaatctaaagttgttcgtaaaaaagttaaaacttgtaagaagtaaatgcgtgcacttttttataaagatggtaaactctttaccgataataattttttaaatcctgtatcagacgataatccagcgtatgaggttttgcaacatgttaaaattcctactcatttaacagatgtagtagtatatgaacaaacgtgggaggaggcgttaactagattaatttttgtgggaagtgattcaaaaggacgtagacaatacttttacggaaaaatgcatgtacagaatcgcaacgctaaaagagatcgtatttttgttagagtatataacgttatgaaacgaattaattgttttataaacaaaaatataaagaaatcgtccacagattccaattatcagttggcggtttttatgttaatggaaactatgttttttattagatttggtaaaatgaaatatcttaaggagaatgaaacagtagggttattaacactaaaaaataaacacatagaaataagtcccgatgaaatagttatcaagtttgtaggaaaggacaaagtttcacatgaatttgttgttcataagtctaatagactatataaaccgctattgaaactgacggatgattctagtcccgaagaatttctgttcaacaaactaagtgaacgaaaggtatacgaatgtatcaaacagtttggtattagaatcaaggatctccgaacgtatggagtcaattatacgtttttatataatttttggacaaatgtaaagtccatatctcctcttccgtcaccaaaaaagttaatagcattaactatcaaacaaactgctgaagtggtaggtcatactccatcaatttcaaaaagagcttatatggcaacgactattttagaaatggtaaaggataaaaattttttagatgtagtatctaaaactacgttcgatgaattcctatctatagtcgtagatcacgttaaatcatctacggatggatgatatagatctttacacaaataattacaagaccgataaatggaaatggataagcgtatgaaatctctcgcaatgacagctttcttcggagagctaagcacattagatattatggcattgataatgtctatatttaaacgccatccaaacaataccattttttcagtggataaggatggtcagtttatgattgatttcgaatacgataattataaggcttctcaatatttggatctgaccctcactccgatatctggagatgaatgcaagactcacgcatcgagtatagccgaacaattggcgtgtgcggatattattaaagaggatattagcgaatatatcaaaactactccccgtcttaaacgatttataaaaaaataccgcaatagatcagatactcgtatcagtcgagatacagaaaagcttaaaatagctctagctaaaggcatagattacgaatatataaaagacgcttgttaataagtaaatgaaaaaaaactagtcgtttataataaaacacgatatggatgccaacgtagtatcattttctactattgcgacgtatatagacgctttagcgaagaatgcttcggaattagaacagaggtctaccgcatacgaaataaataatgaattggaactagtatttattaagccgccattgattactttgacaaatgtagtgaatatctctacgattcaggaatcgtttattcgatttaccgttactaataaggaaggtgttaaaattagaactaagattccattatctaaggtacatggtctagatgtaaaaaatgtacagttagtagatgctatagataacatagtttgggaaaagaaatcattagtgacggaaaatcgtcttcacaaagaatgcttgttgagactatcgacagaggaacgtcatatatttttggattacaagaaatatggatcctctatccgactagaattagtcaatcttattcaagcaaaaacaaaaaactttacgatagactttaagctaaaatattttctaggatccggtgcccagtctaaaagttctttgttgcacgctattaatcatccaaagtcaaggcctaatacatctctggaaatagaattcacacctagagacaatgaaacagttccatatgatgaactaataaaggaattgacgactctctcgcgtcatatatttatggcttctccagagaatgtaattctttctccgcctattaacgcgcctataaaaacctttatgttgcctaaacaagatatagtaggtttggatctggaaaatctatatgccgtaactaagactgacggcattcctataactatcagagttacatcaaacgggttgtattgttattttacacatcttggttatattattagatatcctgttaagagaataatagattccgaagtagtagtctttggtgaggcagttaaggataagaactggaccgtatatctcattaagctaatagagcctgtgaatgcaatcaatgatagactagaagaaagtaagtatgttgaatctaaactagtggatatttgtgatcggatagtattcaagtcaaagaaatacgaaggtccgtttactacaactagtgaagtcgtcgatatgttatctacatatttaccaaagcaaccagaaggtgttattctgttctattcaaagggacctaaatctaacattgattttaaaattaaaaaggaaaatactatagaccaaactgcaaatgtagtatttaggtacatgtccagtgaaccaattatctttggagaatcgtctatctttgtagagtataagaaatttagcaacgataaaggctttcctaaagaatatggttctggtaagattgtgttatataacggcgttaattatctaaataatatctattgtttggaatatattaatacacataatgaagtgggtattaagtccgtggttgtacctattaagtttatagcagaattcttagttaatggagaaatacttaaacctagaattgataaaaccatgaaatatattaactcagaagattattatggaaatcaacataatatcatagtcgaacatttaagagatcaaagcatcaaaataggagatatctttaacgaggataaactatcggatgtgggacatcaatacgccaataatgataaatttagattaaatccagaagttagttattttacgaataaacgaactagaggaccgttgggaattttatcaaactacgtcaagactcttcttatttctatgtattgttccaaaacatttttagacgattccaacaaacgaaaggtattggcgattgattttggaaacggtgctgacctggaaaaatacttttatggagagattgcgttattggtagcgacggatccggatgctgatgctatagctagaggaaatgaaagatacaacaaattaaactctggaattaaaaccaagtactacaaatttgactacattcaggaaactattcgatccgatacatttgtctctagtgtcagagaagtattctattttggaaagtttaatatcatcgactggcagtttgctatccattattcttttcatccgagacattatgctaccgtcatgaataacttatccgaactaactgcttctggaggcaaggtattaatcactaccatggacggagacaaattatcaaaattaacagataaaaagacttttataattcataagaatttacctagtagcgaaaactatatgtctgtagaaaaaatagctgatgatagaatagtggtatataatccatcaacaatgtctactccaatgactgaatacattatcaaaaagaacgatatagtcagagtgtttaacgaatacggatttgttcttgtagataacgttgatttcgctacaattatagaacgaagtaaaaagtttattaatggcgcatctacaatggaagatagaccgtctacaaaaaactttttcgaactaaatagaggagccattaaatgtgaaggtttagatgtcgaagacttacttagttactatgttgtttatgtcttttctaagcggtaaataataatatggtatgggttctgatctcccagttctaaatgcattaaataattccaatagagcgatttttgttcctataggaccttccaactgtggatactctgtattgttaatagatatattaatacttttgtcgggtaacagaggttctacgtcttctaaaaataaaagttttataacatctggcctgttcataaataaaaacttggcgattctatatatactcttattatcaaatctagccattgtcttatagatgtgagctactgtaggtgtaccatttgattttctttctaatactatatatttctctcgaagaagttcttgcacatcatctgggaataaaatactactgttgagtaaatcagttattttttttatatcgatattgatggacatttttatagttaaggataataagtatcccaaagtcgataacgacgataacgaagtatttatacttttaggaaatcacaatgactttatcagattaaaattaacaaaattaaaggagcatgtatttttttctgaatatattgtgactccagatacatatggatctttatgcgtcgaattaaatgggtctagttttcagcacggcggtagatatatagaggtggaggaatttatagatgctggaagacaagttagatggtgttctacatccaatcatatatctaaagatatacccgaagatatgcacactgataaatttgtcatttatgatatttatacgtttgattcgttcaagaataaacgattggtattcgtacaggtacctccgtcgttaggagatgatagtcatttgactaatccgttattgtcaccgtattatcgtaattcagtagccagacaaatggtcaatgatatgatttttaatcaagattcatttttaaaatatttattagaacatctgattagaagccactatagagtttctaaacatataacaatagttagatacaaggataccgaagaattaaatctaacgagaatatgttataatagagataagtttaaggcgtttgtattcgcttggtttaacggcgtttcggaaaatgaaaaggtactagatacgtataaaaaggtatctaatttgatataatgaattcagtgactgtatcacacgcgccatatactattacttatcacgatgattgggaaccagtaatgagtcaattggtagagttttataacgaagtagccagttggctgctacgagacgagacgtcgcctattcctgataagttctttatacagttgaaacaaccgcttagaaataaacgagtatgtgtgtgtggtatagatccgtatccgaaagatggaactggtgtaccgttcgaatcaccaaattttacaaaaaaatcaattaaggagatagcttcatctatatctagattaaccggagtaattgattataaaggttataaccttaatataatagacggggttataccctggaattattacttaagttgtaaattaggagaaacaaaaagtcacgcgatttactgggataagatttccaagttactgctgcagcatataactaaacacgttagtgttctttattgtttgggtaaaacagatttctcgaatatacgggccaagttagaatccccggtaactaccatagtcggatatcatccagcggctagagaccgccaattcgagaaagatagatcatttgaaattatcaacgttttactggaattagacaacaaggcacctataaattgggctcaagggtttatttattaatgctttagtgaaattttaacttgtgttctaaatggatgcggctattagaggtaatgatgttatctttgttcttaagactataggtgtcccgtcagcgtgcagacaaaatgaagatccaagatttgtagaagcatttaaatgcgacgagttagaaagatatattgagaataatccagaatgtacactattcgaaagtcttagggatgaggaagcatactctatagtcagaattttcatggatgtagatttagacgcgtgtctagacgaaatagattatttaacggccattcaagattttattatcgaggtgtcaaactgtgtagctagattcgcgtttacagaatgcggcgccattcatgaaaatgtaataaaatccatgagatctaatttttcattgactaagtctacaaatagagataaaacaagttttcatattatctttttagatacgtataccactatggatacattgatagctatgaaacgaacactattagaattaagtagatcatctgaaaatccactaaccagatcgatagacactgccgtatataggagaaaaacaactcttcgggttgtaggtactaggaaaaatccaaattgcgacactattcatgtaatgcaaccaccgcatgataatatagaagattacctattcacttacgtggatatgaacaacaatagttattacttttctctacaacaacgattggaggatttagttcctgataagttatgggaaccagggtttatttcattcgaagacgctataaaaagagtttcaaaaatattcattaattctataataaactttaatgatctcgatgaaaataattttacaacggtaccactggtcatagattacgtaacaccttgtgcattatgtaaaaaacgatcgcataaacatccgcatcaactatcgttggaaaatggtgctattagaatttacaaaactggtaatccacatagttgtaaagttaaaattgttccgttggatggtaataaactgtttaatattgcacaaagaattttagacactaactctgttttattaaccgaacgaggagaccatatagtttggattaataattcatggaaatttaacagcgaagaacccttgataacaaaactaattttgtcaataagacatcaactacctaaggaatattcaagcgaattactctgtccaagaaaacgaaagactgtagaagctaacatacgagacatgttagtagattcagtggagaccgatacctatccggataaacttccgtttaaaaatggtgtattggacctggtagacggaatgttttactctggagatgatgctaaaaaatatacgtgtactgtatcaaccggatttaaatttgacgatacaaagttcgtcgaagacagtccagaaatggaagagttaatgaatatcattaacgatatccaaccattaacggatgaaaataagaaaaatagagagctatatgaaaaaacattatctagttgtttatgcggtgctaccaaaggatgtttaacattcttttttggagaaactgcaactggaaagtcgacaaccaaacgtttgttaaagtctgctatcggtgacctgtttgttgagacgggtcaaacaattttaacagatgtattggataaaggacctaatccatttatcgctaacatgcatttgaaaagatctgtattctgtagcgaactacctgattttgcctgtagtggatcaaagaaaattagatctgacaatattaaaaagttgacagaaccttgtgtcattggaagaccgtgtttctccaataaaattaataatagaaaccatgcgacaatcattatcgatactaattacaaacctgtttttgataggatagataacgcattaatgagaagaattgccgtcgtgcgattcagaacacacttttctcaaccttctggtagagaggctgctgaaaataatgacgcgtacgataaagtcaaactattagacgaggggttagatggtaaaatacaaaataatatatatagatttgcatttctatacttgttggtgaaatggtacaaaaaatatcatgttcctattatgaaactatatcctacacccgaagagattcctgactttgcattctatctcaaaataggtactctgttggtatctagctctgtaaagcatattccattaatgacggacctctccaaaaagggatatatattgtacgataatgtggtcactcttccgttgactactttccaacagaaaatatccaagtattttaattctagactatttggacacgatatagagagcttcatcaatagacataagaaatttgccaatgttagtgatgaatatctgcaatatatattcatagaggatatttcatctccgtaaatatatgctcatatatttatagaagatatcacatatctaaatgaataccggaatcatagatttatttgataatcatgttgatagtataccaactatattacctcatcagttagctactctagattatctagttagaactatcatagatgagaacagaagcgtgttattgttccatattatgggatcaggtaaaacaataatcgctttgttgttcgccttggtagcttccagatttaaaaaggtttacattctagtgccgaacatcaacatcttaaaaattttcaattataatatgggtgtagctatgaacttgtttaatgacgaattcatagctgagaatatctttattcattccacaacaagtttttattctcttaattataacgataacgtcattaattataacggattatctcgctacaataactctatttttatcgttgatgaggcacataatatctttgggaataatactggagaacttatgaccgtgataaaaaataaaaacaagattccttttttactattgtctggatctcccattactaacacacctaatactctgggtcatattatagatttaatgtccgaagagacgatagattttggtgaaattattagtcgtggtaagaaagtaattcagacacttcttaacgaacgcggtgtgaatgtacttaaggatttgcttaaaggaagaatatcatattacgaaatgcctgataaagatctaccaacgataagatatcacggacgtaagtttctagatactagagtagtatattgtcacatgtctaaacttcaagagagagattatatgattactagacgacagctatgttatcatgaaatgtttgataaaaatatgtataacgtgtcaatggcagtattgggacaacttaatctgatgaataatttagatactttatttcaggaacaggataaggaattgtacccaaatctgaaaataaataatggcgtgttatacggagaagaattggtaacgttaaacattagttccaaatttaaatactttattaatcggatacagacactcaacggaaaacattttatatacttttctaattctacatatggcggattggtaattaaatatatcatgctcagtaatggatattctgaatataatggttctcagggaactaatccacatatgataaacggcaaaccaaaaacatttgctatcgttactagtaaaatgaaatcgtctttagaggatctattagatgtgtataattctcctgaaaacgatgatggtagtcaattgatgtttttgttttcatcaaacattatgtccgaatcctatactctaaaagaggtaaggcatatttggtttatgactatcccagatactttttctcaatacaaccaaattcttggacgatctattagaaaattctcttacgccgatatttctgaaccagttaatgtatatcttttagccgccgtatattccgatttcaatgacgaagtgacgtcattaaacgattacacacaggatgaattaattaatgttttaccatttgacatcaaaaagctgttgtatctaaaatttaagacgaaagaaacgaatagaatatactctattcttcaagagatgtctgaaacgtattctcttccaccacatccatcaattgtaaaagttttattgggagaattggtcagacaatttttttataataattctcgtattaagtataacgataccaagttacttaaaatggttacatcagttataaaaaataaagaagacgctaggaattacatagatgatattgtaaacggtcacttctttgtatcgaataaagtatttgataaatctcttttatacaaatacgaaaacgatattattacagtaccgtttagactttcctacgaaccatttgtttggggagttaactttcgtaaagaatataacgtggtatcttctccataaaactgatgagatatataaagaaataaatgtcgagctttgttaccaatggatacctttccgttacattggaaccacacgagctgacgttagacataaaaactaatattaggaatgccgtatataagacgtatctccatagagaaattagtggtaaaatggccaagaaaatagaaattcgtgaagacgtggaattacctctcggcgaaatagttaataattctgtagttataaacgttccgtgtgtaataacctacgcgtattatcacgttggggatatagtcagaggaacattaaacatcgaagatgaatcaaatgtaactattcaatgtggagatttaatctgtaaactaagtagagattcgggtactgtatcatttagcgattcaaagtactgcttttttcgaaatggtaatgcgtatgacaatggcagcgaagtcactgccgttctaatggaggctcaacaaggtatcgaatctagttttgtttttctcgcgaatatcgtcgactcataaaaaagagaatagcggtaagtataaacacgaatactatggcaataattgcgaatgttttattctcttcgatatatttttgataatatgaaaaacatgtctctctcaaatcggacaaccatctcataaaatagttctcgcgcgctggagaggtagttgccgctcgtataatctctccagaataatatacttgcgtgtcgtcgttcaatttatacggatttctatagttctctgttatataatgcggtttgccctcatgattagacgacgacaatagtgttctaaatttagatagttgatcagaatgaatgtttattggcgttggaaaaattatccatacagcgtctgcagagtggttgatagttgttcctagatatgtaaaataatccaacttactaggcagcaaattgtctagataaaatactgaatcaaacggtgcagacgtattggcggatctaatggaatccaattgattaactatcttttgaaaatatacatttttatgatccaatacttgtaagaatatagaaataatgataagtccatcatcgtgtttttttgcctcttcataagaactatattttttcttattccaatgaacaagattaatctctccagagtatttgtacacatctatcaagtgattggatccataatcgtcttcctttccccaatatatatgtagtgatgataacacatattcattggggagaaaccctccacttatatatcctcctttaaaattaatccttactagttttccagtgttctggatagtggttggtttcgactcattataatgtatgtctaacggcttcaatcgcgcgttagaaattgcttttttagtttctatattaataggagatagttgttgcggcatagtaaaaatgaaatgataactgtttaaaaatagctcttagtatgggaattacaatggatgaggaagtgatatttgaaactcctagagaattaatatctattaaacgaataaaagatattccaagatcaaaagacacgcatgtgtttgctgcgtgtataacaagtgacggatatccgttaataggagctagaagaacttcattcgcgttccaggcgatattatctcaacaaaattcagattctatctttagagtatccactaaactattacggtttatgtactacaatgaactaagagaaatctttagacggttgagaaaaggttctatcaacaatatcgatcctcactttgaagagttaatattattgggtggtaaactagataaaaaggaatctattaaagattgtttaagaagagaattaaaagaggaaagtgatgaacgtataacagtaaaagaatttggaaatgtaattctaaaacttacaacacgggataaattatttaataaagtatatataagttattgcatggcgtgttttattaatcaatcgttggaggatttatcgcatactagtatttacaatgtagaaattagaaagattaaatcattaaatgattgtattaacgacgataaatacgaatatctgtcttatatttataatatgctagttaatagtaaatgaacttttacagatctagtataattagtcagattattaagtataatagacgactagctaagtctattatttgcgaggatgactctcaaattattacactcacggcattcgttaaccaatgcctatggtgtcataaacgagtatccgtgtccgctattttattaactactgataacaaaatattagtatgtaacagacgagatagttttctctattctgaaataattagaactagaaacatgtttagaaagaaacgattatttctgaattattccaattatttgaacaaacaggaaagaagtatactatcgtcatttttttctctagatccagctactactgataatgatagaatagacgctatttatccgggtggcatacccaaaaggggtgagaatgttccagagtgtttatccagggaaattaaagaagaagttaatatagacaattcttttgtattcatagacactcggttttttattcatggcatcatagaagataccattattaataaattttttgaggtaatcttctttgtcggaagaatatctctaacgagtgatcaaatcattgatacatttaaaagtaatcatgaaatcaaggatctaatatttttagatccgaattcaggtaatggactccaatacgaaattgcaaaatatgctctagatactgcaaaacttaaatgttacggccatagaggatgttattatgaatcattaaaaaaattaactgaggatgattgattaaaaaatataaattaatttaccatcgtgtatttttataacgggattgtccggcatatcatgtagatagttaccgtctacatcgtatactcgaccatctacgcctttaaatcctctatttattgacattaatctattagaattggaataccaaatattagtaccctcaattagtttattggtaatattttttttagacgatagatcgatggctcttgaaaccaaggttttccaaccggactcattgtcgatcggtgagaagtctttttcattagcatgaatccattctaatgatgtatgtttaaacactctaaacaattggacaaattcttttgatttgctttgaatgatttcaaataggtcttcgtctacagtaggcataccattagataatctagccattataaagtgcacgtttacatatctacgttctggaggagtaagaacgtgactattgagacgaatggctcttcctactatctgacgaagagacgcctcgttccatgtcatatctaaaatgaagatatcattaattgagaaaaaactaataccctcgcctccactagaagagaatacgcatgttttaatgcattctccgttagtgtttgattcttggttaaactcagccaccgccttgattctagtatcttttgttctagatgagaactctatattagagataccaaagactttgaaatatagtaataagatttctattcctgactgattaacaaatggttcaaagactagacatttaccatgggatgctaatattcccaaacatacatctataaatttgacgcttttctcttttaattcagtaaatagagagatatcagccgcactagcatcccctttcaatagttctccctttttaaaggtatctaatgcggatttagaaaactctctatctcttaatgaatttttaaaatcattatatagtgttgctatctcttgcgcgtattcgcccggatcacgattttgtctttcaggaaagctatcgaacgtaaacgtagtagccatacgtctcagaattctaaatgatgatatacctgtttttatttcagcgagtttagccttttgataaatttcttcttgctttttcgacatattaacgtatcgcattaatactgttttcttagcgaatgatgcagacccttctacgtcatcaaaaatagaaaactcgttattaactatatacgaacatagtcctcctagtttggagactaattctttttcatcgactagacgtttattctcaaatagcgattggtgttgtaaggatcctggtcgtagtaagttaaccaacatggtgaattcttgcacactattgacgataggtgtagccgataaacaaatcatcttatggttttttaacgcaatggtcttagataaaaaattatatactgaacgagtaggacggatcttaccatcttctttgattaatgatttagaaatgaagttatgacattcatcaataatgacgcatattctactcttggaattaatagttttgatattagtaaaaaatttatttctaaaattttgatcatcgtaattaataaaaatacaatccttcgttatctctggagcgtatctgagtatagtgttcatccaaggatcttctatcaaagcctttttcaccaataagataatagcccaattcgtataaatatccttaagatgtttgagaatatatacagtagtcattgttttaccgacacccgtttcatggaacaataaaagagaatgcatactgtctaatcctaagaaaactcttgctacaaaatgttgataatccttgaggcgtactacgtccgaccccatcatttcaacgggcatattagtagttctgcgtaaggcataatcgatataggccgcgtgtgatttactcatttatgagtgataagtaataactatgttttaaaaatcacagcagtagtttaactagtcttctctgatgtttgttttcgatactttttgaatcagaagtcatactagaataaagcaacgagtgaacgtaatagagagcttcgtatactctattcgaaaactctaagaacttattaatgaattccgtatccactggattgtttaaaatactaaattgaacactgttcacatccttccaagaagaagacttagtgacggacttaacatgagacataaataaatccaaattttttttacaaacatcactagccaccataatggcgctatctttcaaccagctatcgcttacgcattttagcagtctaacatttttaaagagactacaatatattctcatagtatcgattacacctctaccgaataaagttggaagtttaataatacaatatttttcgtttacaaaatcaaataatggtcgaaacacgtcgaaggttaacatcttataatcgctaatgtatagattgttttcagtgagatgattattagatttaatagcatctcgttcacgtttgaacagtttattgcgtgcgctgaggtcggcaactacggcgtccgctttagtactcctcccataatactttacgctattaatctttaaaatttcatagactttatctagatcgctttctggtaacatgatatcatgtgtaaaaagttttaacatgtcggtcggcattctatttagatcattaactctagaaatctgaagaaagtaattagctccgtattccagactaggtaatgggcttttacctagagacagattaagttctggcaatgtttcataaaatggaagaaggacatgcgttccctcccggatattttttacaatttcatccatttacaactctatagtttgttttcattattattagttattatctcccataatcttggtaatacttaccccttgatcgtaagataccttatacaggtcattacatacaactaccaattgtttttgtacataatagattggatggttgacatccatggtggaataaactactcgaacagatagtttatctttccccctagatacattagccgtaatagttgtcggcctaaagaatatctttggtgtaaagttaaaagttagggttcttgttccattattgctttttgtcagtagttcattataaattctcgagatgggtccgttctctgaatatagaacatcatttccaaatctaacttctagtctagaaataatatcggtcttattcttaaaatctattcccttgatgaagggatcgttaatgaacaaatccttggcctttgattcggctgatctattatctccgttatagacgttacgttgactagtccaaagacttacaggaatagatgtatcgatgatgttgatactatgtgatatgtgagcaaagattgttctcttagtggcatcactatatgttccagtaatggcggaaaactttttagaaatgttatatataaaagaattttttcgtgttccaaacattagcagattagtatgaagataaacactcatattatcaggaacattatcaatttttacatacacatcagcatcttgaatagaaacgataccatcttctggaacctctacgatctcggcagactccggataaccagtcggtgggccatcgctaacaataactagatcatccaacaatctactcacatatgcatctatataatctttttcatcttgtgagtaccctggatacgaaataaatttattatccgtatttccataataaggtttagtataaacagagagagatgttgccgcatgaacttcagttacagtcgccgttggttggtttatttgacctattactctcctaggtttctctataaacgatggtttaatttgtacattcttaaccatatatccaataaagctcaattcaggaacataaacaaattctttgttgaacgtttcaaagtcgaacgaagagtcacgaataacgatatcggatactggattgaaggttaccgttacggtaatttttgaatcggatagtttaagactgctgaatgtatcttccacatcaaacggagttttaatataaacgtatactgtagatggttctttaatagtgtcattaggagttaggccaatagaaatatcattaagttcactagaatatccagagtgtttcaaagcaattgtattattgatacaattattatataattcttcgccctcaatttcccaaataacaccgttacacgaagagatagatacgtgattaatacatttatatccaacatatggtacgtaactgaatcttcccatacctttaacttctggaagttccaaactcagaaccaaatgattaagcgcagtaatatactgatccctaatttcgaagctagcgatagcctgattgtctggaccatcgtttgtcataactccggatagagaaatatattgcggcatatacaaagttggaatttgactatcgactgcgaagacattagaccgtttaatagagtcatccccaccgatcaaagaattaatgatagtattattcattttctatttaaaatggaaaaagcttacaataaactccgtagagaaatatctataatttgtgagttttccttaaagtaacagcttccgtaaacgccgtctttatctcttagtaggtttattgtatttatgaccttttccttatcttcatagaatactaaaggcaacaaagaaatttttggttcttctctaagagctacgtgagacttaaccatagaagccaacgaatccctacatattttagaacagaaataccctacttcaccacccttgtatgtctcaatactaataggtctaaaaaccaaatcttgattacaaaaccaacacttatcaattacactatttgtcttaatagacacatctgccatagatttataatactttggtagtatacaagcgagtgcttcttctttagcgggcttaaagactgctttaggtgctgaaataaccacatctggaaggcttactcgcttagccatttaattacggaactatttttttatacttctaatgagcaagtagaaaacctctcatctacaaaaacgtactcgtgtccataatcctctaccatagttacacgttttttagatctcatatgtgctaaaaagttttcccatactaattggttactattatttttcgtataatttttaacagtttgaggttttagatttttagttacagaagtgatatcgaatattttatccaaaaagaatgaataattaattgtcttagaaggagtgttttcttggcaaaagaataccaagtgcttaaatatttctactacttcattaatcttttctgtactcagattcagtttctcatcttttacttgattgattatttcaaagactaacttataatcctttttatttattctctcgttagccttaagaaaactagatacaaaatttgcatctacatcatccgtggatatttgatttttttccatgatatccaagagttccgagataatttctccagaacattgatgagacaataatctccgcaatacatttctcaaatgaataagtttattagacacgtggaagtttgactttttttgtacctttgtacatttttgaaataccgactcgcaaaaaatacaatattcatatccttgttcagatactataccgttatgtctacaaccgctacataatcgtagattcatgttaacactctacgtatctcgtcgtccaatattttatataaaaacattttatttctagacgttgccagaaaatcctgtaatatttttagttttttgggctgtgaataaagtatcgccctaatattgttaccgtcttccgccaatatagtagttaaattatccgcacatgcagaagaacaccgcttaggcggattcagtacaatgttatatttttcgtaccaactcatttaaatatcataatctaaaatagttctgtaatatgtctagcgctaatatattgatcataatcctgtgcataaattaagatacaacaatgtctcgaaatcatcgacatggcttcttccatagttagaagatcgtcgtcaaagttagcaacgtgattcatcaacatttgctgttttgaggcagcaaatactgaaccgtcgccattcaaccattcataaaaaccatcgtctgaatccattgataatttcttgtactggtttttgagagctcgcatcaatctagcatttctagctcccggattgaaaacagaaagaggatcgtacatccagggtccattttctgtaaatagaatcgtataatgtcccttcaagaagatatcagacgatccacaatcaaagaattggtctccgagtttgtaacaaactgcggactttaacctatacatgataccgtttagcataatttctggtgatacgtcaatcggagtatcatctattagagatctaaagccggtgtaacattctccaccaaacatattcttattctgacgtcgttctacataaaacatcattgctccattaacgataacaggggaatgaacagcactacccatcacattagttcccaatggatcaatgtgtgtaactccagaacatcttccatagcctatgttaggaggagcgaacaccactcttccactattgccatcgaatgccatagaataaatatccttggaattgatagaaatcggactgtcggatgttgtgatcatcttcataggattaacaactatgtatggtgccgcctgaagtttcatatcgtaactgatgccgtttataggtctagccacagaaaccaacgtaggtctaaatccaactatagacaaaatagaagccaatatctgttcctcatctgtcataacttgagagcatccagtatgaataatcttcattagatggggatctaccgcatcatcatcgttacaataaaaaattcccattctaatgttcataattgcttttctaatcatggtatgcatgtttgctctctgaatctctgtggaaattagatctgatacacctgtaatcactatcggattatcctccgtaagacgattaaccaacaacatataattataagactttacttttctaaattcataaagttgctggattaggctataggtgtctccatgtacatacgcgttctcgagcgcaggaagtttaataccgaatagtgccatcagaataggatgaatatagtaattagtttctggttttctataaataaaagacaaatcttgtgaactagacatatcggtaaaatgcatggattggaatcgtgtagtcgacagaagaatatgatgattagatggagagtatattttatctaactctttgagttggtcaccgattctaggactagctcgagaatgaataagtactaaaggatgagtacatttcacagaaacactagcattgttcaatgtgctctttacatgggtaaggagttgaaatagctcgtttctatttgttctgacaatatttagtttattcataatgttaagcatatcctgaatagtaaagttagatgtgtcatacttgttagtagttagatatttagcaattgcattcccatcatttctcaatctcgtactccaatcatgcgtggatgctacttcgtcgatggaaaccatacaatcctttttgataggctgttgagattgatcatttcctgcacgtttaggtttggtacgttgatttctagcccctgcggatataaagtcatcgtctacaatttgggacaatgaattgcatacactacaagacaaagatttatcagaagtgtgaatatgatcttcatctaccaaagaaagagtttgattagtataactagattttagtcctgcgttagatgttaaaaaaacatcgctattgaccacggcttccattatttatattcgtagtttttactcgaaagcgtgattttaatatccaatcttattacttttggaatcgttcaaaacctttgactagttgtagaatttgatctattgccctacgcgtatactcccttgcatcatatacgttcgtcaccagatcgtttgtttcggcctgaagttggtgcatatctctttcaacattcgacatgagatccttaagggccatatcgtctagattttgttgagatgctgctcctggatttggattttgttgtgctgttgtacatactgtaccaccagtaggtgtaggagtacatacagtggccacaataggaggttgagaaagtgtaaccgttggagtagtacaagaaatacttccatccgattgttgtgtacatgtagttgttggtaacgtctgagaaggttgggtagatggcggcgtcgtcgttttttgatctttattaaatttagagataatatcctgaacagcattgctcggcgtcaacgctggaaggagtgaactcgccggcgcatcagtatcttcagacagccaatcaaaaagattagacatatcagatgatgtattagtttgttgtcgtggttttggtgtaggagcagtactactaggtagaagaataggagccgatgtagctgttggaaccggctgtggagttatatgaatagttggttgtagcggttggataggctgtctgctggcggccatcatattatctctagctagttgttctcgcaactgtctttgataatacgactcttgagactttagtcctatttcaatcgcttcatcctttttcgtatccggatccttttcttcagaataatagattgacgactttggtgtagaggattctgccagcctctgtgagaacttgttaaagaagtccatttaaggctttaaaattgaattgcgattataagattaaatggcagacacagacgatattatcgactatgaatccgatgatctcaccgaatacgaggatgatgaagaagaggaagaagatggagagtcactagaaactagtgatatagatcccaaatcttcttataagattgtagaatcagcatccactcatatagaagatgcgcattccaatcttaaacatatagggaatcatatatctgctcttaaacgacgctatactagacgtataagtctatttgaaatagcgggtataatagcagaaagctataacttgcttcaacgaggaagattacctctagtttcagaattttctgacgaaacgatgaagcaaaatatgctacatgtaattatacaagagatagaggagggttcttgtcctatagtcatcgaaaagaacggagaattgttgtcggtaaacgattttgacaaagatggtctaaaattccatctagactatattatcaaaatttggaaacttcaaaaacgatattagaatttatacgaatatcgttctctaaatgtcacaatcaagtctcgcatgttcagcaatttattgtcgtactttatatcgtgttcattaacgatatcttgcaaaatagtaatgattctatcttccttcgatagatattcttcagagattattgtcttatattctttcttgttatcagatatgaatttgataagactttgaacattattgatacccgtctgtttaattttttctacagatattttagttttggcagattctatcgtatctgtcaatagacatccaacatcgacattcgacgtcaattgtctataaatcaacgtataaattttagaaataacattagcgaattgttgtgcgttgatgtcgttattctgaaacagtatgattttaggtagcattttcttaacaaagagaacgtatttattgttactcagttgaacagatgatatatccagattactaacgcatctgattccgtataccaaactttcagaagaaatggtatacaattgtttgtattcattcaatgtctctttttcagaaattagtttagagtcgaatactgcaataattttcaagagatagttttcatcagataagattttatttagtgtagatatgataaaactattgttttgttggagaacttgatacgccgcgttctctgtagtcgacgctctcaaatgggaaacaatctccattatttttttggaatcggatactatatcttcggtatcttgacgcagtctagtatacatagagttaagagagattagagtttgtacattaagcaacatgtctctaaatgtggctacaaacttttcctttttcacatcatctagtttattatataccgatttcacaacggcaccagatttaaggaaccagaatgaaaaactctgataactacaatatttcatcatagttacgattttatcatcttctatagttggtgtaatagcgcatacctttttctccaagactggaaccaacgtcataaaaatgtttaaatcaaaatccatatcaacatctgatgcgctaagaccagtctcgcgttcaagattatctttactaatggtgacgaactcatcgtataaaactctaagtttgtccattatttatttacagatttagttgtttaatttatttgtgctcttccagagttgggatagtatttttctaacgtcggtattatattattaggatctacgttcatatgtatcataatattaatcatccacgttttgataaatctatctttagcttctgaaataacgtatttaaacaaaggagaaaaatatttagctacggcatcagacgcaataacattttttgtaaatgtaacgtatttagacgacagatcttcgttaaaaagttttccatctatgtagaatccatcggttgttaacaccattcccgcgtcagattgaataggagtttgaatagtttgttttggaaatagatccttcaataacttatagttgggtgggaaaaaatcgattttatcactagactctttcttttttactatcattacctcatgaactatttcttgaatgagtatatgtattttctttcctatatcggacgcgttcattggaaaatataccatgtcgttaactataagaatatttttatcctcgtttacaaactgaataatatcagatgtagttcgtaaacgaactatatcatcaccagcacaacatctaactatatgatatccactagtttcctttagccgtttattatcttgttccatattagcagtcattccatcatttaagaaggcgtcaaaaataatagggagaaatgacattttggattctgttacaactttaccaaaattaaggatatacggacttactatctttttctcaacgtcaatttgatgaacacacgatgaaaatgtgcttctatgagattgatcatgtagaaaacaacaagggatacaatatttccgcatatcatgaaatatattaagaaatcccaccttattatatttccccaaaggatccatgcacgtaaacattatgccgttatcattaataaagacttctttctcatcggatctgtaaaagttgttactgatttttttcattccaggatctagataattaataatgatgggttttctattcttattctttgtattttggcatatcctagaccagtaaacagtttccactttggtaaaatcagcagacttttgaacgctattaaacatggcattaatggcaataactaaaaatgtaaaatatttttctatgttaggaatatggtttttcactttaatagatatatggtttttggccaaaatgatagatatttttttatccgaggatagtaaaatattattagtcgccgtctctataaaaatgaagctagtctcgatatccaattttattctagaattgataggagtcgccaaatgtaccttatacgttatatctcccttgatgcgttccatttgtgtatctatatcggacacaagatctgtaaatagttttacgttattaatcatcacggtatcgccgtcgctagataacgctaatgtaccatccaagtcccaaatggagagatttaactgttcatcgtttagaataaaatgattaccggtcatattaataaagtgttcatcgtatctagataacaacgacttataattaatgtccaagtcttgaactcgctgaatgatcttttttaacccagttagttttagattggtacgaaatatattgttaaactttgattctacagtaatgtccaaatctagttgtggaaatacttccatcaacattgtttcaaacttgataatattattatctacatcttcgtacgatccaaattccggaatagatgtatcgcacgctctggccacccagataaccaaaaagtcacacgctccaggatatacattgtataaaaagctatcgttttttagtagggtttttttctgcgtgtatacgaagggattaaaaatagtattatcaacgtaactatattccaaattattcttatgagaatagataataatatcgtccttaatatctaacaaatttcctaaatatccctttaattgagtcattcgaagcgtcaatagaatatgtctcttaactatttccggctgttgtatatttaaatgacttcgtaaaaaataatatatgggcgacttctcatctatgtaatcatatggagtgagatatagggctcgttctacctcctgccccttacccacctgtaataccaattgcggacttactatatatcgcatatttatatcgtggggtaaagtgaaaatctactaccgatgatgtaagtcttacaatgttcgaaccagtaccagatcttaatttggaggcctccgtagaactaggggaggtaaatatagatcaaacaacacctatgataaaggagaatagcggttttatatcccgcagtagacgtctattcgcccatagatctaaggatgatgagagaaaactagcactacgattctttttacaaagactttattttttagatcatagagagattcattatttgttcagatgcgttgacgctgtaaaagacgtcactattaccaaaaaaaataacattatcgtggcgccttatatagcacttttaactatcgcatcaaaaggatgcaaacttacagaaacaatgattgaagcattctttccagaactatataatgaacatagtaagaaatttaaattcaactctcaagtatccatcatccaagaaaaactcggataccagtttggaaactatcacgtttatgattttgaaccgtattactctacagtagctctggctattcgagatgaacattcatctggcatttttaatatccgtcaagagagttatctggtaagttcattatctgaaataacatatagattttatctaattaatctaaaatctgatcttgttcaatggagtgctagtacgggcgctgtaattaatcaaatggtaaatactgtattgattacagtgtatgaaaagttacaactggtcatagaaaatgattcacaatttacatgttcattggctgtggaatcaaaacttccaataaaattacttaaagatagaaatgaattatttacaaaattcattaacgagttaaaaaagaccagttcattcaagataagcaaacgcgataaggatacgctactaaaatattttacttaggactggagttagaatttatagacgactcatttcgtttatcattgttactattattactattactatcattattagtgttggcattattagtattcttcttgtcatcttgttcagaaatatacagcaatgctatacctaatactaaatacattatcatgctcgcaatggctctaacaacaacgaaccaaaatgaatttggtcgtagcttttgttcacaaaaatacataaagaaatgtctacataaatctatggcgccattggctacttgaaatagcgccagtcctcctacagattttaatatagctgtataacatgacatttattcatcatcaaaagagacagagtcaccatctgtcatatttagattttttttcatgtgttcaaagtatcctctactcatttcattataatagtttatcatacttagaattttaggacggatcaatgagtaagacttgactagatcgtcagtagtaatttgtgcatcgtctattctgcatccgcttcgtcgaataatgtatagcatcgctttgagattctccatagctatcaagtctttatacaatgacatggaaatatctgtgaatactttatacttctccaacatcgatgccttaacatcatcgcctactttagcattgaaaatacgttctattgtgtagatggatgtagcaagatttttaaacaacaatgccatcttacacgatgattgcctcaagtctccaatcgtttgtttagaacgattagctacagagtccaatgcttggctgactagcatattattatctttagaaattgtattcttcaatgaggcgtttatcatatctgtgatttcgttagtcatattacagtctgactgggttgtaatgttatccaacatatcacctatggatacggtacacgtaccagcatttgtaataatcctatctaagatgttgtatggcattgcgcagaaaatatcttctcctgtaatatctccactctcgataaatctactcagattattcttaaatgccttattctctggagaaaagatatcagtgtccatcatttcattaatagtatacgcagaaaagataccacgagtatcaattctatccaagatacttatcggttccgagtcacagataatggtttcctctccttcgggagatcctgcatagaaatatctaggacaatagtttctatactgtctgtaactctgataatctctaaagtcactaactgataccatgaaattgagaagatcaaacgctgaagtaattaatttttctgcctcgtttttactacaactagttttcatcaatgtagtgacgatgtattgtttagttacttttggtctaatactgatgatagagatattattgcttcccataatggatcttctagtagtcaccttaaagcccattgatgcgaatagcagatagataaagtcttggtatgactcctttctaatatagtacggactacctttgtcacccaactttatacccacataagccataacaacctctttaatagccgtttcatgaggtttatcagccatgagcctgagtagttggaagaatctcatgaatcccgtctcagaaagtcctatatgcatgatagatttatctttcctgggaaactctcgtatagtcatagatgaaatactctttaaagtttctgaaataagattagtaacagtcttacctccgactactctaggtaacaaacaaactctaataggtgttttctctgcggagataatatcagaaaggatagagcaataagtagtattattgtgattataaagaccgaatacataacaggtagaatttataaacatcatgtcctgaaggtttttagacttgtattcctcgtaatccataccgtcccaaaacatggatttggtaactttgatagccgtagatctttgttccttcgccaacaggttaaagaaattaataaagaatttgttgtttctatttatgtccacaaattgcacgtttggaagcgccacggttacattcactgcagcattttgaggatcgcgagtatgaagtacgatgttattgtttactggtatatctggaaagaaatctaccagtctaggaataagagattgatatcgcatagaaatagtaaagtttataatctcatcatcgaagagcattttgttaccattgtaataaatatccactctgtcatatgtataaatgaagtactgttcaaacatgatgagatgtttatatgttggcatagtagtgagatcgacgtttggtaatggcaatgtattaagattaactccataatgtctagcagcatctgcgatgttataagcgtcgtcaaagcggggtcgatcttgtattgttatatattgtctaacacctataagattatcaaaatcttgtctgcttaatacaccgttaacaatttttgccttgaattcttttattggtgcattaataacatccttatagaggatgttaaacaaataagtgttatcaaagttaagatctggatatttcttttctgctagaacatccattgagtcggagccatctggtttaatataaccaccgataaatctagctctgtattctgtatccgtcaatctaatattaagaaggtgttgagtgaaaggtggaagatcgtaaaagctgtgagtattaatgataggattagtttccgaactaatgttaattggggtattaataatatctatatttccagcgttaagtgtaacattaaacagttttaattcacgtgacgtggtatcaattaaataattaatgcccaatttggatatagcagcctgaagctcatcttgtttagttacggatcctaatgagttattaagcaatatatcgaacggatgaacgaaggttgttttaagttggtcacatactttgtaatctagacatagatgcggaagaacggtagaaactatacgaaataaatattcagagtcctctaattgatcaagagtaactattgacttaataggcatcatttatttagtattaaatgacgaccgtaccagtgacggatatacaaaacgatttaattacagagttttcagaagataattatccatctaacaaaaattatgaaataactcttcgtcaaatgtctattctaactcacgttaacaacgtggtagatagagaacataatgccgccgtagtgtcatctccagaggaaatatcctcacaacttaatgaagatctatttccagatgatgattcaccggccactattatcgaacgagtacaacctcatactactattattgacgatactccacctcctacgtttcgtagagagttattaatatcggaacaacgtcaacaacgagaaaaaagatttaatattacagtatcgaaaaatgctgaagcaataatggaatctagatctatgataacttctatgccaacacaaacaccatccttgggagtagtttatgataaagataaaagaattcagatgttagaggatgaagtggttaatcttagaaatcaacgatctaatacaaaatcatctgataatttagataattttaccaaaatactatttggtaagactccgtacaaatcaacagaagttaataagcgtatagccatcgttaattatgcaaatttgaacgggtcccccttatcagtcgaggacttggatgtttgttcggaggatgaaatagatagaatctataaaacgattaaacaatatcacgaaagtagaaaacgaaaaattatcgtcactaacgtgattattattgtcataaacattatcgagcaggcattgctaaaactcggatttgaagaaatcaaaggactgagtaccgatatcacttcagaaattatcgatgtggagatcggagatgactgcgatgctgtagcatctaaactaggaatcggtaacagtccggttcttaatattgtattgtttatactcaagatattcgttaaacgaattaaaattatttaatttaatacattcccatatccagacaacaatcgtctggattaatctgttcctgtcgtctcataccggacgacatattaatctttttattagtgggcatctttttagatggtttctttttcccagcattaactgagtcgatacctagaagatcgtgattgatctctccgaccattccacgaacttctaattggccgtctctgacggtaccataaactattttaccagcattagtaacagcttggacaatctgaccatccatcgcattgtacgatgtagtagtaactgttgttctacgtctaggagcaccagaagtatttttggagcccttggatgttgatgtagaagaagacgaggattttgattttggtttacatgtaatacattttgaactctttgattttgtatcacatgcgccggcagtcacatctgtttgagaattaagattattgttgcctcctttgacggctgcatctccaccgatttgcgctagtagatttttaagctgtggtgtaatcttattaactgtttcgatataatcatcgtaactgcttctaacggctaaattttttttatccgccatttagaagctaaaaatatttttatttatgcagaagatttaactagattatacaatgaactaatatgatccttttccagattatttacaaacttggtattttttggttctggaggaggcgaatttaaattcggacttggattcggattttgtaagttcttgatcttattatacatcgagtataggatggcgacagtaactgctacacaaataccgatcaaaagaagaataccaatcatttattgacaataacttcactattgatcaagtatgcaatatatcatcttttcactaaataagtagtaataatgattcaacaatgtcgagatatatggacgataataatttagttcatggaaatatcgctatgattggtgtgaatgactccgctaactctgtggggtgcgcagtgctttccccacatagaataaattagcattccgactgtgataataataccaagtataaacgccataatactcaatactttccatgtacgagtgggactggtagacttactaaagtcaataaaggcgaagatacacgaaagaatcaaaagaatgattccagcgattagcacgccggaaaaataatttccaatcataagcatcatgtccatttaactaataaaaattttaaatcgccgaatgaacaaagtggaatataaaccatataaaaacaatagtttgtactgcaaaaataatatctatttttgttttcgaagatatggtaaaattaaatagtagtacacagcatgttataactaacagcagcaacggctcgtaattacttatcatttactagacgaaaaggtggtgggatattttcttgctcaaataatacgaatatatcacccatccattttatgcgatgtttatatactctaatctttaatagatctatagacgacgggtttaccaacaatatagattttatcgattcatctaatttaaacccttccttaaacgtgaatgatctattatctggcataacgatgaccctacctgatgaatcggacaatgtactgggccatgtagaataaattatcaacgaattatcgtctacgaacatttatatcatttgttttaattttaggacgcgaataaatggatataaaatagaaaataacagatattacaaccagtgttatggccgcgcccaaccaggtaggcagttttattttatcttttactacaggttctcctggatgtacgtcaccaacggcggacgtagttctagtacaattagacgtaagttccgcttgggaattttttaacgctaaagagttaacgttaatcgtgcacccaacgtatttacatctagttcgttgaacatcttgattataatataaccattttctatctctagattcgtcagtgcactcatgtaaccaacataccctaggtcctaaatatttatctccggaattagattttggataattcgcgcaccaacaatttctatttcctttatgatcgttacaaaagacgtataatgccgtatccccaaaagtaaaataatcaggacgaataattctaataaactcagaacaatatctcgcatccatatgtttggagcaaatatcggaataagtagacatagccggtttccgttttgcacgtaaccattctaaacaattggggtttccaggatcgtttctacaaaatccagtcatgaaatcgtcacaatgttctgtcttgtaattattattaaatatttttggacagtgtttggtatttgtcttagaacaacattttgccacgctatcactatcgcccaggagataatccttttttataaaatgacatcgttgcccggatgctatataatcagtagcgtgttttaaatccttaatatattcaggagttacctcgttctgataatagattaatgatccaggacgaaatttgaaagaactacatggttctccatgaattaatacatattgtttagcaaattcaggaactataaaactactacaatgatctatcgacataccatctatcaaacaaaacttgggtttaatttctcccggagatgtttcataatagtacgtataactttcttctgcaaacttaacagctctattatattcaggataattaaaacctaattccatatatttgtctcgtatatctgctattcctggtgctattttgattctattaagagtaacagctgcccccattcttaataatcgtcagtatttaaactgttaaatgttggtatatcaacatctaccttatttcccgcagtataaggtttgttgcaggtatactgttcaggaatggttacatttatacttcttctatagtcctgtctttcgatgttcatcacatatgcaaagaacagaataaacaaaataatgtaagaaataatattaaatatctgtgaattcgtaaatacattgattgccataataattacagcagctacaatacacacaatagacattcccacagtgttgccattacctccacgatacatttgagttactaagcaataggtaataactaagctagtaagaggcaatagaaaagatgagataaatatcatcaatatagagattagaggagggctatatagagccaagacgaacaaaatcaaaccgagtaacgttctaacatcattatttttgaagattcccaaataatcattcattcctccataatcgttttgcatcatacctccatctttaggcataaacgattgctgctgttcctctgtaaataaatctttatcaagcactccagcacccgcagagaagtcgtcaagcatattgtaatatcttaaataactcatttatatattaaaaaatgtcactattaaagatggagtataatctttatgccgaactaaaaaaaatgacttgtggtcaacccctaagtctttttaacgaagacggggatttcgtagaagttgaaccgggatcatcctttaagtttctgatacctaagggattttacgcctctccttccgtaaagacgagtctagtattcgagacattaacaacgaccgataataaaatcactagtatcaatccaacaaatgcgccaaagttatatcctcttcaacgcaaagtcgtatctgaagtagtttctaatatgaggaaaatgatcgaatcaaaacgtcctctatacatcactcttcacttggcgtgtggatttggtaagactattaccacgtgttatcttatggctacacacggtagaaaaaccgtcatttgcgtacccaataaaatgttaatacatcaatggaagacacaggtagaggcagtcggattggaacataagatatccatagatggagtaagtagtctattaaaggaactaaagactcaaagtccggatgtattaatagtagtcagtagacatctgacaaacgatgccttttgtaaatatatcaataagcattatgatttgttcatcttggatgaatcacatacgtataatctgatgaacaatacagcagttacaagatttttagcgtattatcctccgatgatgtgttattttttaactgctacacctagaccatctaaccgaatttattgtaacagtattattaatattgccaagttatccaatctaaaaaaaactatctatgcagtagatagtttttttgagccatattccacagataatattagacatatggtaaaacgactagatggaccatctaataaatatcatatatataccgagaagttattatctgtagacgagcctagaaatcaacttattcttgataccctggtagaagaattcaagtcaggaactattaatcgcattttagttattactaaactacgtgaacatatggtattattctacaaacgattattagattttttcggaccagaggttgtatttataggagacgcccaaaatagacgtactccagatatggtcaaatcaatcaaggaactaaatagatttatattcgtatccaccttattttattccggtactggtttagatattcctagtttggattcgttgttcatttgctcggcagtaatcaacaatatgcaaatagagcaattactagggagggtatgtcgagaaacagaactattagataggacggtatatgtatttcctaacacatccatcaaagaaataaagtacatgataggaaatttcatgcaacgaattattagtctgtctgtagataaactaggatttaaacaaaaaagttatcggaaacatcaagaatccgatcccacttctgcatgtacaacatcatccagagaagaacgtgtattaaatagaatatttaactcgcaaaatcgttaagaagtttaagcgacgatccgcatgctgcgcaggccagtgtattacccctcatagtattaatataatccaatgatacttttgtgatgtcggaaatcttaaccaatttagactgacaggcagaacacgtcatgcaatcatcatcgtcatcgataactgtagtcttgggcttctttttgcgactcttcattccggaacgcacattggtgctatccatttaggtagtaaaaaataagtcagaatatgccctataacacgatcgtgcaaaacctggtatatcgtctctatctttatcacaatatagtgtatcgacatttttattattattgacctcgtttatcttggaacatggaatgggaacatttttgttatcaacggccatctttgccttaattccagatgttgtaaaattataactaaacagtctatcatcgacacaaatgaaattcttgtttagacgtttgtagtttacgtatgcggctcgttcgcgtctcattttttcagatattgcaggtactataatattaaaaataagaatgaaataacataggattaaaaataaagttatcatgacttctagcgctgatttaactaacttaaaagaattacttagtctgtacaaaagtttgagattttcagattctgcggctatagaaaagtataattctttggtagaatggggaacatctacttactggaaaataggcgtgcaaaaggtagctaatgtcgagacgtcaatatctgattattatgatgaggtaaaaaataaaccgtttaatattgatccgggctattacattttcttaccggtatattttgggagcgtctttatttattcgaagggtaaaaatatggtagaacttggatctggaaactcttttcaaataccagatgatatgcgaagtgcgtgtaacaaagtattagacagcgataacggaatagactttctgagatttgttttgttaaacaatagatggataatggaagatgctatatcaaaatatcagtctccagttaatatatttaaactagctagtgagtacggattaaacatacccaaatatttagaaattgaaatagaggaagacacattatttgacgacgagttatactctattatagaacgctctttcgatgataaatttccaaaaatatccatatcgtatattaagttgggagaacttagacggcaagttgtagactttttcaaattctcattcatgtatattgagtccatcaaggtagatcgtataggagataatatttttattcctagcgttataacaaaatcaggaaaaaagatattagtaaaagatgtagaccatttaatacgatccaaggttagagaacatacatttgtaaaagtaaaaaagaaaaacacattttccattttatacgactatgatggaaacggaacagaaactagaggagaagtaataaaacgaattatagacactataggacgagactattatgttaacggaaagtatttctctaaggttggtagtgcaggcttaaagcaattgactaataaattagatattaatgagtgcgcaactgtcgatgagttagttgatgagattaataaatccggaactgtaaaacgaaaaataaaaaaccaatcagcatttgatttaagcagagaatgtttgggatatccagaagcggattttataacgttagttaataacatgcggttcaaaatagaaaattgtaaggttgtaaatttcaatattgaaaatactaattgtttaaataacccgagtattgaaactatatatggaaactttaaccagttcgtctcaatctttaatgtcgtcaccgatgtcaaaaaaagattattcgagtgaaataatatgcgcctttgatataggtgcaaaaaatcctgccagaactgttttagaagtcaaggataactccgttagggtattggatatatcaaaattagactggagttctgattgggaaaggcgcatagctaaagatttgtcacaatatgaatacactacagttcttctagaacgtcagcctagaaggtcgccgtatgttaaatttatctattttattaaaggctttttatatcatacatcggctgccaaagttatttgcgtctcgcctgtcatgtctggtaattcatatagagatcgaaaaaagagatcggtcgaagcatttcttgattggatggacacattcggattgcgagactccgttccggatagacgcaaattagacgatgtagcggatagtttcaatttggctatgagatacgtattagataaatggaatactaattatacaccttataataggtgtaaatctagaaattacataaaaaaaatgtaataacgttagtaacgccattatggataatctatttacctttctacatgaaatagaagatagatatgccagaactatttttaactttcatctaataagttgcgatgaaataggagatatatatggtcttatgaaagaacgcatttcctcagaggatatgtttgataatatagtgtataataaagatatacatcctgccattaagaaactagtgtattgcgacatccaacttactaaacacattattaatcagaatacgtatccggtatttaacgattcttcacaagtgaaatgttgtcattatttcgacataaactcagataatagcaatattagctctcgtacagtagagatatttgagagggaaaagtcatctcttgtatcatatattaaaactaccaataagaagagaaaggtcaattacggcgaaataaagaaaactgttcatggaggcactaatgcaaattacttttccggtaaaaagtctgacgagtatctgagtactacagttagatccaacattaatcaaccttggatcaaaaccatctctaagaggatgagagttgatatcattaatcactctatagtaacgcgtggaaaaagctctatattacaaactatagaaattatttttactaatagaacatgtgtgaaaatattcaaggattctactatgcacattattctatccaaggacaaggatgaaaaggggtgtatacacatgattgacaaattattctatgtctattataatttatttctgttgttcgaagatatcatccaaaacgagtactttaaagaagtagctaatgttgtaaaccacgtactcacggctacggcattagatgagaaattattcctaattaagaaaatggctgaacacgatgtttatggagttagcaatttcaaaatagggatgtttaacctgacatttattaagtcgttggatcataccgttttcccctctctgttagatgaggatagcaaaataaagttttttaaggggaaaaagctcaatattgtagcattacgatctctggaggattgtataaattacgtgactaaatccgagaatatgatagaaatgatgaaggaaagatcgactattttaaatagcatagatatagaaacggaatcggtagatcgtctaaaagaattgcttctaaaatgaaaaaaaacactaattcagaaatggatcaacgactagggtataagtttttggtgcctgatcctaaagccggagttttttatagaccgttacatttccaatatgtatcgtattctaattttatattgcatcgattgcatgaaatcttgaccgtcaagcggccactcttatcgtttaagaataatacagaacgaattatgatagaaattagcaatgttaaagtgactcctccagattactcacctataatcgcgagtattaaaggtaagagttatgacgcattagccacgttcactgtaaatatctttaaagaggtaatgaccaaagagggtatatccatcactaaaataagtagttatgagggaaaagattctcatttgataaaaattccgctactaataggatacgggaataaaaatccacttgatacagccaagtatcttgttcctaatgtcataggtggagtctttatcaataaacaatctgtcgaaaaagtaggaattaatctagtagaaaagattacaacatggccaaaatttagggttgttaagccaaactcattcactttctcgttttcctccgtatcccctcctaatgtattaccgacaagatatcgccattacaagatatctctggatatatcacaattggaagcgttgaatatatcatcgacaaagacatttataacggtcaatattgttttgctgtctcaatatttatctagagtgagtctagaattcattagacgtagtttatcatacgatatgcctccagaagttgtctatctagtaaacgcgataatagatagtgctaaacgaattactgaatctattactgactttaatattgatacatacattaatgacctggtggaagctgaacacattaaacaaaaatctcagttaacgatcaacgagttcaaatatgaaatgctgcataactttttacctcatatgaactatacacccgatcaactaaagggattttatatgatatctttactaagaaagtttctctactgtatcttccacacttctagatatccagatagagattcgatggtttgtcatcgcatcctaacgtacggcaaatattttgagacgttggcacatgatgaattagagaattacataggcaacatccgaaacgatatcatgaacaatcacaagaacagaggcacttacgcggtaaacattcatgtactaacaactcccggacttaatcacgcgttttctagcttattgagtggaaagttcaaaaagtcagacggtagttatcgaacacatcctcactattcatggatgcagaatatttctattcctaggagtgttggattttatccggatcaagtaaagatttcaaagatgttttctgtcagaaaataccatccaagtcaatatctttacttttgttcatcagacgttccggaaagaggtcctcaggtaggtttagtatctcaattgtctgtcttgagttccattacaaatatactaacgtctgagtatttggatttggaaaagaaaatttgtgagtatatcagatcatattataaagatgatataagttactttgaaacaggatttccaatcactatagaaaatgctctagtcgcatctcttaatccaaatatgatatgtgattttgtaactgactttagacgtagaaaacggatgggattcttcggtaacttggaggtaggtattactttagttagggatcacatgaatgaaattcgcattaatattggagcgggaagattagtcagaccattcttggttgtggataacggagagctcatgatggatgtgtgtccggagttagaaagcagattagacgacatgacattctctgacattcagaaagagtttccgcatgtcatcgaaatggtagatatagaacaatttacttttagtaacgtatgtgaatcggttcaaaaatttagaatgatgtcaaaggatgaaagaaagcaatacgatttatgtgactttcctgccgaatttagagatggatatgtagcatcttcattagtgggaatcaatcacaattctggacccagagctattcttggatgtgctcaagctaaacaagctatctcttgtctgagctcggatatacgaaataaaatagacaatggaattcatttgatgtatccagagaggccaatcgtgattagtaaggctttagaaacttcaaagattgcggctaattgcttcggccaacatgttactatagcattaatgtcgtacaaaggtatcaatcaagaggatggaattatcatcaaaaaacaatttattcagagaggcggtctcgatattgttacagccaagaaacatcaagtagaaattccattggaaaactttaataacaaagaaagagataggtctaacgcctattcaaaattagaaagtaatggattagttagactgaatgctttcttggaatccggagacgctatggcacgaaatatctcatcaagaactcttgaagatgattttgctagagataatcagattagcttcgatgtttccgagaaatataccgatatgtacaaatctcgcgttgaacgagtacaagtagaacttactgacaaagttaaggtacgagtattaaccatgaaagaaagaagacccattctaggagacaaatttaccactagaacgagtcaaaagggaacagtcgcgtatgtcgcggatgaaacggaacttccatacgacgaaaatggtatcacaccagatgtcattattaattctacatccatcttctctagaaaaactatatctatgttgatagaagttattttaacagccgcatattctgctaagccgtacaacaataagggagaaaaccgacctgtctgttttcctagtagtaacgaaacatccatcgatacatatatgcaattcgctaaacaatgttatgagcattcaaatccgaaattgtccgatgaagaattatcggataaaatcttttgtgaaaagattctctatgatcctgaaacggataagccttatgcatccaaagtattttttggaccaatttattacttgcgtctgaggcatttaactcaggacaaggcaaccgttagatgtagaggtaaaaagacgaagctcattagacaggcgaatgagggacgaaaacgtggaggaggtatcaagttcggagaaatggagagagactgtttaatagcgcatggtgcagccaatactattacagaagttttgaaagattcggaagaagattatcaagatgtgtatgtttgtgaaaattgtggagacatagcagcacaaatcaagggtattaatacatgtcttagatgttcaaaacttaatctctctcctctcttaacaaaaattgataccacgcacgtatctaaagtatttcttactcaaatgaacgccagaggcgtaaaagtcaaattagatttcgaacgaaggcctccttcgttttataaaccattagataaagttgatctcaagccgtcttttctggtgtaatattctagtttggtagtagatacatatcaatatcatcaaattcgagatccgaattataaaatgggcgtggattgttaactatagaatcggacgtctgatattcgaaaatctgtggagtttcaggttttggtggaggtgtaactgctacttgggatactgaagtctgatattcagaaagctgtggatgttctggttcggcatccaccgatggtgtcacatcactaatcggttcggtaacgtctgtggatggaggtgctacttctacagaacctgtagcctcagttgtcaacggagatacatttttaatgcgagaaaatgtataatttggtaatggtttcttatgtggatctgaagaagaggtaagatatctactagaaagataccgatcacgttctagttctcttttgtagaacttaactttttctttctccgcatctagttgatattccaacctcttcacgttactacgttcagattccaattcacgttcgcatgggttacctccgcagtttttacgagcgatttcacgttcagccttcatgcgtctctccctctctctatcgagtttatcagagcagtctttctgaaggcgatcgaactccataaatttctccaacgctttgattgtttccatagatttccgaagttcagcttttaggactgtgattctttttctttcgaattcacagctggatgtacaaccgtttccattaccgccatctctaagtttcttttctagatcggcaacatttcatccccatgccttttacattcctcgagtctactgtcgtcgaaatatcgttccagctccttttcgacatcaataactttagcacgttgtctctcaagctctcttttgtagttatctgattccctggcacgtttaagatcttcatgcaattgagtcagctcttaacttcctctcttgcttcttcgtcatagtacgcgcaatcactgtgagatccattgttaccacgtctacactcggcgagctcgcgtttaagagattcaatttcccgtttgtattggtccatgtttccattgctaccaccattagatttacaggctgctagttgtcgttcgagatcagaaatacgggttttcttggaattgatttcgtcgatgtacttggcatcgaaacacttattaagttctttttccaattctacgattttatttctttcgcgagtcaattccctcctgtagtaactatctgttttgtcagattcacgctctctacgtagactttcttgcaagttactaatttgttccctagcacgtccgagtttagttttatatgctgaatagagttctgattcatcctttgagcagatctctagcgatcgtttaagattcctaattctagtctttagcctatttacctcctcagaagatgttccgttaccgttgcgtttacactcgttaagctgtctatcaagatccatgattctatctctaagacgttgcatctctctttccatatcagcattgctttcattattacgtctgcagtcactcaactgtctttcaatatctgagattctatctctaagacgtcgcatctctctctgtttcggcattggtttcattattacgtttacagtcgttcaactgtctttcaagatctgatattctagattggagtctgctaatctctgtagcattttcacggcattcactcagttgtctttcaagatctgaaattttagattggagtctgctaatctctgtaagatttcctcctccgctctcgatgcagtcggtcaacttattctctagttctctaatacgcgaacgcagtgcatcaacttcttgcgtgtcttcctggttgcgtgtacattcatcgagatctctaacgcgtcgtcgttcttcctcaagttctctgcgtactacagaaagcgtgtccctatcttgttgatatttagcaatttctgattctagagtactgattttgcttacgtagttactaatagttgtcttggccttatcaagatcctccttgtatttgtcgcattccttgatatccctacgaagtctggacagttcccattcgacattacgacgtttatcgatttcagctcggagatcgtcatcgcgttgttttagccacatacgactgagttcaagttctcgttgacaagatccatctacttttccattcctaatagtatccagttccttttctagttctgaacgcatttctcgttccctatcaagcgattctctcaattctcggatagtcttcttatcaatttctaataaatctgaaccatcatctgtcccattttgaatatccctgtgttctttgatctcttttgtaagtcggtcgattctttcggttttataaacagaatccctttccaaagtcctaatcttactgagtttatcactaagttctgcattcaattcggtgagttttctcttggcttcttccaactctgttttaaactctccactatttccgcattcttcctcgcatttatctaaccattcaattagtttattaataactagttggtaatcagcgattcctatagccgttcttgtaattgtgggaacataattaggatcttctaatggattgtatggcttgatagcatcatctttatcattattagggggatggacaaccttaattggttggtcctcatctcctccagtagcgtgtggttcttcaataccagtgttagtaataggcttaggcaaatgcttgtcgtacgcgggcacttcctcatccatcaagtatttataatcgggttctacttcagaatattcttttctaagagacgcgacttcgggagttagtagaagaactctgtttctgtatctatcaacgctggaatcaatactcaagttaaggatagcgaatacctcatcgtcatcatccgtatcttctgaaacaccatcatatgacatttcatgaagtctaacgtattgataaatagaatcagatttagtattaaacagatccttaacctttttagtaaacgcatatgtatattttagatctccagatttcataatatgatcacatgccttaaatgtcagtgcttccatgatataatctggaacactaatgggtgacgaaaaagatacagcaccatatgctacgttgataaataaatctgaaccactaagtagataatgattaatgttaagaaagaggaaatattcagtgtataggtatgtcttggcgtcatatcttgtactaaacacgctaaacagtttgttaatgtgatcaatttccaatagattaattagagcagcgggaataccaacaaacatattaccacatccgtattttctatgaatatcacatatcatgttaaaaaatcttgatagaagagcgaatatctcgtctgacttaatgagtcgtagttcagcagcaacataagtcataactgtaaatagaacatactttcctgtagtgttgattctagactccacatcaacaccattattaaaaatagttttatatacatctttaatctgctctccgttaatcgtcgaacgttctagtatacggaaacactttgatttcttatctgtagttaatgacttagtgatatcacgaagaatattacgaattacatttcttgtttttcttgagagacctgattcagaactcaactcatcgttccatagtttttctacctcagtggcgaaatctttggagtgcttggtacatttttcaataaggttcgtgacctccatttattataaaaaatttattcaaaacttaactacaatcgggtaattataagatcgtagatctcccatgtggcggaatactaccatctatcgcatgtggatggacagtaggtaatggccatgggaacagtaatgtttgcatatttatctttcttgctagtattactgcatattgtcccaatgtttcgatgtgatgttctaacctatcaactgccgctgtatcacaacaatagtgtccgatgaaattaagattatgatccaatgtgtttaatatatgattatcaagtcttatacgatccgcgtcttttttgacaggatcaggttcttctacaggaagaagtttcggcctcttatgatattcatgtctgggaaacggtggtctagggtgaggctccggtatcggagtgggttttggattataatcatcatcgtctatgacatcatcttcgacttcgatatttattttgctatcttgatgatgtcctgtatcagttgcattttcagcactcgactgaatattagcgcattcattgtctattattaccatatttctaaacccaaaatgtatgtgttgaacatcagtactatcgttgatgagtcttatagcatgaattcgcttatcgttatcgggtttatcttctgtcaccttagcaattccttttttattaaactctacataatcatatccatttctattgtttgttctaatataaacgagtatagcatcattgctaaatttttcaatagtatcaaaaacagaatatcctaaaccatataatatatattcaggaacactcaaactaaatgtccaggattctcctaaatacgtaaactttaatagtgcgaaatcattcaaaaatctaccacttatagatagatagtacataaatgcgtatagtagtctacctatctctttattatgaaaaccggcattacgatcatatatgtcgtgatatacctgtgatccgtttacgttaaaccataaatacatgggtgatcctataaacatgaatttatttctaattctcagagctatagttaattgaccgtgtaatatttgcttacatgcatacttgatacgcttattaataagatttttatcattgctcgttatttcagaatcgtatatataaggagtaccatcgtgattcttaccagatattatacaaaatactatatataaaatatattgacccacgttagtaatcatataaatgtttaacgttttaaattttgtattcaatgatccattatcatacgctatcatggtcttgtaatattcattctttaaaatataatattgtgttagccattgcattggagctcctaatggagattttctattctcatccattttaggataggctttcataaagtccctaataacttcgtgaataatgtttctatgttttctactgatgcatgtatttgcttcgatttttttatcccatgtttcatctatcatagatttaaacgcagtaatgctcgcaacattaacatcttgaaccgttggtacaattccgttccataaatttataatgttcgccatttatataactcattttttgaatatacttttaattaacaaaagagttaagttactcatatggacgccgtccagtctgaacatcaatctttttagccagagatatcatagccgctcttagagtttcagcgtgattttccaacctaaatagaacttcatcgttgcgtttacaacacttttctatttgttcaaactttgttgttacattagtaatctttttttccaaattagttagccgttgtttgagagtttcctcattgtcgtcttcatcggctttaacaattgcttcgcgtttagcctctggctttttagcagcctttgtagaaaaaaattcagttgctggaattgcaagatcgtcatctccggggaaaagagttccgtccatttaaagtacagattttagaaactgacactctgcgttatttatatttggtacaacacatggattataaatattgatgttaataacatcagaaaatgtaaagtctatacattgttgcatcgtgttaaattttctaatggatctagtattattgggtccaacttctgcctgaaatccaaatatggaagcggatacaaaaccgtttcctggataaaccacacatctccacttttgctttacatcagaaattgtgtcgttgacatcttgaactctcctatctaatgccggtgttccacctatagattttgaatattcgaatgctgcatgagtagcattaaattccttaatattgccataattttcatatattgagtaaccctggataaaaagtaaacacaccgcagccgtcgctaccacaataaaaaaaattgatagagagttcatttataatctattagaagctgacaaaatttttttacacgcatcagacaatgctttaataaatagttcaacatctacttttgtcatatcgaaccgatggtatgattctaacctagaattacatccgaaaaagttgactatgttcatagtcattaagtcattaacaaacaacattccagactctggattataagacgatactgtttcgtcacaattacctaccttaatcatgtgattatgaatattggctattagagcaccttctaagaaatctataatatctttgaaacacgatttaaaatcaaaccacgaatatacttctacgaagaaagttagtttacccataggagaaataactataaatggagatctaaatacaaaatccggatctatgatagttttaacattattatattctctattaaatacctccacatctaaaaatgttaattttgaaactatgtcttcgtttattaccgtacctgaactaaacgctataagctctattgtttgagaactctttaaacgatattcttgaaatacatgtaacaaagtttcctttaactcggtcggtttatctaccatagttacagaatttgtatccttatctataatataataatcaaaatcgtataaagttatataattatcgcgttcagattgtgatcttttcaaatagactaaaaaccccatttctctagtaagtatcttatgtatatgtttgtaaaatatcttcatggtgggaatatgctctaccgcagttagccattcctcattgacagcggtagatgtattagacaaaactattccaatgtttaacaagggccattttacgagattattaaatccttgtttgataaatgtagccaatgagggttcgagttcaacgacgattgaattctcttcccgcggatgctgcatgatgaacgacgggatgttgttcgattgatttggaattctttttcgactttttgtttatattaaatattttaaaatttatagcggatagcaattcatgtaccacggataatgtagacgcgtattgcgcatcgatatctttattattagataaatttatcaataaatgtgagaagtttgcctcgttaaggtcttccatttaaatattatataaacatttgtgtttgtatcttattcgtcttttatggaatagttttttactagtaaagctgcaattacacactttgtccgtaaaacataaatataaacaccagcttttatcaatcgttccaaaaagtcgacggcggacatttttaacatggcatctattttaaatacacttaggtttttggaaaaaacatcattttataattgtaacgattcaataactaaagaaaagattaagattaaacataagggaatgtcatttgtattttataagccaaagcattctaccgttgttaaatacttgtctggaggaggtatatatcatgatgatttggttgtattggggaaggtaacaattaataatctaaagatgatgctattttacatggatttatcatatcatggagtgacaagtagtggagcaatttacaaattgggatcgtctatcgatagactttctctaaataggactattgttacaaaagttaataattatgatgatacattttttgacgacgatgattgatcgctattgcacaattttgtttttgtactttctaatatagtgtttaggttctttttcatatgagaatattgatttactaaaatatctatgtttaacttttgttctatgacgtccttatcggcggtatcggtacatatacgtaattcaccttcacaaaatacggagtcttcgataataatagccaatcgattattggatctagctgtctgtatcatattcaacatgtttaatatatcctttcgtttcccctttacaggcatcgatcgtagcatattttccgcgtctgatatggaaatgttaaaactacaaaaatgcgtaatgttagcccgtcctaatattggtacgtgtctataagtttggcatagtagaataatagacgtgtttaaatgccttccaaagtttaagaattctattagagtattgcattttgatagtttatcgcctacatcatcaaaaataagtaaaaagtgtgctgattttttatgattttgtgcgacagcaatacatttttctatgttacttttagttcgtatcagattatattctagagattcctgactactaacgaaattaatatgatttggccaaatgtatccatcataatctgggttataaacgggtgtaaacaagaatatatgtttatattttttaactagtgtagaaaacagagatagtaaatagatagtttttccagatccagatcctcctgttaaaaccattctaaacggcatttttaataaattttctcttgaaaattgtttttcttggaaacaattcataattatatttacagttactaaattaatttgataataaatcaaaatatggaaaactaaggttgttagtagggaggagaacaaagaaggcacatcgtgatataaataacatttattatcatgatgacaccagaaaacgacgaagagcagacatctgtgttctccgctactgtttacggagacaaaattcagggaaagaataaacgcaaacgcgtgattggtctatgtattagaatatctatggttatttcactactatctatgattaccatgtccgcgtttctcatagtgcgcctaaatcaatgcatgtctgctaacgaggctgctattactgacgccgctgttgccgttgctgctgcatcatctactcatagaaaggttgcgtctagcactacacaatatgatcacaaagaaagctgtaatggtttatattaccagggttcttgttatatattacattcagactaccagttattctcggatgctaaagcaaattgcactgcggaatcatcaacactacccaataaatccgatgtcttgactacctggctcattgattatgttgaggatacatggggatctgatggtaatccaattacaaaaactacatccgattatcaagattctgatgtatcacaagaagttagaaagtatttttgtgttaaaacaatgaactaatatttatttttgtacattaataaatgaaatcgcttaatagacaaactgtaagtaggtttaagaagttgtcggtgccggccgctataatgatgatactctcaaccattattagtggcataggaacatttctgcattacaaagaagaactgatgcctagtgcttgcgccaatggatggatacaatacgataaacattgttatttagatactaacattaaaatgtctacagataatgcggtttatcagtgtcgtaaattacgagctagattgcctagacctgatactagacatctgagagtattgtttagtattttttataaagattattgggtaagtttaaaaaagaccaatgataaatggttagatattaataatgataaagatatagatattagtaaattaacaaattttaaacaactaaacagtacgacggatgctgaagcgtgttatatatacaagtctggaaaactggttaaaacagtatgtaaaagtactcaatctgtactatgtgttaaaaaattctacaagtgacaacaaaaaatgaattaataataagtcgttaacgtacgccgccatggacgccgcgtttgttattactccaatgggtgtgttgactataacagatacattgtatgatgatctcgatatctcaatcatggactttataggaccatacattataggtaacataaaaactgtccaaatagatgtacgggatataaaatattccgacatgcaaaaatgctactttagctataagggtaaaatagttcctcaggattctaatgatttggctagattcaacatttatagcatttgtgccgcatacagatcaaaaaataccatcatcatagcatgcgactatgatatcatgttagatatagaagataaacatcagccattttatctattcccatctattgatgtttttaacgctacaatcatagaagcgtataacctgtatacagctggagattatcatctaatcatcaatccttcagataatctgaaaatgaaattgtcgtttaattcttcattctgcatatcagacggcaatggatggatcataattgatgggaaatgcaatagtaattttttatcataaaagttgtaaagtaaataataaaacaataaatattgaactagtagtacgtatattgagcaatcagaaatgatgctggtacctcttatcacggtgaccgtagttgcgggaacaatattagtatgttatatattatatatttgtaggaaaaagatacgtactgtctataatgacaataaaattatcatgacaaaattaaaaaagataaagagttctaattccagcaaatctagtaaatcaactgatagcgaatcagactgggaggatcactgtagtgctatggaacaaaacaatgacgtagataatatttctaggaatgagatattggacgatgatagcttcgctggtagtttaatatgggataacgaatccaatgttatggcgcctagcacagaacacatttacgatagtgttgctggaagcacgctgctaataaataatgatcgtaatgaacagactatttatcagaacactacagtagtaattaatgaaacggagactgttgaagtacttaatgaagataccaaacagaatcctaactattcatccaatcctttcgtaaattataataaaaccagtatttgtagcaagtcaaatccgtttattacagaacttaacaataaatttagtgagaataatccgtttagacgagcacatagcgatgattatcttaataagcaagaacaagatcatgaacacgatgatatagaatcatcggtcgtatcattggtgtgattagtttcctttttataaaattgaagtaatatttagtattattgctgccgtcacgttgtacaaatggagatattccctgtattcggcatttctaaaattagcaattttattgctaataatgactgtagatattatatagatacagaacatcaaaaaattatatctgatgagatcaatagacagatggatgaaacggtacttcttaccaacatcttaagcgtagaagttgtaaatgacaatgagatgtaccatcttattcctcatagattatcgacgattatactctgtattagttctgtcggaggatgtgttatctctatagataatgacatcaatggcaaaaatattctaacctttcccattgatcatgctgtaatcatatccccactgagtaaatgtgtcgtagttagcaagggtcctacaaccatattggttgttaaagcggatatacctagcaaacgattggtaacatcgtttacaaacgacatactatatgtaaacaatctgtcactgattaattatttgccgttgtctgtattcattattagacgagtcaccgactatttggatagacacatatgcgatcagatatttgctaataataagtggtattcccttataaccatcgacgataagcaatatcctattccatcaaactgtataggtatgtcctctgccaagtacataaattctagcatcgagcaagatactttaatccatgtttgtaacctcgagcatccgttcgactcagtatacaaaaaaatgcagtcgtacaattctctacctatcaaggaacaaatattgtacggtagaattgataatataaatatgagcattagtatttctgtggattaatagatttctagtatggggatcattaatcatctctaatctctaaatacctcataaaacgaaaaaaaagctattatcaaatactgtacggaatggattcattctcttctctttttatgaaactctgttgtatatctactgataaaactggaagcaaaaaatctgatagaaagaataagaataagatcaaggattatatggaacacgattattataaaataacaatagttcctggttcctcttccacgtctactagctcgtggtattatacacatgcctagtaatagtctctttgcgttgacggaaagcagactagaaataacaggctaaaatgttcagacaccataatagttcccaacccagataataacagagttccatcaacacattcctttaaactcaatcccaaacccaaaaccgttaaaatgtatccggccaattgatagtagataatgaggtgtacagcgcatgataatttacacagtaaccaaaatgaaaatactttagtaattataagaaatatagacggtaatgtcatcatcaacaatccgataatatgcctgagagtaaacattgacggataaaacaaaaatgctccgcataactctatcatggcaataacacaaccaaatacttgtaagattcctaaattagtagaaaatacaacgaatatcgatgtataagtgatctcgagaaataataagaataaagtaatgcccgtaaagataaacatcaacattgtttggtaatcattaaaccaattagtatgaagttgaactaatttcacagtagattttattccagtgttatcctcgcatgtataagtacctggtaagatatctttatattccataatcaatgagacatcactatctgataacgaatgaagtctagcactagtatgccatttacttaatattgtcgtcttggaagttttattataagttaaaatatcatggttatccaatttccatctaatatactttgtcggattatctatagtacacggaataatgatggtatcattacatgctgtatactctatggtctttgtagttgttataacaaccaacgtatagaggtatatcaacgatattctaactcttgacattttttatttatttaaaatgatacctttgttatttattttattctattttgctaacggtattgaatggcataagtttgaaacgagtgaagaaataatttctacttacttattagacgacgtattatacacgggtgttaatggggcggtatacacattttcaaataataaactaaacaaaactggtttaactaataataattatataacaacatctataaaagtagaggatgcggataaggatacattagtatgcggaaccaataacggaaatcccaaatgttggaaaatagacggttcagacgacccaaaacatagaggtagaggatacgctccttatcaaaatagcaaagtaacgataatcagtcacaacggatgtgtactatctgacataaacatatcaaaagaaggaattaaacgatggagaagatttgacggaccatgtggttatgatttattcacggcggataacgtaattccaaaagatggtttacgaggagcattcgtcgataaagacggtacttatgacaaagtttacattcttttcactgatactatcggctcaaagagaattgtcaaaattccgtatatagcacaaatgtgcctaaacgacgaaggtggtccatcatcattgtctagtcatagatggtcgacgtttctcaaagtcgaattagaatgtgatatcgacggaagaagttatagacaaattattcattctagaactataaaaacagataatgatacgatactatatgtattcttcgatagtccttattccaagtccgcattatgtacctattctatgaataccattaaacaatctttttctacgtcaaaattggaaggatatacaaagcaattgccgtctccagctcctggtatatgtttaccagctggaaaagttgttccacataccacgtttgaagtcatagaacaatataatgtactagatgatattataaagcctttatctaaccaacctatcttcgaaggaccgtctggtgttaaatggttcgatataaaggagaaggaaaatgaacatcgggaatatagaatatacttcataaaagaaaattctatatattcgttcgatacaaaatctaaacaaactcgtagctcgcaagtcgatgcgcgactattttcagtaatggtaactgcgaaaccgttatttatagcagatatagggataggagtaggaatgccacaaatgaaaaaaatacttaaaatgtaatcttaatcgagtacaccacacgacaatgaacaaacataagacagattatgctggttatgcttgctgcgtaatatgcggtctaattgtcggaattatttttacagcgacactattaaaagttgtagaacgtaaattagttcatacaccattaatagataaaacgataaaagatgcatatattagagaagattgtcctactgactggataagctataataataaatgtatccatttatctactgatcgaaaaacctgggaggaaggacgtaatgcatgcaaagctctaaattcaaattcggatctaattaagatagagactccaaacgagttaagttttttaagaagccttagacgaggctattgggtaggagaatccgaaatattaaaccagacaaccccatataattttatagctaagaatgccacgaagaatggaactaaaaaacggaaatatatttgtagcacaacgaatactcccaaactgcattcgtgttacactatataacaattacactacatttttatcataccactacttcggttagatgttttagaaaaaaataaatatcgccgtaccgttcttgtttttataaaaataacaattaacaattatcaaattttttctttaatattttacgtggttgaccattcttggtggtaaaataatctcttagtgttggaatggaatgctgtttaatgtttccacactcatcgtatattttgacgtatgtagtcacatcgtttacgcaatagtcagactgtagttctatcatgcttcctacatcagaaggaggaacagttttaaagtctcttggttttaatctattaccgttagttttcatgaaatcctttgttttatccacttcacattttaaataaatgtccactatacattcttttgttaattttactagatcgtcatgggtcatagaatttataggttccgtagtccatggatccaaactagcaaacttcgcgtatacggtatcgcgattagtgtatacaccaactgtatgaaaattaagaaaacagtttaataaatcaacagaaatatttaatcctccgtttgatacagatgcgccatatttatggatttcggattcacacgttgtttgtctgaggtgttcgtctagtgttgcttctacgtaaacttcgattcccatatattctttattgtcagaatcgcataccgatttatcatcatacactgtttgaaaactaaatggtatacacatcaaaataataaataataacgagtacattctgcaatattgttatcgtaattggaaaaatagtgttcgagtgagttggattatgtgagtattggattgtatattttattttatattttgtaataagaataaaatgctaatgtcaagtttattccaatagatgtcttattaaaaacatatataataaataacaatggctgaatggcataaaattatcgaggatatctcaaaaaataataagttcgaggatgccgccatcgttgattacaagactacaaagaatgttctagctgctattcctaacagaacatttgccaagattaatccgggtgaaattattcctctcatcactaatcgtaatattctaaaacctcttattggtcagaaatattgtattgtatatactaactctctaatggatgagaacacgtatgctatggagttgcttactgggtacgcccctgtatctccgatcgttatagcgagaactcataccgcacttatatttttgatgggtaagccaacaacatccagacgtgacgtgtatagaacgtgtagagatcacgctacccgtgtacgtgcaactggtaattaaaataaaaagtaatattcatatgtagtgtcaattttaaatgatgatgatgaaatggataatatccatattgacgatgtcaataatgccggtattggcatacagttcatcgatttttagatttcattcagaggatgtggaattatgttatgggcatttgtattttgataggatctataatgtagtaaatataaaatataatccgcatattccatatagatataattttattaatcgcacgttaaccgtagatgaactagacgataatgtcttttttacacatggttattttttaaaacacaaatatggttcacttaatcctagtttgattgtctcattatcaggaaacttaaaatataatgatatacaatgctcagtaaatgtatcgtgtctcattaaaaatttggcaacgagtacatctactatattaacatctaaacataagacttattctctacatcggtccacgtgtattactataataggatacgattctattatatggtataaagatataaatgacaagtataatgacatctatgattttactgcaatatgtatgctaatagcgtctacattgatagtgaccatatacgtgtttaaaaaaataaaaatgaactcttaattatgctatgctattagaaatggataaaatcaaaattacggttgattcaaaaattggtaatgttgttaccatatcgtataacttggaaaagataactattgatgtcacacctaaaaagaaaaaagaaaaggatgtattattagcgcaatcagttgctgtcgaagaggcaaaagatgtcaaggtagaagaaaaaaatattatcgatattgaagatgacgatgatatggatgtagaaagcgcgtaatacgatctataaaaataagtatataaatactttttatttactgtactcttactgtgtagtggtgataccctactcgattatttttttaaaaaaaaaatacttattctgattcttctagccatttccgtgttcgtttgaatgccacatcgacgtcaaagataggggagtagttgaaatctagttctgcattgttggtacgcacctcaaatgtagtgttggatatcttcaacgtatagttgttgagtagtgatggttttctaaatagaattctcttcatatcattcttgcacgcgtacatttttagcatccatcttggaatcctagatccttgttctattcccaatggtttcatcaatagaagattaaacatatcgtacgaacacgatggagagtaatcgtagcaaaagtaagcatttcctttaatcttagatcccggatactggatatattttgcagccaacacgtgcatccatgcagcatttcctacatatacccggctatgcaccgcgtcatcatcgactgtacgatacataatgttaccgtgttgcttacattgctcgtaaaagactttcatcaatttgtctccttctccgtaaattccagtgggtcttaggcaacaagtatacaattttgctccattcatgattacggaattattggctttcataaccagttgctcggccatacgtttactttttgcgtatacatgtcctggtgatatatcataaagggtatgctcatggccgatgaatggatcaccgtgtttattgggtcctattgcttccatgctactagtatagatcaaatacttgattcctaggtccacacaagctgccaaaatagtctgtgttccataatagtttactttcatgatttcattatcggtgtattttccaaatacatccactagagcagccgtatgaataatcagatttaccccatctagcgcttctctcaccttatcaaagtcgtttatatcacattgtatatagtttataaccttaactttcgaggttattggttgtggatcttctacaatatctatgactctgatttcttgaacatcatctgcactaattaacagttttactatatacctgcctagaaatccggcaccaccagtaaccgcgtacacggccattgctgccactcataatatcagactacttattctattttactaaataatggctgtttgtataatagaccacgataatatcagaggagttatttactttgaaccagtccatggaaaagataaagttttaggatcagttattggattaaaatccggaacgtatagtttgataattcatcgttacggagatattagtcaaggatgtgattccataggcagtccagaaatatttatcggtaacatctttgtaaacagatatggtgtagcatatgtttatttagatacagatgtaaatatatttacaattattggaaaggcgttatctatttcaaaaaatgatcagagattagcgtgtggagttattggtatttcttacataaatgaaaagataatacattttcttacaattaacgagaatggcgtttgatatatcagttaatgcgtctaaaacaataaatgcattagtttacttttctactcagcaaaataaattagtcatacgtaatgaagttaatgatacacactacactgtcgaatttgatagggacaaagtagttgacacgtttatttcatataatagacataatgacaccatagagataagaggggtgcttccagaggaaactaatattggttgcgcggttagtatgacttacttgtataataagtatagttttaaactgattttagcagaatatataagacacagaaatactatatccggcaatatttattcggcattgatgacactagatgatttggctattaaacagtatggagacattgatctattatttaatgagaaacttaaagtagactccgattcgggactatttgactttgtcaactttgtaaaggatatgatatgttgtgattctagaatagtagtagctctatctagtctagtatctaaacattgggaattgacaaataaaaaatataggtgtatggcattagccgaacatatatctgatagtattccaatatctgagctatctagactacgatacaatctatgtaagtatctacgcggacacactgagagcatagaggataaatttgattattttgaagacgatgattcgtctacatgttctgccgtaaccgacagggaaacggatgtataattttttttatagcgtgaaggatatgataaaaaatataattgttgtatttatcccattccaatcaccttatatgattctgtaacacaataaaggagtcttatagatgtatagaggtcagatactggtttgataaactgtttattccacataagtatgtttgactttatggttagacccgcatactttaacaaatcactgaaaattggagttaggtattgacctctcagaatcagttgccgttctggaacattaaatgtattttttatgatatactccaacgcatttatgtgggcatacaacaagtcattactaatggaatattccaagagttttagttgtctagtatttaacaagagaagagatttcaacagactgtttatgaactcgaatgccgcctcattgtcgcttatattgatgatgtcgaattctcccaatatcatcaccgatgagtagctcatcttgttatcgggatccaagttttctaaagatgtcattaaaccctcgatcatgaatggatttatcatcatcgtttttatgttggacatgagcttagtccgtttgtccacatctatagaagatgatttctgaattatttcatatatctctctctttaactccaggaacttgtcaggatggtctactttaatatgttctcgtctaagagatgaaaatctttggatggttgcacgcgacttttctctaaaggatgacgttgcccaagatcctctcttaaatgaatccatcttatccttggacaagatggacagtctattttccttagatggtttaatatttttgttacccatgatctataaaggtagacctaatcgtctcggatgaccatatatttattttcagttttattatacgcataaattgtaaaaaatatgttaggtttacgaaaatgtctcgtggggcattaatcgtttttgaaggattggacaaatctggaaaaacaacacaatgtatgaacatcatggaatcaataccttcaaacacaataaaataccttaactttcctcagagatccactgtcactggaaagatgatagatgactatctaactcgtaaaaaaacctataatgatcatatagttaatctattattttgtgcaaatagatgggagtttgcatcttttatacaagaacaactagaacagggaattactttaatagttgatagatacgcattttctggagtagcgtatgccgccgctaaaggcgcgtcaatgactctcagtaagagttatgaatctggattgcctaaacccgacttagttatattcttggaatctggtagcaaagaaattaatagaaacgtcggtgaggaaatttatgaagatgttacattccaacaaaaggtattacaagaatataaaaaaatgattgaagaaggagatattcattggcaaattatttcttctgaattcgaggaagatgtaaagaaggagttgattaagaatatagttatagaggctatacacacggttactggaccagtggggcaactgtggatgtaatagtgaaattacattttttataaatagatgttagtacagtgttataaatggatgaagcatattactctggcaacttggaatcagtactcggatacgtgtccgatatgcataccgaactcgcatcaatatctcaattagttattgccaagatagaaactatagataatgatatattaaacaaggacattgtaaattttatcatgtgtagatcaaacttggataatccatttatctctttcctagatactgtatatactattatagatcaagagaactatcagactgagttgattaattcattagacgacaatgaaattatcgattgtatagttaataagtttatgagcttttataaggataacctagaaaatatagtagatgctatcattactctaaaatatataatgaataatccagattttaaaactacgtatgccgaagtactcggttccagaatagccgatatagatattaaacaagtgatacgtaagaatatactacaattgtctaataatatccgcgaacgatatttgtgaaaatattaaaaaaaaatactttttttattaaatgacgtcttttcgtgaatttagaaaattatgctgtgctatatatcacgcatcaggatataaagaaaaatctaaattaattagagactttataacagatagggatgataaatatttgatcattaagctattgcttcccggattagacgatagaatttataacatgaacgataaacaaattataaaattatatagtataatatttaaacaatctcaggaagatatgctacaagatttaggatacggatatataggagacactattaggactttcttcaaagagaacacagaaatccgtccacgagataaaagcattttaactttagaagaagtggatagttttttaactacgttatcatccgtaactaaagaatcgcatcaaataaaattattgactgatgtagcatctgtttgtacatgtaatgatttaaaatgtgtagtcatgcttattgataaagatctaaaaattaaagcgggtcctcggtacgtacttaacgctattagtcctaatgcctatgatgtgtttagaaaatctaataacttgaaagagataatagaaaattcatctaaacaaaatctagactctatatctatttctgttatgactccaattaatcccatgttagcggaatcgtgtgattctgtcaataaggcgtttaaaaaatttccatcaggaatgtttgcggaagtcaaatacgatggtgaaagagtacaagttcataaaaataataacgagtttgccttctttagtagaaacatgaaaccagtactctctcataaagtggattatctcaaagaatacataccgaaagcatttaaaaaagctacgtctatcgtattggattctgaaattgttcttgtagacgaacataatgtaccgctcccgtttggaagtttaggtatacacaaaaagaaagaatataaaaactctaacatgtgtttgttcgtgtttgactgtttgtactttgatggattcgatatgacggacattccattgtacgaacgaagatcttttctcaaagatgttatggttgaaatacccaatagaatagtattctcagagttgacgaatattagtaacgagtctcagttaactgacgtattggatgatgcactaacgagaaaattagaaggattggtcttaaaagatattaatggagtatacgaaccgggaaagagaagatggttaaaaataaagcgagactatttgaacgagggttccatggcagattctgccgatttagtagtactaggtgcctactatggtaaaggagcaaagggtggtatcatggcagtctttctaatgggttgttacgacgatgaatccggtaaatggaagacggttaccaagtgttcaggacacgatgataatacgttaagggagttgcaagaccaattaaagatgattaaaattaacaaggatcccaaaaaaattccagagtggttagtagttaataaaatctatattcccgattttgtagtagaggatccgaaacaatctcagatatgggaaatttcaggagcagagtttacatcttccaagtcccataccgcaaatggaatatccattagatttcctagatttactaggataagagaggataaaacgtggaaagaatctactcatctaaacgatttagtaaacttgactaaatcttaatagttacatacaaactgaaaattaaaataacactatttagttggtggtcgccatggatggtgttattgtatactgtctaaacgcgctagtaaaacatggcgaggaaataaatcatataaaaaatgatttcatgattaaaccatgttgtgaaagagtttgtgaaaaagtcaagaacgttcacattggcggacaatctaaaaacaatacagtgattgcagatttgccatatatggataatgcggtatccgatgtatgcaattcactgtataaaaagaatgtatcaagaatatccagatttgctaatttgataaagatagatgacgatgacaagactcctactggtgtatataattattttaaacctaaagatgccattcctgttatcatatctataggaaaggataaagatgtctgtgaactattaatctcatcagacatatcgtgtgcatgcgtggagttaaattcatatcacgtagccattcttcccatggatgtttccttttttaccaaaggaaatgcatcattgattattctcctgtttgatttctctatcgatgcggcacctctcttaagaagtgtaaccgataataatgttattatatctagacaccagcgtctacatgacgagcttccgagttccaattggttcaagttttacataagtataaagtccgactattgttctatattatatatggttgttgatggatctgtgatgcatgcgatagctgataatagaactcacgcaattattagcaaaaatatattagacaatactacgattaacgatgagtgtagatgctgttattttgaaccacagattaggattcttgatagagatgagatgctcaatggatcatcgtgtgatatgaacagacattgtattatgatgaatttacctgatgtaggcgaatttggatctagtatgttggggaaatatgaacctgacatgattaagattgctctttcggtggctggtaatttaataagaaatcgagactacattcccgggagacgaggatatagctactacgtttacggtatagcctctagataatttttttaagcacgaaataaaaaacataattttaaaccaatctatttcatactattttgtgtgatcaccatggacataaagatagatattagtatttctggtgataaatttacggtgactactaggagggaaaatgaagaaagaaaaaaatatctacctctccaaaaagaaaaaactactgatgttatcaaacctgattatcttgagtacgatgacttgttagatagagatgagatgtttactattctagaggaatattttatgtacagaggtctattaggcctcagaataaaatatggacgactctttaacgaaattaaaaaattcgacaatgatgcggaagaacaattcggtactatagaagaactcaagcagaaacttagattaaattctgaagagggagcagataactttatagattatataaaggtacaaaaacaggatatcgtcaaacttactgtatacgattgcatatctatgataggattgtgtgcatgcgtggtagatgtttggagaaatgagaaactgttttctagatggaaatattgtttacgagcgattaaactgtttattgatgatcacatgcttgataagataaaatctatactgcagaatagactagtatatgtggaaatgtcatagaaagttaaaagttaatgagagcaaaaatatataaggttgtattccatatttgttatttttttctgtaatagttagaaaaatacattcgatggtctatctatcagattattatgtgttataaggtactttttctcataataaactagagtatgagtaagatagtgtttttcaaaacatataaatctaaaattgatggatgagatatacagctattaatttcgaaaatatattttaatctgataactttaaacatggatttttaatggtggtttaacgttttaaaaaaagattttgttattgtagtatatgataatattaaaagatggatataaagaatttgctgactgcatgtactattttttacattactacattggctacggcagatatacctacttcgtcactgccacacgctccggtaaacggggcatgtgacgagggagaatatcttgataagaggcataatcaatgttgtaatcagtgtccacctggagaatttgccaaggttagatgtaatggtaacgataacacaaaatgtgaacgctgcccacctcatacatataccgcaatccccaattactctaatggatgtcatcaatgtagaaaatgcccaacaggatcatttgataaggtaaagtgtaccggaacacagaacagtaaatgttcgtgtcttcctggttggtattgcgctactgattcttcacagactgaagattgtcgagattgtataccaaaaaggagatgtccatgcggatactttggtggaatagatgaacaaggaaatcctatttgtaaatcgtgttgtgttggtgaatattgcgactacctacgtaattatagacttgatccatttcctccatgcaaactatctaaatgtaattaattatgattttgatgataatgttaccatacattatatcgctacttggttagtgtattattcagtatgaagacctattaataattacttatcttttgacgatcttgttataattataatataaaaatacttatggcatagtaactcataattgctgacgcgataaattcgtaataatctgttttgttcaaatttttataaggaatctacaggcataaaaataaaaatataatttataatatactcttacagcgcgccatcatgaataacagcagtgaattgattgctgttattaatggatttagaaatagtggacgattttgtgatattaatatagttattaatgatgaaaggataaacgctcacagactcatcctatctggagcctccgaatatttttccattctgttttccaataattttatcgattctaatgaatacgaagttaatctaagtcatttagattatcaaagtgttaacgatttgatcgattacatttatgggatacctttgagcctaactaacgataacgtgaaatatattctttcaaccgctgattttttacaaattggatctgctattacggagtgtgaaaattacatacttaaaaatctttgttctagaaactgtatcgatttctacatatacgctgataaatataataacaagaaaatagaatcagcgtcgtttaacacaatattacaaaatattttgagactcatcaacgatgaaaactttaaatacttaacagaggaatcaatgataaaaattttaagcgatgatatgttaaatataaaaaatgaggatttcgccccactaattctcattaaatggttagagagtactcaacaaccatgcaccgtcgagttacttaaatgcctcagaatatcattgctttccccacaagttataaaatcactttatagtcatcgactggttagttcaatctacgaatgtataacattcttaaacaatatagcattcttggatgaatcatttcctagataccatagcatcgagttgatatctatcggtataagtaattcgcatgataagatttccataaactgctacaatcataaaaaaaatacatgggaaatgatatcttcacgtagatataggtgtagtttcgcagtggccgtcctggataatattatctatatgatgggtggatatgatcagtccccgtatagaagttcaaaggttatagcgtacaatacatgtacaaattcttggatatatgatataccagagctaaaatatcctcgttctaattgtgggggactggctgatgacgaatacatttattgtataggcggcatacgcgatcaggattcatcgttgacatctagtattgatagatggaagccatcaaaaccatattggcagaagtatgctaaaatgcgcgaaccaaaatgtgatatgggggttgcgatgttaaacggattaatatatgttataggtggaatcgttaaaggtgacacgtgtaccgacgcactagagagtttatcagaagatggatggatgaagcatcaacgtcttccaataaaaatgtccaatatgtcgacgattgttcatgatggcaagatttatatatctggaggttacaacaatagtagtgtagttaatgtaatatcgaatctagtccttagctataattcgatatatgatgaatggaccaaattatcatcattaaacattcctagaattaatcccgctctatggtcagcgcataataaattatatgtaggaggaggaatatctgatgatgttcgaactaatacatctgagacatacgacaaagaaaaagattgttggacattggataatggtcacgtgttaccacgcaattatataatgtataaatgcgaaccgattaaacataaatatccattggaaaaaacacagtacacgaatgattttctaaagtatttggaaagttttataggtagttgatagaacaaaatacataattttgtaaaaataaatcactttttatactaatatgacacgattaccaatacttttgttactaatatcattagtatacgctacaccttttcctcagacatctaaaaaaataggtgatgatgcaactctatcatgtaatcgaaataatacaaatgactacgttgttatgagtgcttggtataaggagcccaattccattattcttttagctgctaaaagcgacgtcttgtattttgataattataccaaggataaaatatcttacgactctccatacgatgatctagttacaactatcacaattaaatcattgactgctagagatgccggtacttatgtatgtgcattctttatgacatcaactacaaatgacactgataaagtagattatgaagaatactccacagagttgattgtaaatacagatagtgaatcgactatagacataatactatctggatctacacattcaccggaaactagttctgagaaacctgattatatagataattctaattgctcgtcggtattcgaaatctaagctcttttttttttttttttttttggcatataaataagtcgaccaccatggtgggtgaggatagcgtgctgatcaccgagaacatgcacatgaaactgtacatggagggcaccgtgaacgaccaccacttcaagtgcacatccgagggcgaaggcaagccctacgagggcacccagaccatgaagatcaaggtggtcgagggcggccctctccccttcgccttcgacatcctggctaccagcttcatgtacggcagcaaaacctttatcaaccacacccagggcatccccgacttctttaagcagtccttccctgagggcttcacatgggagaggatcaccacatacgaagacgggggcgtgctgaccgctacccaggacaccagcctccagaacggctgcctcatctacaacgtcaagatcaacggggtgaacttcccatccaacggccctgtgatgcagaagaaaacactcggctgggaggccagcaccgagatgctgtaccccgctgacagcggcctgagaggccatagccagatggccctgaagctcgtgggcgggggctacctgcactgctccctcaagaccacatacagatccaagaaacccgctaagaacctcaagatgcccggcttctacttcgtggacaggagactggaaagaatcaaggaggccgacaaagagacctacgtcgagcagcacgagatggctgtggccaggtactgcgacctgcctagcaaactggggcacagctgattaattaatttttatcgatctaattcaacaatgtctggagagcttcgcaggatcccgactccggaaccaattactgataaagaagatcatacagttacagacactgtctcatacactacagtaagtacatcatctggaattgtcactactaaatcaaccaccgatgatgcggatctttatgatacgtacaatgataatgatacagtaccaccaactactgtaggcggtagtacaacctctattagcaattataaaaccaaggactttgtagaaatatttggtattaccgcattaattatattgtcggccgtggcaattttctgtattacatattatatatataataaacgttcacgtaaatacaaaacagagaacaaagtctagatttttgacttacataaatgtctgggatagtaaaatctatcatattgagcggaccatctggtttaggaaagacagccatagccaaaagactatgggaatatatttggatttgtggtgtcccataccactagatttcctcgtcctatggaacgagaaggtgttgattaccattacgttaacagagaggccatctggaagggaatagccgccggaaactttctagaacatactgagtttttaggaaatatttacggaacttctaaaacagctgtgaatacagcggctattaataatcgtatttgtgtgatggatctaaacatcgacggtgttagaagtcttaaaaatacgtacctaatgccttactcggtgtatataagacctacctctcttaaaatggttgagaccaagcttcgtcgtagaaacactgaagctaacgatgagattcatcgtcgtgtgatgttggcaaaaactgacatggatgaggcaggtgaagccggtctattcgacactattatcattgaagatgatgtgaatttagcatatagtaagttaattcagatactacaggaccgtattagaatgtattttaacactaattagagacttaagacttaaaacttgataattaataatataactcgtttttatatgtgtctatttcaacgtctaatgtattagttaaatattaaaacttaccacgtaaaacttaaaatttaaaatgatatttcattgacagatagatcacacattatgaactttcaaggacttgtgttaactgacaattgcaaaaatcaatgggtcgttggaccattaataggaaaaggtggattcggtagtatttatactactaatgacaataattatgtagtaaaaatagagcccaaagctaacggatcattatttaccgaacaggcattttatactagagtacttaaaccatccgttatcgaagaatggaaaaaatctcacaatataaagcacgtaggtcttatcacgtgcaaggcatttggtctatacaaatccattaatgtggaatatcgattcttggtaattaatagattaggtgcagatctagatgcggtgatcagagccaataataatagactaccaaaaaggtcggtgatgttgatcggaatcgaaatcttaaataccatacaatttatgcacgagcaaggatattctcacggagatattaaagcgagtaatatagtcttagatcaaatagataagaataaattatatctagtggattacggattggtttctaaattcatgtctaatggcgaacatgttccatttataagaaatccaaataaaatggataacggtactctagaatttacacctatagattcgcataaaggatacgttgtatctagacgtggagatctagaaacacttggatattgtatgattagatggttgggaggtatcttaccatggactaagatatctgaaacaaagaattgtgcattagtaagtgccacaaaacagaaatatgttaacaatactgcgactttgttaatgaccagtttgcaatatgcacctagagaattgctgcaatatattaccatggtaaactctttgacatattttgaggaacccaattacgacaagtttcggcacatattaatgcagggtgtatattattaagtgtggtgtttggtcgataaaaattaaaaaataacttaatttattattgatctcgtgtgtacaaccgaaatcatggcgatgttttacgcacacgctctcggtgggtacgacgagaatcttcatgcctttcctggaatatcatcgactgttgccaatgatgtcaggaaatattctgttgtgtcagtttataataacaagtatgacattgtaaaagacaaatatatgtggtgttacagtcaggtgaacaagagatatattggagcactgctgcctatgtttgagtgcaatgaatatctacaaattggaaatccgatccatgatcaagaaggaaatcaaatctctatcatcacatatcgccacaaaaactactatgctctaagcggaatcgggtacgagagtctagacttgtgtttggaaggagtagggattcatcatcacgtacttgaaacaggaaacgctgtatatggaaaagttcaacatgattattctactatcaaagagaaggccaaagaaatgagtgcacttagtccaggacctatcatcgattaccacgtctggataggagattgtatctgtcaagttactgctgtggacgtacatggaaaggaaattatgaaaatgagattcaaaaagggtgcggtgcttccgatcccaaatctggtaaaagttaaacttggggagaatgatacagaaaatctttcttctactatatcggcggcaccatcgaggtaaccacctctctggaagacagcgtgaatcatgtactcatgaaacgtttggaaactatacgccatatgtggtctgttgtatatgatcattttgatattgtgaatggtaaagaatgctgttatgtgcatacgcattcatctaatcaaaatcctataccgagtactgtaaaaacaaatttgtacatgaagactatgggatcatgcattcaaatggattccatggaagctctagagtatcttagcgaactgaaggaatcaggtggatggagtcccagaccagaaatgcaggaatttgaatatccagatggagtggaagacactgaatcaattgagagattggcagaggagttcttcaatagatcagaacttcaggctggtgaatcagtcaaatttggtaattctattaattgttaaacatacatctgtttcagctaagcaactaagaacacgtatacggcagcagcttccttctatactctcatcttttaccaacacaaagggtggatatttgttcattggagttgataataatacacacaaagtatttggattcacggtgggttacgactacctcagactgatagagaatgatatagaaaagcatatcaaaagacttcgtgttgtgcatttctgtgagaagaaagaggacatcaagtacgcgtgtcgattcatcaaggtatataaacctggggatgagactacctcgacatacgtgtgcgctatcaaagtggaaagatgctgttgtgctgtgtttgcagattggccagaatcatggtatatggatactaatggtatcaagaagtattctccagatgaatgggtgtcacatataaaattttaattaatgtaactatagagaacaaataataaggttgtaatatcatatagacaataactaacaattaattagtaactgttatctcttttttaactaaccaactaactatatacctattaatacatcgtaattatagttcttaacatctattaatcattaattcgcttctttaattttttataaactaacattgttaattgaaaagggataacatgttacagaatataaattatatatggatttttttaaaaaggaaatacttgactggagtatatatttatctcttcattatatagcacgcgtgttttccaatttttccacatcccatataatacaggattataatctcgttcgaacatacgagaaagtggataaaacaatagttgattttttatctaggttgccaaatttattccatattttagaatatggggaaaatattctacatatttattctatggatgatgctaatacgaatattataattttttttctagatagagtattaaatattaataagaacgggtcatttatacacaatctcgggttatcatcatccattaatataaaagaatatgtatatcaattagttaataatgatcatccagataataggataagactaatgcttgaaaatggacgtagaacaagacattttttgtcctatatatcagatacagttaatatctatatatgtattttaataaatcatggattttatatagatgccgaagacagttacggttgtacattattacatagatgtatatatcactataagaaatcagaatcagaatcatacaatgaattaattaagatattgttaaataatggatcagatgtagataaaaaagatacgtacggaaacacaccttttatcctattatgtaaacacgatatcaacaacgtggaattgtttgagatatgtttagagaatgctaatatagactctgtagactttaatagatatacacctcttcattatgtctcatgtcgtaataaatatgattttgtaaagttattaatttctaaaggagcaaatgttaatgcgcgtaataaattcggaactactccattttattgtggaattatacacggtatctcgcttataaaactatatttggaatcagacacagagttagaaatagataatgaacatatagttcgtcatttaataatttttgatgctgttgaatctttagattatctattatccagaggagttattgatattaactatcgtactatatacaacgaaacatctatttacgacgctgtcagttataatgcgtataatacgttggtctatctattaaacaaaaatggtgattttgagacgattactactagtggatgtacatgtatttcggaagcagtcgcaaacaacaacaaaataataatggaagtactattgtctaaacgaccatctttgaaaattatgatacagtctatgatagcaattactaaacataaacagcataatgcagatttattgaaaatgtgtataaaatatactgcgtgtatgaccgattatgatactcttatagatgtacagtcgctacagcaatataaatggtatattttaagatgtttcgatgaaatagatatcatgaagagatgttatataaaaaataaaactgtattccaattagttttttgtatcaaagacattaatactttaatgagatacggtaaacatccttctttcgtgaaatgcactagtctcgacgtatacggaagtcgtgtacgtaatatcatagcatctattagatatcgtcagagattaattagtctattatccaagaagctggatcctggagataaatggtcgtgttttcctaacgaaataaaatataaaatattggaaaactttaacgataacgaactatccacatatctaaaaatcttataaacattattaaaatataaaatctaagtaggataaaatcacactacatcattgtttccttttagtgctcgacagtgtatactatttttaacgctcataaataaaaatgaaaacgatttccgttgttacgttgttatgcgtactacctgctgttgtttattcaacatgtactgtacccactatgaataacgctaaattaacgtctaccgaaacatcgtttaatgataaccagaaagttacgtttacatgtgatcagggatatcattctttggatccaaatgctgtctgtgaaacagataaatggaaatacgaaaatccatgcaaaaaaatgtgcacagtttctgattatgtctctgaactatataataaaccgctatacgaagtgaattccaccatgacactaagttgcaacggcgaaacaaaatattttcgttgcgaagaaaaaaatggaaatacttcttggaatgatactgttacgtgtcctaatgcggaatgtcaacctcttcaattagaacacggatcgtgtcaaccagttaaagaaaaatactcatttggggaatatatgactatcaactgtgatgttggatatgaggttattggtgcttcgtacataagttgtacagctaattcttggaatgttattccatcatgtcaacaaaaatgtgatatgccgtctctatctaacggattaatttccggatctacattttctatcggtggcgttatacatcttagttgtaaaagtggttttacactaacggggtctccatcatccacatgtatcgacggtaaatggaatcccatactcccaatatgtgtacgaactaacgaaaaatttgatccagtggatgatggtcccgacgatgagacagatttgagcaaactctcgaaagacgttgtacaatatgaacaagaaatagaatcgttagaagcaacttatcatataatcatagtggcgttgacaattatgggcgtcatatttttaatctccgttatagtattagtttgttcctgtgacaaaaataatgaccaatataagttccataaattgctaccgtaaatataaatccgttaaaataattaataatttaataacaaacaagtatcaaaagattaaagacttatagctagaatcaattgagatgtcttcttcagtggatgttgatatctacgatgccgttagagcatttttactcaggcactattataacaagagatttattgtgtatggaagaagtaacgccatattacataatatatacaggctatttacaagatgcgccgttataccgttcgatgatatagtacgtactatgccaaatgaatcacgtgttaaacaatgggtgatggatacacttaatggtataatgatgaatgaacgcgatgtttctgtaagcgttggcaccggaatactattcatggaaatgtttttcgattacaataaaaatagtatcaacaatcaactaatgtatgatataattaatagcgtatctataattctagctaatgagagatatagaagcgcttttaacgacgatggtatatacatccgtagaaatatgattaacaagttgtacggatacgcatctctaactactattggcacgatcgctggaggtgtttgttattatctgttgatgcatctagttagtttgtataaataattatttcaatatactagttaaaattttaagattttaaatgtataaaaaactaataacgtttttatttgtaataggtgcattagcatcctattcgaataatgagtacactccgtttaataaactgagtgtaaaactctatatagatggagtagataatatagaaaattcatatactgatgataataatgaattggtgttaaattttaaagagtacacaatttctattattacagagtcatgcgacgtcggatttgattccatagatatagatgttataaacgactataaaattattgatatgtataccattgactcgtctactattcaacgcagaggtcacacgtgtagaatatctaccaaattatcatgccattatgataagtacccttatattcacaaatatgatggtgatgagcgacaatattctattactgcagagggaaaatgctataaaggaataaaatatgaaataagtatgatcaacgatgatactctattgagaaaacatactcttaaaattggatctacttatatatttgatcgtcatggacatagtaatacatattattcaaaatatgatttttaaaaatttaaaatatattatcacttcagtgacagtagtcaaataacaaacaacaccatgagatatattataattctcgcagttttgttcattaatagtatacatgctaaaataactagttataagtttgaatccgtcaattttgattccaaaattgaatggactggggatggtctatacaatatatcccttaaaaattatggcatcaagacgtggcaaacaatgtatacaaatgtaccagaaggaacatacgacatatccgcatttccaaagaatgatttcgtatctttctgggttaaatttgaacaaggcgattataaagtggaagagtattgtacgggactatgcgtcgaagtaaaaattggaccaccgactgtaacattgactgaatacgacgaccatatcaatttgtacatcgagcatccgtatgctactagaggtagcaaaaagattcctatttacaaacgcggtgacatgtgtgatatctacttgttgtatacggctaacttcacattcggagattctaaagaaccagtaccatatgatatcgatgactacgattgcacgtctacaggttgcagcatagactttgtcacaacagaaaaagtgtgcgtgacagcacagggagccacagaagggtttctcgaaaaaattactccatggagttcgaaagtatgtctgacacctaaaaagagtgtatatacatgcgcaattagatccaaagaagatgttcccaatttcaaggacaaaatggccagagttatcaagagaaaatttaatacacagtctcaatcttatttaactaaatttctcggtagcacatcaaatgatgttaccacttttcttagcatgcttaacttgactaaatattcataactaatttttattaatgatacaaaaacgaaataaaactgcatattatacactggttaacgcccttataggctctaaccattttcaagatgaggtccctgattatagtccttctgttcccctctatcatctactccatgtctattagacgatgtgagaagactgaagaggaaacatggggattgaaaatagggttgtgtataattgccaaagatttctatcccgaaagaactgattgcagtgttcatctcccaactgcaagtgaaggattgataactgaaggcaatggattcagggatatacgaaacaccgataaattataaaaaaagcaatgtgtccgctgtttccgttaataatactattttcgtaactggcggattattcataaataactctaatagcacgatcgtggttaacaatatggaaaaacttgacatttataaagacaaacaatggtcgattatagaaatgcctatggctagggtatatcacggcattgactcgacatttggaatgttatattttgccggaggtctatccgttaccgaacaatatggtaatttagagaaaaacaacgagatatcttgttacaatcctagaacgaataagtggtttgatatttcatatactatttataagatatccatatcatcattgtgtaaactaaataacgtcttctatgtatttagtaaggacattggatatgtggaaaagtatgatggtgcatggaagttagtacatgatcgtctccccgctataaaggcattatcaacttctccttattgattgaaaatgaaaatataaatagtttttatgtatagcagtattaccctatagttttattgcttactactaacatggatacagatgttacaaatgtagaagatatcataaatgaaatagatagagagaaagaagaaatactaaaaaatgtagaaattgaaaataataaaaacattaacaagaatcatcccaatgaatatattagagaagcactcgttattaataccagtagtaatagtgattccattgataaagaagttatagaatgtatcagtcacgatgtaggaatatagatcatatctactaatttttataatcgatacaaaacataaaaaacaactcgttattacatagcaggcatggaatccttcaagtattgttttgataacgatggcaagaaatggattatcggaaatactttatattctggtaattcaatactctataaggtcagaaaaaatttcactagttcgttctacaattacgtaatgaagatagatcacaaatcacacaagccattgttgtctgaaatacgattctatatatctgtattggatcctttgactatcgacaactggacacgggaacgtggtataaagtatttggctattccagatctgtatggaattggagaaaccgatgattatatgttcttcgttataaagaattcgggaagagtattcgccccaaaggatactgaatcagtcttcgaagcatgcgtcactatgataaacacgttagagtttatacactctcgaggatttacccatggaaaaatagaaccgaggaatatactgattagaaataaacgtctttcactaattgactattctagaactaacaaactatacaagagtggaaactcacatatagattacaacgaggacatgataacttcaggaaatatcaattatatgtgtgtagacaatcatcttggagcaacagtttcaagacgaggagatttagaaatgttgggatattgcatgatagaatggttcggtggcaaacttccatggaaaaacgaaagtagtataaaagtaataaaacaaaaaaaagaatataaaaaatttatagctactttctttgaggactgttttcctgaaggaaatgaacctctggaattagttagatatatagaattagtatacacgttagattattctcaaactcctaattatgacagactacgtaaactgtttatacaagattgaaattatattcttttttttatagagtgtggtagtgttacggatatctaatattaatattagactatctctatcgcgctacacgaccaatatcgattactatggatatcttctatgaaaggagagaatgtatttatttctccagcgtcaatctcgtcagtattgacaatactgtattatggagctaatggatccactgctgaacagctatcaaaatatgtagaaacggaggagaacacggataaggttagcgctcagaatatctcattcaaatccatgaataaagtatatgggcgatattctgccgtgtttaaagattcctttttgagaaaaattggcgataagtttcaaactgttgacttcactgattgtcgcactatagatgcaatcaacaagtgtgtagatatctttactgaggggaaaatcaatccactattggatgaaccattgtctcctagcaattagtgccgtatactttaaagcaaaatggttgacgccattcgaaaaggaatttaccagtgattatcccttttacgtatctccgacggaaatggtagacgtaagtatgatgtctatgtacggcaaggcatttaatcacgcatctgtaaaagaatcattcggcaacttttcaatcatagaactgccatatgttggagatactagtatgatggtcattcttccagacaagattgatggattagaatccatagaacaaaatctaacagatacaaattttaagaaatggtgtgactttatggatgctatgtttatagatgttcacattcccaagtttaaggtaacaggctcgtataatctggtggatactctagtaaagtcaggactgacagaggtgttcggttcaactggagattatagcaatatgtgtaatttagatgtgagtgtcgacgctatgatccacaaaacgtatatagatgtcaatgaagagtatacagaagcagctgcagcaacttctgtactagtggcagactgtgcatcaacaattacaaatgagttctgtgcagatcatccgttcatctatgtgattaggcatgttgatggaaaaattcttttcgttggtagatattgctctccgacaactaattgttaaccattttttttaaaaaaaatagaaaaaacatgtggtattagtgcaggtcgttgttcttccaattgcaattggtaagatgacggccaactttagtacccacgtcttttcaccacagcactgtggatgtgacagactgaccagtattgatgacgtcaaacaatgtttgactgaatatatttattggtcgtcctatgcataccgcaacaggcaatgcgctggacaattgtattccacactcctctcttttagagatgatgcggaattagtgttcatcgacattcgcgagctggtaaaaaatatgccgtgggatgatgtcaaagattgtacagaaatcatccgttgttatataccggatgagcaaaaaaccatcagagagatttcggccatcatcggactttgtgcatatgctgctacttactggggaggtgaagaccatcccactagtaacagtctgaacgcattgtttgtgatgcttgagatgctaaattacgtggattataacatcatattccggcgtatgaattgatgagttgtacatcttgacattttctttcttctcttctccctttcttctcttctcccttcctccctcttctccctttcccagaaacaaacttttttacccactataaaataaaatgagtatactacctattatatttcttcctatatttttttattcttcattcgttcagacttttaacgcgtctgaatgtatcgacaaagggcaatattttgcatcattcatggagttagaaaacgagccagtaatcttaccatgtcctcaaataaatacgctatcatccggatataatatattagatattttatgggaaaaacgaggagcggataatgatagaattataccgatagataatggtagcaatatgctaattctgaacccgacacaatcagactctggtatttatatatgcattaccacgaacgaaacctactgtgacatgatgtcgttaaatttgacaatcgtgtctgtctcagaatcaaatatagatcttatctcgtatccacaaatagtaaatgagagatctactggcgaaatggtatgtcccaatattaatgcatttattgctagtaacgtaaacgcagatattatatggagcggacatcgacgccttagaaataagagacttaaacaacggacacctggaattattaccatagaagatgttagaaaaaatgatgctggttattatacatgtgttttagaatatatatacggtggcaaaacatataacgtaaccagaattgtaaaattagaggtacgggatagaataataccttctactatgcaattaccagatggcattgtaacttcaataggtagtaatttgactattgcatgcagagtatcgttgagacctcccacaacggacaccgacgtcttttggataagtaatggtatgtattacgaagaagatgatggggacggaaacggtagaataagtgtagcaaataaaatctatatgaccgataagagacgtgttattacatcccggttaaacattaatcctgtcaaggaagaagatgctacaacgtttacgtgtatggcgtttactattcctagcatcagcaaaacagttactgttagtataacgtgaatgtatgttgttacatttccatgtcaattgagtttataagaatttttatacattatcttccaacaaacaattgacgaacgtattgctatgattaactcccacgatactatgcatattattaatcattaacttgcagactatacctagtgctattttgacatactcgtgttcttgtgtaattgcggtatctatattattaaagtacgtaaatctagctatagttttattatttaattttagataatataccgtctccttatttttaaaaattgccacatcctttattaaatcatgaatgggaatttctatgtcatcgttagtatattgtgaacaacaagagcagatatctataggaaagggtggaatgcgatacattgatctatgtagttttaaaacacacgcgaactttgaagaatttatataaatcattccatcgatacatccttctatgttgacatgtatatatccaggaattcttttattaatgtcaggaaatgtataaactaaaacattgcccgaaagcggtgcctctatctgcgttatatccgttcttaacttacaaaatgtaaccaatacctttgcatgacttgttttgttcggcaacgttagtttaaacttgacgaatggattaattacaatagcatgatccgcgcatctattaagtttttttactttaacgcccttgtatgtttttacagagactttatctaaatttctagtgcttgtatgtgttataaatataacgggatatagaaccgaatcacctaccttagatacccaattacattttatcagatccagataataaacaaattttgtcgccctaactaattctatattgttatatattttacaattggttatgatatcatgtaataacttggagtctaacgcgcatcgtcgtacgtttatacaattgtgatttagtgtagtatatctacacatgtatttttccgcactatagtattctggactagtgataaaactatcgttatatctgtcttcaatgaactcatcgagatattgctctctgtcatattcatacacctgcataaactttctagacatcttacaatccgtgttattttaggatcatatttacatatttacgggtatatcaaagatgttagattagttaatgggaatcgtctataataatgaatattaaacaattatatgaggacttttaccacaaagcatcataaaaatgagtcgtcgtctgatttatgttttaaatatcaaccgcaaatcaactcataaaatacaagagaatgaaatatatacatattttagtcattgcaatatagaccatacttctacagaacttgattttgtagttaaaaactatgatctaaacagacgacaacctgtaactgggtatactgcactacactgctatttgtataataattactttacaaacgatgtactgaagatattattaaatcatgacgtaaatgtaacgatgaaaaccagtagcggacgtatgcctgtttatatattgcttactagatgttgtaatatttcacatgatgtagtgatagatatgatagacaaagataaaaaccacttattacatagagactattccaacctattactagagtatataaaatctcgttacatgttattgaaggaagaggatatcgatgagaacatagtatccactttattagataagggaatcgatcctaactttaaacaagacggatatacagcgttacattattattatttgtgtctcgcacacgtttataaactaggtgagtgtagaaaaccgataacgataaaaaaggccaagcgaattatttctttgtttatacaacatggagctaatctaaacgcgttagataattgtggtaatacaccattccatttgtatcttagtattgaaatgtgtaataatattcatatgactaaaatgctgttgacttttaatccgaatttcaaaatatgtaataatcatggattaacgcctatactatgttatataacttccgactacatacaacacgatattcttgttatgttaatacatcactatgaaacaaatgttggagaaatgccgatagatgagcgtcgtatgatcgtattcgagtttatcaaaacatattctacacgtccggcagattcgataacttatttgatgaataggtttaaaaatataaatatttatacccgctatgaaggaaagacattattacacgtagcatgtgaatataataatacacaagtaatagattatcttatacgtatcaacggagatataaatgcgttaaccgacaataacaaacacgctacacaactcattatagataacaaagaaaattccccatataccattaattgtttactgtatatacttagatatattgtagataagaatgtgataagatcgttggtggatcaacttccatctctacctatcttcgatataaaatcatttgagaaattcatatcctactgtatacttttagatgacacattttacgataggcacgttaagaatcgcgattctaaaacgtatcgatacgcattttcaaaatacatgtcgtttgataaatacgatggtataataactaaatgtcacgacgaaacaatgttactcaaactgtccactgttctagacactacactatatgcagttttaagatgtcataattcgagaaagttaagaagatacctcaacgagttaaaaaaatataataacgataagtcctttaaaatatattctaatattatgaatgagagataccttaatgtatattataaagatatgtacgtgtcaaaggtatatgataaactatttcctgttttcacagataaaaattgtctactaacattactaccttcagaaattatatacgaaatattatacatgctgacaattaacgatctttataatatatcgtatccacctaccaaagtatagttgtatttttctcatgcgatgtgtgtaaaaaaactgatattatataaatattttagtgccgtataataaagatgacgatgaaaatgatggtacatatatatttcgtatcattattgttattgctattccacagttacgccatagacatcgaaaatgaaatcacagaattcttcaataaaatgagagatactctaccagctaaagactctaaatggttgaatccagcatgtatgttcggaggcacaatgaatgatatagccgctctaggagagccattcagcgcaaagtgtcctcctattgaagacagtcttttatcgcacagatataaagactatgtggttaaatgggagaggctagaaaagaatagacggcgacaggtttctaataaacgtgttaaacatggtgatttatggatagccaactatacatctaaattcagtaaccgtaggtatttgtgcaccgtaactacaaagaatggtgactgtgttcagggtatagttagatctcatattaaaaaacctccttcatgcattccaaaaacatatgaactaggtactcatgataagtatggcatagacttatactgtggaattctttacgcaaaacattataataatataacttggtataaagataataaggaaattaatatcgacgacattaagtattcacaaacgggaaaggaattaattattcataatccagagttagaagatagcggaagatacgactgttacgttcattacgacgacgttagaatcaagaatgatatcgtagtatcaagatgtaaaatacttacggttataccgtcacaagaccacaggtttaaactaatactagatccgaaaatcaacgtaacgataggagaacctgccaatataacatgcactgctgtgtcaacgtcattattgatcgacgatgtactgattgaatgggaaaatccatccggatggcttataggattcgattttgatgtatactctgttttaactagtagaggcggtatcaccgaggcgaccttgtactttgaaaatgttactgaagaatatataggtaatacatataaatgtcgtggacacaactattattttgaaaaaacccttacaactacagtagtattggagtaaatatacaatgcatttttatatacattactgaattattattactgaattattattactgaattattattaattatatcgtatttgtgctatagaatggatgaagatacgcgactatctaggtatttgtatctcaccgatagagaacatataaatgtagactctattaaacagttgtgtaaaatatcagatcctaatgcatgttatagatgtggatgtacggctttacatgagtacttttataattatagatcagtcaacggaaaatacaagtatagatacaacggttactatcaatattattcatctagcgattatgaaaattataatgaatattattatgatagaactggtatgaacagtgagagtgataatatatcaatcaaaacagaatatgaattctatgatgaaacacaagatcaaagtacacaactagtaggttacgacattaaactcaaaaccaatgaggatgattttatggctatgatagatcagtgggtgtccatgattatatagatgaatcaattaataaagtagtatatggaagagagtctcacgtaagatggcgggatatatggcaagaacataatgatggcgtatacagtataggaaaggagtgcatagataatatatacgaagacaaccataccgtagacgaattctacaagatagacagcgtatcagatgtagatgacgcggaacacatatctccgataactaaaaaaccatagaatcagttgatgataatacctacatttctaatcttccgtataccatcaaatacaaaatattcgagcaacaataagtattttttatacctttaaaactgataaataaattttttctagtgatattttggcaagatgagaatcctatttctcatcgctttcatgtatgggtgtgttcactcatatgttaacgcggttgaaaccaaatgtccaaatctagacattgtaacatcttctggagaatttcattgttcaggatgtgtggaacatatgcctgagtttagctatatgtattggttggcaaaggatatgaaatcggacgaggataccaagtttatagaacatctgggtgatggcatcaaagaagatgaaaccgttcgtaccacagatagtggaatcgtcactctacgtaaagtccttcatgtgactgatactaataaatttgataattataggttcacttgtgtcctcgctacgctagatggcatttataaaaagaatgtttgctgaagtagttgtgtgctactatttttatttatgatataatctaatggaattaatttgaattgatatttatccaatactaaagattatattagaatcaaattaatcttttatacgagaaaaaataacgacatacgtcgtcaacaaattaaactttttatttattagttaactagcttatagaacttgctcattgttatgtttctaaaacgggtacggcatataggacaattatccgacgcaccggtttctcttcgtgttctatgccatatattgatgcatgttatgcaaaatatatgagtacacgaatccaataaaccaaagtatctatcgttttgagtaaacaacttcatagcaaattccacattctttttctttacttactctatacacgtcctcgtatttatttagtattttgatgatatccaactcagaaatggttgttgtattattgggtgtatttggagtataggtattattagctatgtaccaatttaccaaccctcttaatattgattgataatcacatcggttatccaattaataactaaattgtagtgtatatatagaccatatatgtttctatttttttgacagttacgtatagtttcagtaagttttgattgttgtattcctgtatctctagataagttagtcatatagtcccttccggcgatacgttttttccaagcccgaaattgattagccaaatgtgtatttatttttgtgatattgatataatatttcggataatgcatactgttagtcttatatcatttggttcatctatgtattgtaatattgttacatgatctatagatgatgtattgattttggcaggatcgaattccatatccgcgactaaacagtgaaaaaaatgtaaatactttttaaattttaaattagtaaaacttttttttattttttatgattccaaaaatactgaatacaaagtcctaaattataaatatggagatcatactaccacaacttattattatgtatacaaggccggtgtaatagatagatatatataattctattacaccggcagacaattaccgaccggtatttgtcgttaccaacataccgtataatatgtaatatacaattccataacccattgacagttgttatacatcaaaattgcaattcttttgattacgatgttataagaatgtagttaattgatgtatgatgttaatgtgtcctctttcctcttataacatcgtaatcaaaaacttttttataatatatacctaataatgtgtcttaatagttctcgtgattcgtcaaacaatcattcttataaaatataataaagcaacgtaaaaacacataaaaataagcgtaactaataagacaatggatatttacgacgataaaggtctacagactattaaactgtttaataatgaatttgattgtataaggaatgacatcagagaattatttaaacatgtaactgattccgatagtatacaacttccgatggaagacaattctgatattatagaaaatatcagaaaaatactatatagacgattaaaaaatgtagaatgtgttgacatcgataacacaataacttttatgaaatacgatccaaatgatgataataagcgtacgtgttctaattgggtacccttaactaataactatatggaatattgtctagtaatatatttggaaacaccgatatgtggaggcaaaataaaattataccaccctacaggaaatataaagtcggataaggatattatgtttgcaaagactctagactttaaatcaacgaaagtgttaactggacgtaaaacaattgccgttctagacatatccgtttcatataatagatcaatgactactattcactacaacgacgacgttgatatagatatacatactgataaaaatggaaaagagttatgttattgttatataacaatagatgatcattacttggttgatgtggaaactataggagttatagtcaatagatctggaaaatgtctgttagtaaataaccatctaggtataggtatcgttaaagataaacgtataagcgatagttttggagatgtatgtatggatacaatatttgacttttctgaagcacgagagttattttcattaactaatgatgataacaggaatatagcatgggacactgataaactagacgatgatacagatatatggactcccgtcacagaagatgattacaaatttctttctagactagtattgtatgcaaaatctcaatcggatactgtatttgactattatgttcttactggtgatacggaaccacccactgtattcattttcaaggtaactagattttactttaatatgccgaaataaaaaatttttgtataatatctagaggtagaggtattgtttagataaatacaaataacatagatacatcgcatacttagcatttttataaatatacataagacatacactttatacatttttgtaaaaatactcataaaaaaatttataaaaattatggcacaaccatatcttgtataggtagtttagttcgtcgagtgaacctataaacagataatagacaacacataataatgcctactaatacaagcataataccgggagatgggatatatgacgttgtagtgtttgggttttctgaacgttgatagtctactaatactacatgctgacatctaatgcctgtataaccatgagagcatctacaatacataccgtcaatatctctagcgtggatacagtcaccgtgtaaacaatatccatctccctctggaccgcataatctgatagctggaatatctgttgtagcgtttgtaatttctggcaatgtcgtttcgatagcgttaccactatcggcgaatgatctgattatcatagcagcgaacaacaacatcagataatttatcaacatttttgatggattctgtgtttatgctgtttctcagtgtgtgtttatgacaagattgggaattttatattattaattcagtaatataaactaataatatattgttaattgtgtaaataatataaaaataacaatacaatattgaatgtgttgctgttaaaaatgtatgtgttaatataatagaataaaataaatgagtatgatcattttagataacgattgattttatcattaccgcttcattcttatattctttgcttacggaacctatatttagaaacatctactaacaattttttatgcttgcattattaatggtatgtaatatgattgattgtgtacgcaataccaatttgttaagtatgaatacggggtacaaacataaattgaaatttaacattatttatttatgatatatatcgttatcgttaggtctataccatggatatctttaaagaactaatcttaaaacaccctgatgaaaatgttttgatttctccagtttccattttatctactttatctattctaaatcatggagcagctggttctacagctgaacaactatcaaaatatatagagaatatgaatgagaatacacccgatgacaataatgatgacatggaggtagatattccgtattgtgcgacactagctaccgcaaataaaatatacggtagcgatagtatcgagttccacgcctccttcctacaaaaaataaaagacgattttcaaactgtaaactttaataatgctaaccaaacaaaggaactaatcaacgaatgggttaagacaatgacaaatggtaaaattaattccttattgactagtccgctatccattaatactcgtatgacagttgttagcgccgtccattttaaagcaatgtggaaatatccattttctaaacatcttacatatacagacaagttttatatttctaagaatatagttaccagcgttgatatgatggtgggtaccgagaataacttgcaatatgtacatattaatgaattattcggaggattctctattatcgatattccatacgagggaaactctagtatggtaattatactaccggacgacatagaaggtatatataacatagaaaaaaatataacagatgaaaaatttaaaaaatggtgtggtatgttatctactaaaagtatagacttgtatatgccaaagtttaaagtggaaatgacagaaccgtataatctggtaccgattttagaaaatttaggacttactaatatattcggatattatgcagattttagcaagatgtgtaatgaaactatcactgtagaaaaatttctacatacgacgtttatagatgttaatgaggagtatacagaagcatcggccgttacaggagtatttacgattaacttttcgatggtatatcgtacgaaggtctacataaaccatccattcatgtacatgattaaagacaccacaggacgtatactttttatagggaaatactgctatccgcaataaatataaacaaatagacttttataaagagtcttcaacgataagtatatcgacatactacttatgctgcgaaagattctgaacgagaacgactatctcaccctcttggatcatatccgcactgctaaatactaaatctccactacactttttatcatcttatgaggaatgattgccttcgtgaaataggaataattagcaccagaatagctatggattattgtggtagagagtgcactattctatgtcgtctactggatgaagatgtgacgtacaaaaaaataaaactagaaattgaaacgtgtcacaacttatcaaaacatatagatagacgaggaaacaatgcgctacattgttacgtctccaataaatgcgatacagacattaagattgttctctcgcggagtcgagagactttgtagaaacaacgaaggattaactccgctaggagtatacagtaagcatagatacgtaaaatctcagattgtgcatctactgatatccagctattcaaattcctctaacgaactcaagtcgaatataaatgatttcgatctgtattcggataatatcgacttacgtctgctaaaatacctaattgtggataaacggatacgtccgtccaagaatacgaattatgcaatcaatggtctcggattggtggatatatacgtaacgacgcctaatccgagaccagaagtattgctatggcttcttaaatcagaatgttacagcaccggttacgtatttcgtacctgtatgtacgacagtgatatgtgtaagaactctcttcattactatatatcgtctcatagagaatctcaatctctatccaaggatgtaattaaatgtttgatcgataacaatgtttccatccatggcagagacgaaggaggatctttacccatccaatactactggtctttctcaaccatagatatagagattgttaaattattattaataaaggatgtggacacgtgtagagtatacgacgtcagccctatattagaggcgtattatctaaacaagcgatttagagtaaccccatataatgtagacatggaaatcgttaatcttcttattgagagacgtcatactcttgtcgacgtaatgcgtagtattacttcgtacgattccagagaatataaccactacatcatcgataacattctaaagagatttagacaacaggatgaatccatcgtacaagccatactgataaactacttacattacggcgatatggtcgttcgatgcatgttagataacggacaacaactatcctctacacgactactttgttaataataatctcgtcgatgtaaacgtcgtaaggtttatcgtggaaaatatggacacgcggctgtaaatcacgtatcgaacaatggccgtctatgtatgtacggtctgatattatcgagatttaataattgcgggtatcactgttatgaaaccatactgatagatgtatttgatatactaagcaagtacatggatgatatagatatgatcgataactctactatattacgcggtcgatgtcaataatatacaatttgcaaagcggttattggaatatggagcgagtatcacgctcgataatcaatacggccatccagaaaagcagttacagaagagaaaacaaaacgaaatcgttgttctacaagatgtctctccctacgacgattactacgtaaaaaagatactagcctactgcctattaagggacgagtcattcgcggaactacatagtaaattctgtttaaacgaggactataaaagtgtatttatgaaaaatatatcattcgataagatagattccatcatcgtgacataagtcgcctcaaagagattcgaatctccgacaccgacctgtatacggtatcacagctatcttaaagccatacattcagacagtcacatttcatttcccatgtacgacgatctcatagaacagtgccatctatcgatggagcgtaaaagtaaactcgtcgacaaagcactcaataaattagagtctaccatcggtcaatctagactatcgtatttgcctccggaaattatgcgcaatatcatctaaacagtatgttgtacggaaagaaccattacaaatattatccatgatagaaagaaaatatctatatgattggagaagtaggaaacaggaacaagacaacgattactacattattaaatcatgaagtccgtattatactcgtatatattgtttctctcatgtataataataaacggaagagatatagcaccgcatgcaccatccgatggaaagtgtaaagacaacgaatacaaacgccataatttgtgtccgggaacatacgcttccagattatgcgatagcaagactaacacacgatgtacgccgtgtggttcgggtaccttcacatctcgcaataatcatttacccgcttgtctaagttgtaacggaagacgcgatcgtgtaacacgactcacaatagaatctgtgaatgctctcccggatattattgtcttctcaaaggatcatccggatgcaaggcatgtgtttcccaaacaaaatgtggaataggatacggagtatccggagacgtcatctgttctccgtgtggtctcggaacatattctcacaccgtctcttccgcagataaatgcgaacccgtacccagaaatacgtttaactatatcgatgtggaaattaacctgtatccagttaacgacacgtcgtgtactcggacgaccactaccggtctcagcgaatccatctcaacgtcggaactaactattactatgaatcataaagactgtaatcccgtatttcgtgatggatacttctccgttcttaataaggtagcgacttcaggtttctttacaggagaaaggtgtgcactctgaatttcgagattaaatgcaataacaaagattcttcctccaaacagttaacgaaagcaaagaatgatactatcatgccgcattcggagacagtaactctagtgggcgacatctatatactatatagtaataccaatactcaagactacgaaactgatacaatctcttatcatgtgggtaatgttctcgatgtcgatagccatatgcccggtagttgcgatatacataaactgatcactaattccaaacccacccactttttatagtaagtttttcacccataaataataaatacaataattaatttctcgtaaaagtagaaaatatattctaatttattgcacggtaaggaagtagaatcataaagaacagtactcaatcaatagcaattatgaaacaatatatcgtcctggcatgcatgtgcctggcggcagctgctatgcctgccagtcttcagcaatcatcctcatcctcctcctcgtgtacggaagaagaaaacaaacatcatatgggaatcgatgttattatcaaagtcacaaagcaagaccaaacaccgaccaatgataagatttgccaatccgtaacggaaattacagagtccgagtcagatccagatcccgaggtggaatcagaagatgattccacatcagtcgaggatgtagatcctcctaccacttattactccatcatcggtggaggtctgagaatgaactttggattcaccaaatgtcctcagattaaatccatctcagaatccgctgatggaaacacagtgaatgctagattgtccagcgtgtccccaggacaaggtaaggactctcccgcgatcactcatgaagaagctcttgctatgatcaaagactgtgaagtgtctatcgacatcagatgtagcgaagaagagaaagacagcgacatcaagacccatccagtactcgggtctaacatctctcataagaaagtgagttacgaagatatcatcggttcaacgatcgtcgatacaaaatgcgtcaagaatctagagtttagcgttcgtatcggagacatgtgcaaggaatcatctgaacttgaggtcaaggatggattcaagtatgtcgacggatcggcatctgaaggtgcaaccgatgatacttcactcatcgattcaacaaaactcaaagcgtgtgtctgaatcgataactctattcatctgaaattggatgagtagggttaatcgaacgattcaggcacaccacgaattaaaaaagtgtaccggacactatattccggtttgcaaaacaaaaatgttcttaactacattcacaaaaagttacctctcgcgacttcttctttttctgtctcaatagtgtgatacgattatgacactattcctattcctattcctatttcctttcagagtatcacaaaaatattaaacctctttctgatggtctcataaaaaaagttttacaaaaatatttttattctctttctctctttgatggtctcataaaaaaagttttacaaaaatatttttattctctttctctctttgatggtctcataaaaaaagttttacaaaaatatttttattctctttctctctttgatggtctcataaaaaaagttttacaaaaatatttttattctctttctctctttgatggtctcataaaaaaagttttacaaaaatatttttattctctttctctctttgatggtctcataaaaaaagttttacaaaaatatttttattctctttctctctttgatggtctcataaaaaaagttttacaaaaatatttttattctctttctctctttgatggtctcataaaaaaagttttacaaaaatatttttattctctttctctctttgatggtctcataaaaaaagttttacaaaaatatttttattctctttctctctttgatggtctcataaaaaaagttttacaaaaatatttttattctctttctctctttgatggtctcataaaaaaagttttacaaaaatatttttattctctttctctctttgatggtctcataaaaaaagttttacaaaaatatttttattctctttctctctttgatggtctcataaaaaagttttacaaaaatatttttattctctttctctctttgatggtctcataaaaaagttttacaaaaatatttttattctctttctctctttgatggtctcataaaaaaagttttacaaaaatatttttattctctttctctctttgatggtctcataa

SEQ ID NO: 8 - DNA, 678 bp, Artificial Sequence
  mRFP
atggcctcctccgaggacgtcatcaaggagttcatgcgcttcaaggtgcgcatggagggctccgtgaacggccacgagttcgagatcgagggagagggcgagggccgcccctacgagggcacccagaccgccaagctgaaggtgaccaagggcggccccctgcccttcgcctgggacatcctgtcccctcagttccagtacggctccaaggcctacgtgaagcaccccgccgacatccccgactacttgaagctgtccttccccgagggcttcaagtgggagcgcgtgatgaacttcgaggacggcggcgtggtgaccgtgacccaggactcctccctgcaggacggcgagttcatctacaaggtgaagctgcgcggcaccaacttcccctccgacggccccgtaatgcagaagaagaccatgggctgggaggcctccaccgagcggatgtaccccgaggacggcgccctgaagggcgagatcaagatgaggctgaagctgaaggacggcggccactacgacgccgaggtcaagaccacctacatggccaagaagcccgtgcagctgcccggcgcctacaagaccgacatcaagctggacatcacctcccacaacgaggactacaccatcgtggaacagtacgagcgcgccgagggccgccactccaccggcgcctaa

SEQ ID NO: 9 - protein, 225 aa, Artificial Sequence
  mRFP
MASSEDVIKEFMRFKVRMEGSVNGHEFEIEGEGEGRPYEGTQTAKLKVTKGGPLPFAWDILSPQFQYGSKAYVKHPADIPDYLKLSFPEGFKWERVMNFEDGGVVTVTQDSSLQDGEFIYKVKLRGTNFPSDGPVMQKKTMGWEASTERMYPEDGALKGEIKMRLKLKDGGHYDAEVKTTYMAKKPVQLPGAYKTDIKLDITSHNEDYTIVEQYERAEGRHSTGA

SEQ ID NO: 10 - DNA, 708 bp, Artificial Sequence
  TurboFP635
atggtgggtgaggatagcgtgctgatcaccgagaacatgcacatgaaactgtacatggagggcaccgtgaacgaccaccacttcaagtgcacatccgagggcgaaggcaagccctacgagggcacccagaccatgaagatcaaggtggtcgagggcggccctctccccttcgccttcgacatcctggctaccagcttcatgtacggcagcaaaacctttatcaaccacacccagggcatccccgacttctttaagcagtccttccctgagggcttcacatgggagaggatcaccacatacgaagacgggggcgtgctgaccgctacccaggacaccagcctccagaacggctgcctcatctacaacgtcaagatcaacggggtgaacttcccatccaacggccctgtgatgcagaagaaaacactcggctgggaggccagcaccgagatgctgtaccccgctgacagcggcctgagaggccatagccagatggccctgaagctcgtgggcgggggctacctgcactgctccctcaagaccacatacagatccaagaaacccgctaagaacctcaagatgcccggcttctacttcgtggacaggagactggaaagaatcaaggaggccgacaaagagacctacgtcgagcagcacgagatggctgtggccaggtactgcgacctgcctagcaaactggggcacagctga

SEQ ID NO: 11 - protein, 235 aa, Artificial Sequence
  TurboFP635
MVGEDSVLITENMHMKLYMEGTVNDHHFKCTSEGEGKPYEGTQTMKIKVVEGGPLPFAFDILATSFMYGSKTFINHTQGIPDFFKQSFPEGFTWERITTYEDGGVLTATQDTSLQNGCLIYNVKINGVNFPSNGPVMQKKTLGWEASTEMLYPADSGLRGHSQMALKLVGGGYLHCSLKTTYRSKKPAKNLKMPGFYFVDRRLERIKEADKETYVEQHEMAVARYCDLPSKLGHS

SEQ ID NO: 12 - protein, 193 aa, Homo sapiens
  MISC_FEATURE: erythropoietin
MGVHECPAWLWLLLSLLSLPLGLPVLGAPPRLICDSRVLERYLLEAKEAENITTGCAEHCSLNENITVPDTKVNFYAWKRMEVGQQAVEVWQGLALLSEAVLRGQALLVNSSQPWEPLQLHVDKAVSGLRSLTTLLRALGAQKEAISPPDAASAAPLRTITADTFRKLFRVYSNFLRGKLKLYTGEACRTGDR

SEQ ID NO: 13 - protein, 272 aa, Artificial Sequence
  anti-VEGF single chain antibody
METDTLLLWVLLLWVPGSTGDEVQLVESGGGLVQPGGSLRLSCAASGFTISDYWIHWVRQAPGKGLEWVAGITPAGGYTYYADSVKGRFTISADTSKNTAYLQMNSLRAEDTAVYYCARFVFFLPYAMDYWGQGTLVTVSSGGGGSGGGGSGGGGSDIQMTQSPSSLSASVGDRVTITCRASQDVSTAVAWYQQKPGKAPKLLIYSASFLYSGVPSRFSGSGSGTDFTLTISSLQPEDFATYYCQQGYGNPFTFGQGTKVEIKRDYKDDDDK

SEQ ID NO: 14 - protein, 121 aa, Homo sapiens
  MISC_FEATURE: plasminogen K5 domain
MYRMQLLSCIALSLALVTNSPVVLLPDVETPSEEDCMFGNGKGYRGKRATTVTGTPCQDWAAQEPHRHSIFTPETNPRAGLEKNYCRNPDGDVGGPWCYTTNPRKLYDYCDVPQCAAPSFD

SEQ ID NO: 15 - protein, 264 aa, Artificial Sequence
  human tissue factor-alpha v beta 3-integrin RGD fusion protein
METPAWPRVPRPETAVARTLLLGWVFAQVAGASGTTNTVAAYNLTWKSTNFKTILEWEPKPVNQVYTVQISTKSGDWKSKCFYTTDTECDLTDEIVKDVKQTYLARVFSYPAGNVESTGSAGEPLYENSPEFTPYLETNLGQPTIQSFEQVGTKVNVTVEDERTLVRRNNTFLSLRDVFGKDLIYTLYYWKSSSSGKKTAKTNTNEFLIDVDKGENYCFSVQAVIPSRTVNRKSTDSPVECMGQEKGEFRGRGDSPDYKDDDDK

SEQ ID NO: 16 - protein, 207 aa, Artificial Sequence
  interleukin-24 protein
MNFQQRLQSLWTLASRPFCPPLLATASQMQMVVLPCLGFTLLLWSQVSGAQGQEFHFGPCQVKGVVPQKLWEAFWAVKDTMQAQDNITSARLLQQEVLQNVSDAESCYLVHTLLEFYLKTVFKNYHNRTVEVRTLKSFSTLANNFVLIVSQLQPSQENEMFSIRDSAHRRFLLFRRAFKQLDVEAALTKALGEVDILLTWMQKFYKL

SEQ ID NO: 17 - protein, 520 aa, Artificial Sequence
  SIL-6R/IL-6 fusion protein
MLAVGCALLAALLAAPGAALAPRRCPAQEVARGVLTSLPGDSVTLTCPGVEPEDNATVHWVLRKPAAGSHPSRWAGMGRRLLLRSVQLHDSGNYSCYRAGRPAGTVHLLVDVPPEEPQLSCFRKSPLSNVVCEWGPRSTPSLTTKAVLLVRKFQNSPAEDFQEPCQYSQESQKFSCQLAVPEGDSSFYIVSMCVASSVGSKFSKTQTFQGCGILQPDPPANITVTAVARNPRWLSVTWQDPHSWNSSFYRLRFELRYRAERSKTFTTWMVKDLQHHCVIHDAWSGLRHVVQLRAQEEFGQGEWSEWSPEAMGTPWTESRSPPARGGGGSGGGGSVEPVPPGEDSKDVAAPHRQPLTSSERIDKQIRYILDGISALRKETCNKSNMCESSKEALAENNLNLPKMAEKDGCFQSGFNEETCLVKIITGLLEFEVYLEYLQNRFESSEEQARAVQMSTKVLIQFLQKKAKNLDAITTPDPTTNASLLTKLQAQNQWLQDMTTHLILRSFKEFLQSSLRALRQM

SEQ ID NO: 18 - DNA, 194711 bp, Vaccinia virus
  misc_feature: Vaccinia virus Western Reserve
atttaaaatataatattaatgtactaaaacttatatattattaatttatctaactaaagttagtaaattatatatataattttataattaatttaattttactaattttatttagtgtctagaaaaaaatgtgtgacccatgactgtaggaaactctagagtgtaagaaagatcgatcgctttatagagaccatcagaaagaggtttaatatttttgtgagaccatcgaagagagaaagagataaaacttttttacgactccatcagaaagaggtttaatatttttgtgagaccatcgaagagagaaagagataaaacttttttacgactccatcagaaagaggtttaatatttttgtgagaccatcgaaggagaaagagataaaacttttttacgactccatcagaaagaggtttaatatttttgtgagaccatcgaaggagaaagagataaaacttttttacgactccatcagaaagaggtttaatatttttgtgagaccatcgaagagagaaagagataaaacttttttacgactccatcagaaagaggtttaatatttttgtgagaccatcgaagagagaaagagataaaacttttttacgactccatcagaaagaggtttaatatttttgtgagaccatcgaaggagaaagagataaaacttttttacgactccatcagaaagaggtttaatatttttgtgagaccatcgaagagagaaagagataaaacttttttacgactccatcagaaagaggtttaatatttttgtgagaccatcgaagagagaaagagataaaacttttttacgactccatcagaaagaggtttaatatttttgtgagaccatcgaagagagaaagagataaaacttttttacgactccatcagaaagaggtttaatatttttgtgagaccatcgaagagagaaagagataaaacttttttacgactccatcagaaagaggtttaatatttttgtgagaccatcgaagagagaaagagataaaacttttttacgactccatcagaaagaggtttaatatttttgtgagaccatcgaagagagaaagagaaagagatagttgatctagatatttttcttagtacaaaagtcaatgttttaaaatatatggacaagaatttgtctgtataaaaacttgtgtgaaattttgtaccaaagaaaaaatgtgagcagtatcccctacatggattttactagatcatttatataccaaaaaatattatacgatctacgttttattatatgattttaacgtgtaaattataaacattattttatgatatacaattgtctggtaacctagatgggcataggggatgttgataagctcgacgagtatatgttgttggacgttattgtttaagaaatagttgatgcatcagaaagagaataaaaaatattttagtgagaccatcgaagagagaaagagataaaacttttttacgactccatcagaaagaggtttaatatttttgtgagaccatcgaagagagaaagagataaaacttttttacgactccatcagaaagaggtttaatatttttgtgagaccatcgaagagagaaagagataaaacttttttacgactccatcagaaagaggtttaatatttttgtgagaccatcgaagagagaaagagataaaacttttttacgactccatcagaaagaggtttaatatttttgtgagaccatcgaagagagaaagagataaaacttttttacgactccatcagaaagaggtttaatatttttgtgagaccatcgaagagagaaagagataaaacttttttacgactccatcagaaagaggtttaatatttttgtgagaccatcgaagagagaaagagataaaacttttttacgactccatcagaaagaggtttaatatttttgtgagaccatcgaagagagaaagagataaaacttttttacgactccatcagaaagaggtttaatatttttgtgagaccatcgaagagagaaagagataaaacttttttacgactccatcagaaagaggtttaatatttttgtgagaccatcgaagagagaaagagataaaacttttttacgactccatcagaaagaggtttaatatttttgtgagaccatcgaagagagaaagagataaaacttttttacgactccatcagaaagaggtttaatatttttgtgagaccatcgaagagagaaagagataaaacttttttacgactccatcagaaagaggtttaatatttttgtgagaccatcgaagagagaaagagataaaacttttttacgactccatcagaaagaggtttaatatttttgtgagaccatcgaagagagaaagagataaaacttttttacgactccatcagaaagaggtttaatatttttgtgagaccatcgaagagagaaagagataaaacttttttacgactccatcagaaagaggtttaatatttttgtgagaccatcgaagagagaaagagataaaacttttttacgactccatcagaaagaggtttaatatttttgtgagaccatcgaagagagaaagagataaaacttttttacgactccatcagaaagaggtttaatatttttgtgagaccatcgaagagagaaagagataaaacttttttacgactccatcagaaagaggtttaatatttttgtgagaccatcgaagagagaaagagaataaaaatattttatgactccattgaagagagaaagagaaaatgagaatgagaataaaaatattttagtgacaccatcagaaagaggtttaatatttttgtgagaccatcgaagagagaaagagaataaaaatattttatgactccattgaagagagaaagagaaaatgagaatgagaataaaaatattttagtgacaccatcagaaagaggtttaatattttttatgagaccatcaaagagagaaagagaataaaaatatttttgtaaaactttttttatgagaccatcaaagagagaaagagaataaaaatatttttgtaaaactttttttatgagaccatcaaagagagaaagagaataaaaatatttttgtaaaactttttttatgagaccatcaaagagagaaagagaataaaaatatttttgtaaaactttttttatgagaccatcaaagagagaaagagaataaaaatatttttgtaaaactttttttatgagaccatcaaagagagaaagagaataaaaatatttttgtaaaactttttttatgagaccatcaaagagagaaagagaataaaaatatttttgtaaaactttttttatgagaccatcaaagagagaaagagaataaaaatatttttgtaaaactttttttatgagaccatcagaaagaggtttaatatttttgtgataccctgaaaggaaataggaataggaataggaatagtgtcataatcgtatcacactattgagacagaaaaagaagaagtcgcgagaggtaactttttgtgaatgtagttaagaacatttttgttttgcaaaccggaatatagtgtccggtacacttttttaattcgtggtgtgcctgaatcgttcgattaaccctactcatccaatttcagatgaatagagttatcgattcagacacacgctttgagttttgttgaatcgatgagtgaagtatcatcggttgcaccttcagatgccgatccgtcgacatacttaaatccatccttgacctcaagttcagatgattccttgcacatgtctccgatacgaacgctaaactctagattcttgacacattttgtatcgacgatcgttgaaccgatgatatcttcgtaactcactttcttatgagagatgttagacccgagtactggatgggtcttgatgtcgctgtctttctcttcttcgctacatctgatgtcgatagacacctcacagtctttgatcatagccagagcttcttcatgagtgatcgcgggagagtccttaccttgtcctggggacacgctggacaatctagcattcactgtgtttccatcagcggattctgagatggatttaatctgaggacatttggtgaatccaaagttcattctcagacctccaccgatgatggagtaataagtggtaggaggatctacatcctcgactgatgtggaatcatcttctgattccacctcgggatctggatctgactcggactctgtaatttccgttacggattggcaaatcttatcattggtcggtgtttggtcttgctttgtgactttgataataacatcgattcccatatgatgtttgttttcttcttccgtacacgaggaggaggatgaggatgattgctgaagactggcaggcacatgcatgccaggacgatatattgtttcatgattgctattgattgagtactgttctttatgattctacttccttaccgtgcaataaattagaatatattttctacttttacgagaaattaattattgtatttattatttatgggtgaaaaacttactataaaaagcgggtgggtttggaattagtgatcagtttatgtatatcgcaactaccgggcatatggctatcgacatcgagaacattacccacatgataagagattgtatcagtttcgtagtcttgagtattggtattactatatagtatatagatgtcgacgctagatagacagtctccgaatgcggcatgataccgtcatcattctttgctttcgttaactgtttggaggaaaaatttttgttattgcatttaatctcgaaattcagagtgcacacctttctcctgtaaagaaacctgaagttgctaccttattaaggacggagaagtattcctcacgaaatacgggattacagtctttatgattcatagtaatagttagttccgacgttgagatggattcgctgagaccggtagtggtcgttaactggatacagattaatttccacatcgatatagttaaaggtattactgggtacgggttcgcatttatctgcggaagagacggtgtgagaatatgttccgagaccacacggagaacagatgacgtctccggatactccgtatcctattccacattttgtttgggaaacacatgccttgcatccggatgatcctttgagaagacaataatatccgggagagcattcacagattctattgtgagtcgtgttacacggtcgcgtcttccgttacaacttagacaagcgggtaaatgattattgcgagatgtgaaggtacccgaaccacacggcgtacattgtgtgttagtcttgctatcgcataatctggaagcgtatgttcccggacacaaattatggcgtttgtattcgttgtctttacactttccatcggatggtgcatgcggtgctatatctcttccgtttattattatacatgagagaaacaatatatacgagtataatacggacttcatgatttaataatgtagtaatcgtcgtcttgttcctgtttcctacttctccaatcatatagatattttctttctatcatggataatatttgtaatggttcttttcgtacaacatactgtttagatgatattgcgcataatttccggaggcaaatacgatagtctagattgaccgatggtagactctaatttattgagtgctttgtcgacgagtttacttttacgctccatcgatagatggcactgttctatgagatcgtcgtacatgggaaatgaaatgtgactgtctgaatgtatggctttaagatagctgtgataccgtatacaggtcggtgtcggagattcgaatctctttaaggcgacttatgtcacgatgatggaatctatcttatcgaatgatatatttttcataaatacacttttatagtcctcgtttaaacagaatttactatgtagttccgcgaatgactcgtcccttaataggcagtaggctattatcttctttacgtagtaatcgtcgtagggagagacatcttgtagaacaacgatttaatcataggtagagatactttcagtctgtggtggatgatgtcattcacaacatccgccttgtatatgatgtttctgttttcaaacaccaagtcgaataccgtctttagtcggaaggttgatgtcgtatccgatgtatgaggcaacattgttgttacaattttgaaaggcggtattatagtattcgtctttctgaatgtcgaacctatctagtagataccgtagtatattgagagtgtatccttgattatgttttatgaatagataaagtagatgttgtccttcttccttttgttcgtgccaattgagtaacattatgagaatatgacctgttgcacaatcgttccatgatgggtgtacaatcaagattattacgtatcctcgtatcggctcctcgagataaaagagcatacaccacacgaggactatgtttggtatactgttgaaggtaagtgtgtaaccgcgttaatgtttgctccataatctattatcgcgtagatgaatcgcttctcggctcgcatcttagtgtgacttaacttgtaataattgcttttgtagaacgtggatatgtgtttacagtagtaatgaagagaagtgagttcatcctcgtcggatcctttgtacagaacgtaatagtttaagctcccattgaatttatatctaagataacacagcaatagatcggatgatttactaaagtcatcaatggtgtccgttagtatatcaaagatcttgttatcgattgatagtggtgtcctttttcatccttgctatcaaagttacgcatgccgtggtgtaacaatatctttaatacagatggattaaatcgtgtattcatcgtatagcaatgtaatggagagttacctcgtttattcagatcgcagtgtttaataactagcttaaacagatgagacgatgtatccacatcaaagaacgtgaaatacatatgacagacattgttgacagaaacgtgaccttcattcttaccgtcgtccataaatacgttaggtatgtaccacatactgtcgcgaacgatgcgtacaatctcgtccatctcataatgatttactttttcataattaaagatgtgaaagaaaaacagaacaatatatttttttagtaatgtttatgcgagacatataaaataaactccgtgtttatgatcatttttaacagcaacacattcaatattgtattgttatttttatattatttacacaattaacaatatattattagtttatattactgaattaataatataaaattcccaatcttgtcataaacacacactgagaaacagcataaacacaaaatccatcaaaaatgtcgatgaaatatctgatgttgttgttcgctgctatgataatcagatcattcgccgatagtggtaacgctatcgaaacgacatcgccagaaattacaaacgctacaacagatattccagctatcagattatgcggtccagagggagatggatattgtttacacggtgactgtatccacgctagagatattgacggtatgtattgtagatgctctcatggttatacaggcattagatgtcagcatgtagtattagtagactatcaacgttcagaaaacccaaacactacaacgtcatatatcccatctcccggtattatgcttgtattagtaggcattattattattacgtgttgtctattatctgtttataggttcactcgacgaactaaactacctatacaagatatggttgtgccataatttttataaatttttttatgagtatttttacaaaaaaaatgtataaagtgtatgtcttatgtatatttataaaaatgctaagtatgcgatgtatctatgttatttgtatttatctaaacaatacctctacctctagatattatacaaaaattttttatttcggcatattaaagtaaaatctagttaccttgaaaatgaatacagtgggtggttccgtatcaccagtaagaacataatagtcgaatacagtatccgattgagattttgcatacaatactagtctagaaagaaatttgtaatcatcttctgtgacgggagtccatatatctgtatcatcgtctagtttatcagtgtcccatgctatattcctgttatcatcattagttaatgaaaataactctcgtgcttcagaaaagtcaaatattgtatccatacatacatctccaaaactatcgcttatacgtttatctttaacgatacctatacctagatggttatttactaacagacattttccagatctattgactataactcctatagtttccacatcaaccaagtaatgatcatctattgttatataacaataacataactcttttccatttttatcagtatgtatatctatatcaacgtcgtcgttgtagtgaatagtagtcattgatctattatatgaaacggatatgtctagaacggcaattgttttacgtccagttaacactttctttgatttaaagtctagagtctttgcaaacataatatccttatccgactttatatttcctgtagggtggtataattttattttgcctccacatatcggtgtttccaaatatattactagacaatattccatatagttattagttaagggtacccaattagaacacgtacgcttattatcatcatttggatcgtatttcataaaagttattgtactatcgatgtcaacacattctacattttttaatcgtctatatagtatttttctgatattttctataatatcagaattgtcttccatcggaagttgtatactatcggaatcagttacatgtttaaataattctctgatgtcattccttatacaatcaaattcattattaaacagtttaatagtctgtagacctttatcgtcgtaaatatccattgtcttattagttacgcttatttttatgtgttttacgttgctttattatattttataagaatgattgtttgacgaatcacgagaactattaagacacattattaggtatatattataaaaaagtttttgattacgatgttataagaggaaagaggacacattaacatcatacatcaattaactacattcttataacatcgtaatcaaaagaattgcaattttgatgtataacaactgtcaatgggttatggaattgtatattacatattatacggtatgttggtaacgacaaataccgatcggtaattgtctgccggtgtaatagaattatatatatctatctattacaccggctgagtatgcataataataagttgtggtagtatgatctccatatttataatttaggactttgtattcagtatttttggaatcataaaaaataaaaaaaagttttactaatttaaaatttaaaaagtatttacatttttttcactgtttagtcgcggatatggaattcgatcctgccaaaatcaatacatcatctatagatcatgtaacaatattacaatacatagatgaaccaaatgatataagactaacagtatgcattatccgaaatattaataacattacatattatatcaatatcacaaaaataaatacacatttggctaatcaatttcgggcttggaaaaaacgtatcgccggaagggactatatgactaacttatctagagatacaggaatacaacaatcaaaacttactgaaactatacgtaactgtcaaaaaaatagaaacatatatggtctatatatacactacaatttagttattaatgtggttattgattggataaccgatgtgattgttcaatcaatattaagagggttggtaaattggtacatagctaataatacctatacacccaataatacaacaaccatttctgagttggatatcatcaaaatactggataaatacgaggacgtgtatagagtaagtaaagaaaaagaatgtggaatttgctatgaagttgtttactcaaaacgatagatactttggtttattggattcgtgtactcatatattttgcataacatgcatcaatatatggcataaaacacgaagagaaaccggtgcgtcggataattgtcctatatgtcgtacccgttttagaaacataacaatgagcaagttctataagctagttaactaataaataaaaagtttaatttgttgacgacgtatgtcgttatttttctcgtatgaaagattaaattcaattcaattcgttgtttctaatataatctgccgtattggatggattctcaagacaattgcatttagattatattatcatgaataaaaatagtagcacgcactacttcagccaaatattcttttttgaaacgccatctatcgtagtgaggacacaagtgaacctataattatcaaatttattagtatcagtcacatgaaggactttctgtagagtgacgattctaccatctatggtactaacggtttcatcctccttgataccctcacccaaatgttctataaatttagcatcctcgtccgatctcatatcctttgccaaccaatacatgtagctaaaattaggcataaatttcacacatccagtgcaacgaaattctccagaagatgttacgatgtttaggttaggacatttgatttcgtcggcattaacatatgggtgaacacacccatacatgaaagcgatgagaaataggattctcatcttgccaaaatatcactagaaaaaatttatttatcaattttaaaggtataaaaaatacttattgttgctcgaatattttgtatttgatggtatacggaagattagaaatgtaggtattatcatcaactgattctatggttttatgtattctatcatgtttcactattgcgtcggaaataatatcatatgcttccacatatattttattttgttttaactcataatactcacgtaattctggattattggcatatctatgaataattttagctccatgatcagtaaatattaatgagaacatagtattaccacctaccattatttttttcatttcgttcaattcttgattgcaaagatctatataatcattatagcgttgacttatggactctggaatcttagacgatgtacagtcatctataatcatggcatatttaatacattgttttatagcatagtagttatctacgatgttagatatttctctcaatgaatcaatcacacaatctaatgtaggtttatgacataatagcattttcagcagttcaatgtttctagattcgttgatggcaatggctatacatgtatatccgttatttgatctaatgttgacatctgaaccggattctagcagtaaagatactagagattgtttattatatctaacagccttgtgaagaagtgtttctcctcgtttgtcaatcatgttaatgtctttaagataaggtaggcaaatgtttatagtactaagaattgggcaagcataagacatgtcacaaagaccctttttgtatgtataagtgtaaaaattataacattcatagttggatttacataggtgtccaatcgggatctctccatcatcgagataattgatggcatctcccttccttttttagtagatatttcatcgtgtaagaatcaatattaatatttctaaagtattcgtgtatagcctctttatttaccacagttccatattccactagagggatatcgccgaatgtcatatactcaattagtatatgttggaggacatccgagttcattgttttcaatatcaaaaagatggtttccttatcatttctccatagtggtacaatactacacattattccgtgcggctttccattttccaaaaacaatttgaccaaatctaaatctacatctttattgtatctataatcactatttagataatcagccataattactcgagtgcaacatgttagatcgtctatatatgaataagcagtgttatctattcctttcattaacaatttaacgatgtctatatctatatgagatgacttaatataatattgaagagctgtacaatagtttttatctatagaagacggcttgattccgtgattaattagacatttaacaacttccggacgcacatatgctctcgtatccgactttgaatacagatgagagatgatatacagatgcaatacggtaccgcaatttcgtagttgataatcatcatacgcgtatcagtactcgtcctcataaagaacactgcagccattttctatgaacaaatcaataattttaggaacaggatcattgtcattacataattttctataactgaacgatggttttcacatttaacactcaagtcaaatccatgttctaccaacacctttatcaagtcaacgtctacatttttggatttcatatagctgaatatattaaagtcatttatgttgctaaatccagtggcttctagtagagccatcgctatatcctttaactttaacatgtctactatttgtgtattcttctaatggggtagctgtctccaatttttgcgtaatggattagtgccactgtctagtagtagtttgacgacctcgacattattacaatgctcattaaaaaggtatgcgtgtaaagcattattcttgaattggttcctggtatcattaggatctctgtctctcaacatctgtttaagttcatcgagagccacctcctcattttccagatagtcaaacattttgactgaatgagctactgtgaactctatacacccacacaactaatgtcattaaatattatttttttgaatgtatttataccatgtcaaaaacttgtacaattattaataaaaataatttagtgtttaaattttaccagttccagattttacacctccgttaaccccactttttacaccactggacgatcctcctccccacattccaccgccaccagatgtataagttttagatcctttattactaccatcatgtccatggataaagacactccacatgccgccactactaccccctttagaagacatattaataagacttaaggacaagtttaacaataaaattaatcacgagtaccctactaccaacctacactattatatgattatagtttctatttttacagtaccttaactaaagtctctagtcacaagagcaatactaccaacctacactattatatgattatagtttctatttttataggaacgcgtacgagaaaatcaaatgtctaatttctaacggtagtgttgataaacgattatcgtcaatggatacctcctctatcatgtcgtctattttcttactttgttctattaacttattagcattatatattatttgattataaaacttatattgcttattagcccaatctgtaaatatcggattattaacatatcgtttctttgtaggtttatttaacatgtacatcactgtaagcatgtccgtaccatttattttaatttgacgcatatccgcaatttctttttcgcagtcggttataaattctatatatgatggatacatgctacatgtgtacttataatcgactaatatgaagtacttgatacatattttcagtaacgatttattattaccacctatgaataagtacctgtgatcgtctaggtaatcaactgttttcttaatacattcgatggttggtaatttactcagaataatttccaatatcttaatatataattctgctatttctgggatatatttatctgccagtataacacaaatagtaatacatgtaaacccatattttgttattatattaatgtctgcgccattatctattaaccattctactaggctgacactatgcgacttaatacaatgataaagtatactacatccatgtttatctattttgtttatatcatcaatatacggcttacaaagttttagtatcgataacacatccaactcacgcatagagaaggtagggaataatggcataatatttattaggttatcatcattgtcattatctacaactaagtttccattttttaaaatatactcgacaactttaggatctctattgccaaatttttgaaaatatttatttatatgcttaaatctatataatgtagctccttcatcaatcatacatttaataacattgatgtatactgtatgataagatacatattctaacaatagatcttgtatagaatctgtatatcttttaagaattgtggatattaggatattattacgtaaactattacacaattctaaaatataaaacgtatcacggtcgaataatagttgatcaactatataattatcgattttgtgatttttcttcctaaactgtttacgtaaatagttagatagaatattcattagttcatgaccactatagttactatcgaataacgcgtcaaatatttcccgtttaatatcgcatttgtcaagataataatagagtgtggtatgttcacgataagtataataacgcatctcttttttgtgtgaaattaaatagtttatcacgtccaaagatgtagcataaccatcttgtgacctagtaataatataataatagagaactgttttacccattctatcatcataatcagtggtgtagtcgtaatcgtaatcgtctaattcatcatcccaattataatattcaccagcacgtctaatctgttctattttgatcttgtatccatactgtatgttgctacatgtaggtattcctttatccaataatagtttaaacacatctacattgggatttgatgttgtagcgtatttctctacaatattaataccatttttgatactatttatttctatacctttcgaaattagtaatttcaataagtctatatcgatgttatcagaacatagatattcgaatatatcaaaatcattgatatttttatagtcgactgacgacaataacaaaatcacaacatcgtttttgatattattatttttcttggtaacgtatgcctttaatggagtttcaccatcatactcatataatggatttgcaccactttctatcaatgattgtgcactgctggcatcgatgttaaatgttttacaactatcatagagtatcttatcgttaaccatgattggttgttgatgctatcgcattttttggtttctttcatttcagttatgtatggatttagcacgtttgggaagcatgagctcatatgatttcagtactgtagtgtcagtactattagtttcgatcagatcaatgtctagatctatagaatcaaaacacgataggtcagaagataatgaatatctgtacgcttctttttgtactgtaacttctggttttgttagatggttgcatcgtgctttaacatcaatggtacaaattttatcctcgctttgtgtatcatattcgtctctagtataaaattctatattcagattatcatgcgatgtgtatacgctaacggtatcaataaacggagcacaccatttagtcataacagtaatccaaaattttttaaagtatatcttaacgaaagaagttgtgtcattgtctacggtgtatggtactagatcctcataagtgtatatatctagagtaatgtttaatttattaaatggttgataatatggatcctcatgacaatttccgaagatggaaatgagatatagacatgcaataaatctaatcgaagacatggttactccttaaaaaaatacgaataatcaccttggctatttagtaagtgtcatttaacactatactcatattaatccatggactcataatctctatacgggattaacggatgttctatatacggggatgagtagttttcttctttaactttatactttttactaatcatatttagactgatgtatgggtaatagtgtttaaagagttcgttctcatcatcagaataaatcaatatctctgtttttttgttatacagatgtattacagcctcatatattacgtaatagaacgtgtcatctaccttattaactttcaccgcatagttgtttgcaaatacggttaatcctttgacctcgtcgatttccgaccaatctgggcgtataatgaatctaaactttaatttcttgtaatcattcgaaataatttttagtttgcatccgtagttatcccctttatgtaactgtaaatttctcaacgcgatatctccattaataatgatgtcgaattcgtgctgtatacccatactgaatggatgaactaacgaatatcaacggcgttaatagtaatttactttttcatctttacatattgggtactagttttactatcataagtttataaattccacaagctactatggaataagccaaccatcttagtataccacacatgtcttaaagtttattaattaattacatgttgttttatatatatcgctacgaatttaaagagaaatcagtttaggaagaaaaaaattatctatctacatcatcacgtctctgtattctacgatagagtgctactttaagatgagacatatccgtgtcatcaaaaatatactccattaaaatgattattccggcagcgaacttgatattggatatatcacaacctttgttaatatctacgacaatagacagcagtcccatggttccataaacagtgagtttatctttctttgaagcgatagtttgtagagatcttataaaaccgtcaaacgacatcgcatttatatctttagctaattcatatatgttaccatcgtaatatctaaccgcgtctatcttaaacgtttccatcgctttaaagacgtttccgatagatggtctcatttcatcagtcatactgagccaacaaatataatcgtgtataacatctttgatagaatcagactctaaagaaaacgaatcggctttattatacgcattcatgataaacttaatgaaaaatgtttttcgttgtttaagttggatgaatagtatgtcttaataattgttattatttcattaattaatatttagtaacgagtacactctataaaaacgagaatgacataactagttatcaaagtgtctaggacgcgtaattttcatatggtatagatcctgtaagcattgtctgtattctggagctattttctttatcgcattagtaagttcagaatatgttataaatttaaatcgaataacgaacatgactttagtaaagtcgtctatattaactcttttattttctagccatcgtaataccatgtttaagatagtatattctctagttactacgatctcatcgttgtctagaatatcacatactgaatctacatccaattttagaaattggtctgtgttacatatctcttctatattattgttgatgtattgtcgtagaaaactattacgtagaccattttctttataaaacgaatatatagtactccaattatctttaccgatatatttgcacacataatccattctctcaatcactacatctttaagattttcgttgttaagatatttggctaaactatataattctattagatcatcaacagaatcagtatatatttttctagatccaaagacgaactctttggcgtcctctataatattcccagaaaagatattttcgtgttttagtttatcgagatctgatctgttcatatacgccatgattgtacggtacgttatgataaccgcataaaataaaaatccattttcatttttaaccaatactattcataattgagattgatgtaatactttgttactttgaacgtaaagacagtacacggatccgtatctccaacaagcacgtagtaatcaaatttggtgttgttaaacttcgcaatattcatcaatttagatagaaacttatactcatcatctgttttaggaatccatgtattattaccactttccaacttatcattatcccaggctatgtttcgtccatcatcgttgcgcagagtgaataattcttttgtattcggtagttcaaatatatgatccatgcatagatcggcaaagctattgtagatgtgatttttcctaaatctaatataaaactcgtttactagcaaacactttcctgatttatcgaccaagacacatatggtttctaaatctatcaagtggtggggatccatagttatgacgcagtaacatagattattacattcttgactgtcgctaatatctaaatatttattgttatcgtattggattctgcatatagatggcttgtatgtcaaagatatagaacacataaccaatttatagtcgcgctttacattctcgaatctaaagttaagagatttagaaaacattatatcctcggatgatgttatcactgtttctggagtaggatatattaaagtctttacagatttcgtccgattcaaataaatcactaaataatatcccacattatcatctgttagagtagtatcattaaatctattatattttatgaaagatatatcactgctcacctctatatttcgtacatttttaaactgtttgtataatatctctctgatacaatcagatatatctattgtgtcggtagacgataccgttacatttgaattaatggtgttccattttacaacttttaacaagttgaccaattcatttctaatagtatcaaactctccatgattaaatattttaatagtatccattttatatcactacggacacaaagtagctgacataaaccattgtataatttttatgttttatgtttattagcgtacacattttggaagttccggcttccatgtatttcctggagagcaagtagatgatgaggaaccagatagtttatatccgtacttgcacttaaagtctacattgtcgttgtatgagtatgatcttttaaacccgctagacaagtatccgtttgatattgtaggatgtggacatttaacaatctgacacgtgggtggatcggaccattctcctcctgaacacaggacaccagagttaccaatcaacgaatatccactattgcaactataagttacaacgctcccatcggtataaaaatcctcgtatccgttatgtcttccgttggatatagatggaggggattggcatttaacagattcacaaataggtgcctcgggattccataccatagatccagtagatcctaattcacaatacgatttagattcaccgatcaaatgatatccgctattacaagagtacgttatactagagccaaagtctactccaccaatatcaagttggccattatcgatatctcgaggcgatgggcatctccgtttaatacattgattaaagagtgtccatccagtacctgtacatttagcatatataggtcccattttttgctttctgtatccaggtagacatagatattctatagtgtctcctatgttgtaattagcattagcatcagtctccacactattcttaaatttcatattaatgggtcgtgacggaatagtacagcatgatagaacgcatcctattcccaacaatgtcaggaacgtcacgctctccaccttcatatttatttatccgtaaaaatgttatcctggacatcgtacaaataataaaaagcccatatatgttcgctattgtagaaattgtttttcacagttgctcaaaaacgatggcagtgacttatgagttacgttacactttggagtctcatctttagtaaacatatcataatattcgatattacgagttgacatatcgaacaaattccaagtatttgattttggataatattcgtattttgcatctgctataattaagatataatcaccgcaagaacacacgaacatctttcctacatggttaaagtacatgtataattctatccatttgtcttccttaactatatatttgtatagataattacgagtctcgtgagtaattccagtaattacatagatgtcgccgtcgtactctacagcataaactatactatgatgtctaggcatgggagacttttttatccaacgatttttagtgaaacattccacatcgtttaatactacatatttttcatacgtggtataaactccacccattacatatatatcatcgtttacgaataccgacgcgcctgaatatctaggagtaattaagtttggaagtcttatccatttcgaagtgccgtgtttcaaatattctgccacacccgttgaaatagaaaattctaatcctcctattacatataactttccatcgttaacacaagtactaacttctgattttaacgacgacatattagtaaccgttttccattttttcgtttcaagatctacccgcgatacggaataaacatgtctattgttaatcatgccgccaataatgtatagacaattatgtaaaacatttgcattatagaattgtctatctgtattaccgactatcgtccaatattctgttctaggagagtaatgggttattgtggatatataatcagagtttttaatgactactatattatgttttataccatttcgtgtcactggctttgtagatttggatatagttaatcccaacaatgatatagcattgcgcatagtattagtcataaacttgggatgtaaaatgttgatgatatctacatcgtttggatttttatgtatccactttaataatatcatagctgtaacatcctcatgatttacgttaacgttttcgtgggataagatagttgtcagttcatcctttgataattttccaaattctggatcggatgtcaccgcagtaatattgttgattatttctgacatcgacgcattatatagttttttaattccatatcttttagaaaagttaaacatccttatacaatttgtggaattaatattatgaatcatagtttttacacatagatctactacaggcggaacatcaattattatggcagcaactagtatcatttctacattgtttatggtgatgtttatcttcttccagcgtatatagtctaatagcgattcaaacgcgtgatagtttataccattcaatataatcgcttcatcctttagatggtgatcctgaattcgtttaaaaaaattatacggagatgccgtaataatttccttattcacttgtataatttccccattgatagaaaatatcacgctttccattcttgaagtactataagtaattatagtataatgtaaaggtttatatattcaatattttttataaaaaaatcattttgacattaattcctttttaaatttccgtctatcatctatagaaacgtattctatgaatttataaaatgcttttacgtgtcctatcgtaggcgatagaaccgctaaaaagcctatcgaatttctacaaaagaatctgttatatggtatagggagagtataaaacattaaatgtccgtacttattaaagtattcagtagccaatcctaactctttcgaatacttattaatggctcttgttctgtacgaatctatttttttgaacaacggacctagtggtatatcttgttctatgtatctaaaataatgtctgactagatccgttagtttaatatcctcagtcatcttgtctagaatggcaaatctaactgcgggtttaggctttagtttagtttttatatctacatctatgtctttatctaacaccaaaaatataatagctaatattttattacaatcatccggatattcttctacgatctcactaactaatgtttctttggttatactagtatagtcactatcggacaaataaagaaaatcagatgatcgatgaataatacatttaaattcatcatctgtaagatttttgagatgtctcattaaaatattattagggtcagtactcattatcattcggcagctattacttattttatttttctgtattttattatttttcaccatatagatcaatcattagatcatcaaaatatgtttcaatcatcctaaagagtatggtgaatgactcttcccatctaatttctgaacgttcaccaatgtctctagccactttggcactaatagcgatcattcgcttagcgtcttctatattattaactggttgattcaatctatctagcaatggaccgtcggacagcgtcattctcatgttcttaatcaatgtacatacatcgccgtcatctaccaattcatccaacaacataagctttttaaaatcatcattataataggtttgatcgttgtcatttctccaaagaatatatctaataagtagagtcctcatgcttagtaatttaactattttagttaacaactattttttatgttaaatcaattagtacaccgctatgtttaatacttattcatattttagtttttaggattgagaatcaatacaaaaaattaatgcatcattaattttagaaatacttagtttccacgtagttaatgaaacatttgaactcatcgtacaggacgttctcgtacaggacgtaactataaaccggtttatatttgttcaagatagatacaaatccgataactttttttacgaattctacgggatccactttaaaagtgtcataccgggttctttttattcttttaaacagatcaatggtgtgatgttgattaggtcttttacgaatttgatatagaatagcgttcacatatcctccataatggtcaatcgccatttgttcgtatgtcataaattctttaattatatgacactgtgtattatttagttcatccttgttcatcattaggaatctatccaaaatggcaattatactagaactataggtgcgttgtatacacatattgatgtgtctgtttatacaatccatgatatttggatccatgctactaccttcgggtaaaattgtagcatcatataccatttctagtactttaggttcattattatccattgcagaggacgtcatgatcgaatcctaaaaaaatatattatttttatgttattttgttaaaaataatcatcgaatacttcgtaagatactccttcatgaacataatcagttacaaaacgtttatatgaagtaaagtatctacgatttttacaaaagtccggatgcataagtacaaagtacgcgataaacggaataataatagatttatctagtctatctttttctatagctttcatagttagatacatggtctcagaagtaggattatgtaacatcagcttcgataaaatgactgggttatttagtcttacacattcgctcatacatgtatgaccgttaactacaaagtctacactaaaatgattgaacaatagatagtctaccattgtttcgtattcagatagtacagcgtagtacatagcatcttcacaaattatatcattgtctaatagatatttgacgcatcttatggatcccacttcaacagccatcttaaaatcggtagaatcatattgctttcctttatcattaataatttctaaaacatcatctctatcataaaagatacaaatattaactgtttgatccgtaataacattgctagtcgatagcaatttgttaataagatgcgctgggctcaatgtcttaataagaagtgtaagaggactatctccgaatttgttttgtttattaacatccgttgatggaagtaaaagatctataatgtctacattcttgactgttttagagcatacaatatggagaggtgtatttccatcatgatctggttttgagggactaattcctagtttcatcatccatgagattgtagaagcttttggattgtctgacataagatgtctatgaatatgatttttgccaaatttatccactatcctggcttcgaatccgatggacattatttttttaaacactctttctgaaggatctgtacacgccaacaacggaccacatccttcttcatcaaccgagttgttaatcttggctccatactgtaccaataaatttattctctctatgacttcatcatctgttcccgagagataatatagaggtgttttattatgtttatcacacgcgtttggatctgcgccgtgcgtcagcagcatcgcgactattctattattattaattttagaagctatatgcaatggataatttccatcatcatccgtctcatttggagagtatcctctatgaagaagttcttcgacaaatcgttcatctagtcctttaattccacaatacgcatgtagaatgtgataattatttccagaaggttcgatagcttgtagcatattcctaaatacatctaaatttttactattatatttggcataaagagatagataatactcggccgacataatgttgtccattgtagtataaaaattaatatttctatttctatttctgtatatttgcaacaatttactctctataacaaatatcataacttagttcttttatgtcaagaaggcactggtttagttcatctataaatgtcacgccataactaccacgcatgctatactcagaattatgataaagatatttatccttggggtgtaggtaatggggattaatctttgttggatcagtctctaagttaacacatgtcacacatgatccatttatagttatatcacacgatgatgatttatgaattgattccggaagatcgctatcgtattttgtggttccacaattcatttccatacatgttattgtcacactaatattatgatgaactttatctagccgctgagtggtaaacaacagaacagatagtttattatctttaccaacaccctcagccgctgccacaaatctctgatccgtatccatgatggtcatgtttatttctagtccgtatccagtcaacactatgttagcatttctgtcgatatagctttcactcatatgacactcaccaataatagtagaattaatgtcgtaatttacaccaatagtgagttcggcggcaaagtaccaataccggtaatcttgtcgaggaggacatatagtattcttgtattctaccgaatacccgagagatgcgatacaaaagagtaagactaatttgtaaaccatcttactcaaaatatgtaacaatagtacgatgcaatgagtaagacaataggaaatctatcttatatacacataattattctatcaattttaccaattagttagtgtaatgttaacaaaaatgtgggagaatctaattagtttttctttacacaattgacgtacatgagtctgagttccttgtttttgctaattatttcatccaatttattattcttgactatatcgagatcttttgtataggagtcagacttgtattcaacatgcttttctataatcattttagctatttcggcatcatccaatagtacattttccagattagcagaatagatattaatgtcgtatttgaacagagcctgtaacatctcaatgtctttattatctatagccaatttaatgtccggaatgaagagaagggaattattggtgtttgtcgacgtcatatagtcgagcaagagaatcatcatatccacgtgtccattttttatagtgatgtgaatacaactaaggagaatagccagatcaaaagtagatggtatctctgaaagaaagtaggaaacaatacttacatcattaagcatgacggcatgataaaatgaagttttccatccagttttcccatagaacatcagtctccaatttttcttaacaaacagttttaccgtttgcatgttaccactatcaaccgcataatacaatgcggtgtttcccttgtcatcaaattgtgaatcatccagtccactgaatagcaaaatctttactattttggtatcttccaatgtggctgcctgatgtaatggaaattcattctctagaagatttttcaatgctccagcgttcaacaacgtacatactagacgcacgttattatcagctattgcataatacaaggcactatgtccatggacatccgccttaaatgcatctttgctagagagaaagcttttcagctgcttagacttccaagtattaattcgtgacagatccatgtctgaaacgagacgctaattagtgtatattttttcattttttataattttgtcatattgcaccagaattaataatatctctaatagatctgattagtagatacatggctatcgcaaaacaacatatacacatttaataaaaataatatttattaagaaaattcagatttcacgtacccatcaatataaataaaataatgattccttacaccgtacccatattaaggagattccaccttacccataaacaatataaatccagtaatatcatgtctgatgatgaacacaaatggtgtattaaattccagtttttcaggagatgatctcgccgtagctaccataatagtagatgcctctgctacagttccttgttcgtcgacatctatctttgcattctgaaacattttataaatatataatgggtccctagtcatatgtttaaacgacgcattatctggattaaacatactaggagccatcatttcggctatcgacttaatatccctcttattttcgatagaaaatttagggagtttaagattgtacactttattccctaattgaaacgaccaatagtctaattttgcagccgtaatagaatctgtgaaatgggtcatattatcacctattgccaggtacatactaatattagcatccttatacggaaggcgtaccatatcatattcttcgtcatcgattgtgattgtatttccttgcaatttagtaactacgttcatcatgggaaccgttttcgtaccgtacttattagtaaaactagcattgcgtgttttagtgatatcaaacggatattgccatatacctttaaaatatatagtattaatgattgcccatagagtattattgtcgagcatattagaatctactacattagacataccggatctacgttctactatagaattaattttattaaccgcatctcgtctaaagtttaatctatataggccgaatctatgatattgttgataatacgacggtttaatgcacacagtattatctacgaaactttgataagttagatcagtgtacgtatatttagatgttttcagcttagctaatcctgatattaattctgtaaatgctggacccagatctctttttctcaaatccatagtcttcaataattctattctagtattacctgatgcaggcaatagcgacataaacatagaaaacgaataaccaaacggtgagaagacaatattatcatcttgaatatttttatacgctactataccggcattggtaaatccttgcagacgataggtagacactgaacacgttaacgatagtatcaataacgcaatcatgattttatggtattaataattaaccttatttttatgttcggtataaaaattattgatgtctacacatccttttgtaattgacatctatatatccttttgtataatcaactctaatcactttaacttttacagttttccctaccagtttatccctatattcaacatatctatccatatgcatcttaacactctctgccaagatagcttcaaagtgaggatagtcaaaaagataaatatatagagcataatccttctcgtatactctgccctttattacatcacccgcattgggcaacgaataacaaaatgcaagcatcttgttaacgggctcgtaaattgggataaaaattatgtttttatatctattttattcaagagaatattcaggaatttctttttccggttgtatctcatcgcagtatatatcatttgtacattgtttcatattttttaatagtctacaccttttagtaggactagtatcgtacaattcatagctgtattttgaattccaatcacgcataaaaatatcttccaattgttgacgaagacctaatccatcatccggtgtaatattaatagatgctccacatgtatccgtaaagtaatttcctgtccaatttgaggtacctatatacgccgttttatcggttaccatatatttggcatggtttaccctagaatacggaatgggaggatcagcatctggtacaataaatagctttacttctatatttatgtttttagattttagcatagcgatagatcttaaaaagtttctcatgataaacgaagatcgttgccagcaactaatcaatagcttaactgacacttgtctgtctatagcggctcttcttaattcatcttctatataaggccaaaacaaaatattgcctgccttcgaataaataatagggataaagttcataacagatacataaacgaatttactcgcatttctgatacatgacaataaagcggttaaatcattggttctttccatagtacatagttgttgcggtgcagaagcaataaatacagagtgtggaacgccgcttacgttaatactaagaggatgatctgtattataatacgacggataaaagtttttccaattatatggtagattgttaactccaagataccagtatacctcaaaaatttgagtgagatccgctgccaagttcctattattgaagatcgcaatacccaattctttgacctgagttagtgatctccaatccatgttagcgcttcctaaataaatatgtgtattatcagatatccaaaattttgtatgaagaactcctcctaggatatttgtaatatctatgtatcgtacttcaactccggccatttgtagtctttcaacatcctttaatggtttgttagatttattgacggctactctaactcgtactcctcttttgggtaattgtacaatcttgtttaatattatcgtgccgaaattcgtacccacttcatccgataaactccaataaaaagatgatatatctagtgtttttgtggtattggatagaatttccctccacatgttaaatgtagacaaatatactttatcaaattgcatacctataggaatagtctctgtaatcactgcgattgtattatccggattcattttatttgttaaaagaataatcctatatcacttcactctattaaaaatccaagtttctatttctttcatgactgattttttaacttcatccgtttccttatgaagatgatgtttggcaccttcataaatttttatttctctattacaatttgcatgttgcatgaaataatatgcacctaaaacatcgctaatcttattgtttgttccctggagtatgagagtcggggggtgttaatcttggaaattatttttctaaccttgttggtagccttcaagacctgactagcaaatccagccttaattttttcatgattgattaatgggtcgtattggtatttataaactttatccatatctctagatactgattctggacatagctttccgactggcgcatttagtgtgatggttcccataagtttggcagctagcagattcagttttgaaacagcatctgcattaactagaggagacattagaatcattgctgtaaacaagtttggattatcgtaagaggctagctcccatggaatgacccaataagtagatttaatagttaccacgtgctgtaccaaagtcatcaatcatcattttttcaccattacttcttccatgtccaatatgatcatgtgagaatactaaaattcctaacgatgatatgttttcagctagttcgtcataacgtccagaatgtttaccagctccatgacttatgaatactaatgccttaggatatgtaataggtttccaatatatgtaatcattgtccagattgaacatacagtttgcactcatgattcacgttatataactatcaatattaacagttcgtttgatgatcatattatttttatgttttattgataattgtaaaaacatacaattaaatcaatatagaggaaggagacggctactgtcttttgtgagatagtcatggcgactaaattagattatgaggatgctgttttttactttgtggatgatgataaaatatgtagtcgcgactccatcatcgatctaatagatgaatatattacgtggagaaatcatgttatagtgtttaacaaagatattaccagttgtggaagactgtacaaggaattgatgaagttcgatgatgtcgctatacggtactatggtattgataaaattaatgagattgtcgaagctatgagcgaaggagaccactacatcaattttacaaaagtccatgatcaggaaagtttattcgctaccataggaatatgtgctaaaatcactgaacattggggatacaaaaagatttcagaatctagattccaatcattgggaaacattacagatctgatgaccgacgataatataaacatcttgatactttttctagaaaaaaaattgaattgatgatataggggtcttcataacgcataattattacgttagcattctatatccgtgttaaaaaaaattatcctatcatgtatttgagagttttatatgtagcaaacatgatagctgtgatgccaataagctttagatattcacgcgtgctagtgttagggatggtattatctggtggtgaaatgtccgttatataatctacaaaataatcatcgcatatagtatgcgatagtagagtaaacatttttatcgtttctactgggttcatacatcgtctacccaattcggttataaatgaaattgtcgccaatcttacacccaaccccttgttatccattagtatagtattaacttcgttatttatgtcataaactgtaaatgattttgtagatgccatatcatacatgatattcatgtccctattataatcattactaactttatcacaatatatgttgataatatctatatatgatctagtctttgtgggcaactgtctatacaagtcgtctaaacgttgtttactcatatagtatcgaacagccatcattacatggtcccgttccgttgatagataatcgagtatgttagtggacttgtcaaatctatataccatattttctggaagtggatatacatagtcgtgatcaacattattgctagcctcatcttctatatcctgtactataccattatctatatcatctacataatctacgatattattacacataaacatcgacaacatactattgtttattatctaagtcctgttgatccaaacccttgatctcctctatttgtactatctagagattgtacttcttccagttctggataatatatacgttgatagattagctgagctattctatctccagtatttacattaaacgtacattttccattattaataagaatgactcctatgtttcccctataatcttcgtctattacaccgcctcctatatcaatgccttttagggacagaccagacctaggagctattctaccatagcagaacttaggcatggacatactaatatctgtcttaattaactgtcgttctcctggagggatagtataatcgtaagcgctatataaatcatatccggcggcgtaaggtgattgcctagtaggagatttagctctgttagtttccttaacaaatctaactggtgagttaatattcatgttgaacataaaactaatattttatttcaaaattatttaccatcccatatattccatgaataagtgtgatgattgtacacttctatagtatctatatacgattcacgataaaatcctcctatcaatagcagtttattatccactatgatcaattctggattatccctcggataaataggatcatctatcagagtccatgtattgctggattcacaataaaattccgcatttctaccaaccaagaataaccttctaccgaacactaacgcgcatgatttataatgaggataataagtggatggtccaaactgccactgatcatgattgggtagcaaatattctgtagttgtatcagtttcagaatgtcctcccattacgtatataacattgtttatggatgccactgctggattacatctaggtttcagaagactcggcatattaacccaagcagcatccccgtggaaccaacgctcaacagatgtgggatttggtagacctcctactacgtataatttattgttagcgggtatcccgctagcatacagtctggggctattcatcggaggaattggaatccaattgtttgatatataatttaccgctatagcattgttatgtatttcattgttcatccatccaccgatgagatatactacttctccaacatgagtacttgtacacatatggaatatatctataatttgatccatgttcataggatactctatgaatggatacttgtatgatttgcgtggttgtttatcacaatgaaatattttggtacagtctagtatccattttacattatttatacctctgggagaaagataatttgacctgattacatttttgataaggagtagcagatttcctaatttatttcttcgctttatataccacttaatgacaaaatcaactacataatcctcatctggaacatttagttcatcgctttctagaataagtttcatagatagataatcaaaattgtctatgatgtcatcttccagttccaaaaagtgtttggcaataaagtttttagtatgacataagagattggatagtccgtattctatacccatcatgtaacactcgacacaatattcctttctaaaatctcgtaagataaagtttatacaagtgtagatgataaattctacagaggttaatatagaagcacgtaataaattgacgacgttatgactatctatatatacctttccagtatacgagtaaataactatagaagttaaactgtgaatgtcaaggtctagacaaacccttgtaactggatctttatttttcgtgtatttttgacgtaaatgtgtgcgaaagtaaggagataactttttcaatatcgtagaattgactattatattgccacctatagcatcaataattgttttgaatttcttagtcatagacaatgctaatatattcttacagtacacagtattaacaaatatcggcatttatgtttctttaaaagtcaacatctaaagaaaaatgattatcttcttgagacataactcccattttttggtattcacccacacgtttttcgaaaaaattagtttttccttccaatgatatattttccatgaaatcaaacggattggtaacattataaatttttttaaatcccaattcagaaatcaatctatccgcgacgaattctatatatgttttcatcatttcacaattcattcctataagtttaactggaagagccgcagtaagaaattcttgttcaatggataccgcatctgttataatagatctaacggtttcttcactcggtggatgcaataaatgtttaaacatcaaacatgcgaaatcgcagtgcagaccctcgtctctactaattagttcgttggaaaacgtgagtccgggcattaggccacgctttttaagccaaaatatggaagcgaatgatccagaaaagaagattccttctactgcagcaaaggcaataagtctctctccataaccggcgctgtcatgtatccacttttgagcccaatcggccttcttttttacacaaggcatcgtttctatggcattaaagagatagtttttttcattactatctttaacataagtatcgatcaaaagactatacatttccgaatgaatgttttcaatggccatctgaaatccgtagaaacatctagcctcggtaatctgtacttctgtacaaaatcgttccgccaaattttcattcactattccgtcactggctgcaaaaaacgccaatacatgttttataaaatatttttcgtctggtgttagtttattccaatcattgatatctttagatatatctacttcttccactgtccaaaatgatgcctctgcctttttatacatgttccagatgtcataatattggattgggaaaataacaaatctatttggatttggtgcaaggatgggttccataactaaattaacaataacaataaattttttttcagttatctatatgcctgtacttggatcttttgtacatcgatatcgccgcaatcactacaataattacaagtattattgatagcattgttattagtactatcataattaaattatcgacattcatgggtgctgaataatcgttattatcatcattatcattttgtaattgtgacatcatactagataaatcgtttgcgagattgttgtgggaagcgggcatggaggatgaattatcgttattattatttaacgcctcccattcggattcacaaatgttacgcacattcaacattttatggaaactataattttgtgaaaacagataacaagaaaactcgtcatcgttcaaatttttaacgatagtaaaccgattaaacgtcgagctaatttctaacgctagcgactctgttggatatgggtttccagatatatatcttttcagttcccctacgtatctataatcatctgtaggaaatggaagatatttccatttatctactgttcctaatatcatatgtggtggtgtagtagaaccattaagcgcgaaagatgttatttcgcatcgtattttaacttcgcaataatttctggttagataacgcactctaccagtcaagtcaatgatattagcctttacagatatattcatagtagttgtaacgatgactccatcttttagatgcgatactcctttgtatgtaccagaatcttcgtaccgcaaactcgatatatttaaacaagttaatgagatattaacgcgttttatgaatgatgatatataaccagaagttttatcctcggtggctagcgctataaccttatcattataataccaactagtgtgattaatatgtgacacgttagtgtgggtacaaatatgtacattatcgtctacgtcgtattcgatacatccgcatacagccaacaaatataaaatgacaaatactctaacgccgttcgtacccatcttgatgcggtttaataaatgttttgatttcaatttattgtaaaaaaagattcggttttatactgttcgatattctcattgcttatattttcatctatcatctccacacagtcaaatccgtggttagcatgcacctcatcaaccggtaaaagactatcggactcttctatcattataactctagaatatttaatttggtcattattaatcaagtcaattatcttatttttaacaaacgtgagtattttactcattttttataaaaacttttagaaatatacagactctatcgtgtgtctatatcttctttttatatccaatgtatttatgtctgatttttcttcatttatcatatataatggtccaaattctacacgtgcttcggattcatccagatcattaaggttcttataattgtaacatccttctcttccctcttctacatcttccttcttattcttattcttagcgtcacagaatctaccacagcaggatcccatgacgagcgtcatattaaactaatccattttcaattataatatacgattagtaatgaccattaaaataaaaaatattcttcataaccggcaagaaagtgaaaagttcacattgaaactatgtcagtagtatacatcatgaaatgatgatatatatatactctattttggtggaggattatatgatataattcgtggataatcattcttaagacacatttcttcattcgtaaatcttttcacgttaaatgagtgtccatattttgcaatttcttcatatgatggcggtgtacgtggacgaagctgctcctgttcttgttgtagtcgccgactgtcgtgtttgcgtttagatccctccattatcgcgattgcgtagatggagtactattatataccttgtaattaaatttttttattaattaaacgtataaaaacgttccgtatctgtatttaagagccagatttcgtctaatagaacaaatagctacagtaaaaataactagaataattgctacacccactagaaaccacggatcgtaatacggcaatcggttttcgataataggtggaacgtatattttatttaaggacttaacaattgtctgtaaaccacaatttgcttccgcggatcctgtattaactatctgtaaaagcatatgttgaccgggcggagccgaacattctccgatatctaatttctgtatatctataatattattaacctccgcatacgcattacagttcttttctagcttggataccgcactaggtacatcgtctagatctattcctatttcttcagcgatagctcttctatccttttccggaagcaatgaaatcacttcaataaatgattcaaccatgagtgtgaaactaagtcgagaattactcatgcatttgttagttattcggagcgcgcaatttttaaactgtcctataacctctcctatatgaatagcacaagtgacattagtagggatagaatgttgagctaatttttgtaaataactatctataaaaagattatacaaagttttaaactctttagtttccgccatttatccagtctgagaaaatgtctctcataataaatttttccaagaaactaattgggtgaagaatggaaacctttaatctatatttatcacagtctgttttggtacacatgatgaattcttctaatgctgtactaaattcgatatctttttcgatttctggatatgtttttaataaagtatgaacaaagaaatggaaatcgtaataccagttatgttcaactttgaaattgttttttattttcttgttaatgattccagccacttgggaaaagtcaaagtcgtttaatgccgatttaatacgttcattaaaaacaaactttttatcctttagatgaattattattggttcattggaatcaaaaagtaagatattatcgggtttaagatctgcgtgtaaaaagttgtcgcaacagggtagttcgtagattttaatgtataacagagccatctgtaaaaagataaactttatgtattgtaccaaagatttaaatcctaatttgatagctaactcggtatctactttatctgccgaatacagtgctaggggaaaaattataatatttcctctttcgtattcgtagttagttctcttttcatgttcgaaaaagtgaaacatgcggttaaaatagtttataacattaatattactgttaataactgccggataaaagtgggatagtaatttcacgaatttgatactgtcctttctctcgttaaacgcctttaaaaaaactttagaagaatatctcaatgagagttcctgaccatccatagtttgtatcaataatagcaacatatgaagaacccgtttatacagagtatgtaaaaatgttaatttatagtttaatcccatggcccacgcacacacgattaattttttttcatctccctttagattgttgtatagaaatttgggtactgtgaactccgccgtagtttccatgggactatataattttgtggcctcgaatacaaattttactacatagttatctatcttaaagactataccatatcctcctgtagatatgtgataaaaatcgtcgtttataggataaaatcgtttatccttttgttggaaaaaggatgaattaatgtaatcattctcttctatctttagtagtgtttccttattaaaattcttaaaataatttaacaatctaactgacggagcccaattttggtgtaaatctaattgggacattatgttgttaaaatacaaacagtctcctaatataacagtatctgataatctatggggagacatccattgatattcaggggatgaatcattggcaacacccatttattgtacaaaaagccccaatttacaaacgaaagtccaggtttgatagagacaaacaattaactattttgtctctgtttttaatttctttggtaatgaaattattcacaatatcagtatcttctttatctaccagagattttactaacttgataaccttggctgtctcattcaatagggtagtaatatttgtatgtgtgatattgatatctttttgaattgtttcttttagaagtgattctttgatggtgccagcatacgaattacaataatgcagaaactcagttaacatgcaggaattatagtaagccaattccaattgttgcctgtattgtattagagtattaatatgcgcaatggtgtccttgcgtttctctgatagaatgcgagcagcgattttggcgttatcatttgacgatatttctggaatgacgaatcctgtttctactaactttttggtaggacaaagtgaaacaatcaagaagatagcttctcctcctatttgtggaagaaattgaactcctctagatgatctactgacgatagtatctccttgacagatattggaccgaattacagaagtacctggaatgtaaagccctgaaaccccctcattttttaagcagattgttgccgtaaatcctgcactgtgaccaagatagagagctcctttggtgaatccatctctatgtttcagtttaaccaagaaacagtcagctggtctaaaatttccatctctatctaatacagcatctaacttgatgtcaggaactatgaccggtttaatgttatatgtaacattgagtaaatccttaagttcataatcatcactgtcatcagttatgtacgatccaaacaatgtttctactggcatagtggatacgaagatgctatccatcagaatgtttccctgattagtattttctatatagctattcttctttaaacgattttccaaatcagtaactatgttcatttttttaggagtaggacgcctagccagtatggaagaggattttctagatcctctcttcaacatctttgatctcgatggaatgcaaaaccccatagtgaaacaaccaacgataaaaataatattgtttttcactttttataattttaccatctgactcatggattcattaatatctttataagagctactaacgtataattctttataactgaactgagatatatacaccggatctatggtttccataattgagtaaatgaatgctcggcaataactaatggcaaatgtatagaacaacgaaattatactagagttgttaaagttaatattttctatgagctgttccaataaattatttgttgtaactgcgttcaagtcataaatcatcttgatactatccagtaaaccgtgtttaagttctggaatattatcatcccattgtaaagcccctaattcgactatcgaatatcctgctctgatagcagtttcaatatcgacggacgtcaatactgtaataaaggtggtagtattgtcatcatcgtgataaactacgggaatatggtcgttagtaggtacggtgactttacacaacgcgatatataactttccttttgtaccatttttaacgtagttgggacgtcctgcagggtattgttttgaagaaatgatatcgagaacagatttgatacgatatttgttggattcctgattattcactataatataatctagacagatagatgattcgataaatagagaaggtatatcgttggtaggataatacatccccattccagtattctcggatactctattgatgacactagttaagaacatgtcttctattctagaaaacgaaaacatcctacatggactcattaaaacttctaacgctcctgattgtgtctcgaatgcctcgtacaaggatttcaaggatgccatagattctttgaccaacgatttagaattgcgtttagcatctgatttttttattaaatcgaatggtcggctctctggtttgctaccccaatgataacaatagtcttgtaaagataaaccgcaagaaaatttatacgcatccatccaaataaccctagcaccatcggatgatattaatgtattattatagattttccatccacaattattgggccagtatactgttagcaacggtatatcgaatagattactcatgtaacctactagaatgatagttcgtgtactagtcataatatctttaatccaatctaagaaatttaaaattagattttttacactgttaaagttaacaaaggtattacccggatacgtggatatcatatatggcattggtccattatcagtaatagctccataaactgatacggcgatggtttttatatgtgtttgatctaacgaggaagaaattcgcgcccacaattcatctctagatatgtatttaatatcaaacggtaacacatcaatttcgggacgcgtatatgtttctaaatttttaatccaaatataatgatgacctatatgccctattatcatactgtcaactatagtacacctagagaacttacgatacatctgtttcctataatcgttaaattttacaaatctataacatgctaaaccttttgacgacagccattcattaatttctgatatggaatctgtattctcgataccgtattgttctaaagccagtgctatatctccctgttcgtgggaacgctttcgtataatatcgatcaacggataatctgaagtttttggagaataatatgactcatgatctatttcgtccataaacaatctagacataggaattggaggcgatgatcttaattttgtgcaatgagtcgtcaatcctataacttctaatcttgtaatattcatcatcgacataatactatctatgttatcatcgtatattagtataccacggccttcttcatttcgtgccaaaataatatacagtcttaaataattacgcaatatctcaatagtttcataattgttagctgttttcatcaagatttgtaccctgtttaacatgatggcgttctatacgtctctattttcttttttttaaatttttaacgatttactgtggctagatacccaatctctctcaaatatttttttagcctcgcttacaagctgtttatctatactattaaaactgacgaatccgtgattttggtaatgggttccgtcgaaatttgccgaagtgatatgaacatattcgtcgtcgactatcaacaattttgtattattctgaatagtgaaaaccttcacagatagatcattttgaacacacaacgcgtctagacttctggcggttgccatagaatatacgtcgttcttatcccaattaccaactagaagtctgatcttaactcctctattaatggctgcttctataatggagttgtaaatgtcgggccaatagtagctattaccgtcgacacgtgtagtgggaactatggccaaatgttcaatatctatactagtcttagccgacttgagtttatcaataactacatcggtatctagatctctagaatatcccaataggtgttccggagaatcagtaaagaacactccacctataggattcttaatatgatacgcagtgctaactggcaaacaacaagccgcagagcataaattcaaccatgaattttttgcgctattaaaggctttaaaagtatcaaatcttctacgaagatctgtggccagcgggggataatcagaatatacacctaacgttttaatcgtatgtatagatcctccagtaaatgacgcgtttcctacataacatctttcatcatctgacacccaaaaacaaccgagtagtagtcccacattattttttttatctatattaacggttataaaatttatatccgggcagtgactttgtagctctcccagatttcttttccctcgttcatctagcaaaactattattttaatccctttttcagatgcctcttttagtttatcaaaaataagcgctcccctagtcgtactcagaggattacaacaaaaagatgctatgtatatatatttcttagctagagtgataatttcgttaaaacattcaaatgttgttaaatgatcggatctaaaatccatattttctggtagtgtttctaccagcctacattttgctcccgcaggtaccgatgcaaatggccacatttagttaacataaaaacttatacatcctgttctatcaacgattctagaatatcatcggctatatcgctaaaattttcatcaaagtcgacatcacaacctaactcagtcaatatattaagaagttccatgatgtcatcttcgtctatttctatatccgtatccattgtagattgttgaccgattatcgagtttaaatcattactaatactcaatccttcagaatacaatctgtgtttcattgtaaatttataggcggtgtatttaagttggtagattttcaattatgtatcaatatagcaacagtagttcttgctcctccttgattctagcatcctcttcattattttcttctacgtacataagcatgtccaatacgttagacaacacaccgacgatggcggccgccacagacacgaatatgactagaccgatgaccatttaaaaacccctctctagctttcacttaaactgtatcgattattcttttagaacatgtataatataaaaacattattctatttcgaatttaggcttccaaaaatttttcatccgtaaaccgataataatatatatagacttgttaatagtcggaataaatagattaatgcttaaactatcatcatctccacgattagagatacaatatttacattttttttgctgtttcgaaactttatcaatacacgttaatacaaacccaggaaggagatattgaaactgaggctgttgaaaatgaaacggtgaatacaataattcagataatgtaaaatcatgattccgtattctgatgatattagaactgctaatggatgtcgatggtatgtatctaggagtatctattttaacaaagcatcgatttgctaatatacaattatccttttgattaattgttattttattcatattcttaaaaggtttcatatttatcaattcttctacattaaaaatttccatttttaatttatgtagcccccgcaatactcctcattacgtttcattttttgtctataatatccattttgttcatctcggtacatagattatccaattgagaagcgcatttagtagttttgtacattttaagtttattgacgaatcgtcgaaaactagttatagttaacattttattatttgataccctgatattaatacccctgccgttactattatttataactgatgtaatccacgtaacattagaattaattatcgatagtaatgcatcgacgcttccaaaattgtctattataaactcaccgataatttttttattgcatgttttcatattcattaggattatcaaatctttaatcttactacgattgtatgcgttgatattgcaagacgtcattctaaaagacggaggatctccatcaaatgccagacaatcacgtacaaagtacatggaaataggttttgttctattgcgcatcatagatttatatagaacacccgtagaaatactaatttgttttactctataaaatactaatgcatctatttcatcgttttgtataacgtctttccaagtgtcaaattccaaatttttttcattgatagtaccaaattcttctatctctttaactacttgcatagataggtaattacagtgatgcctacatgccgttttttgaaactgaatagatgcgtctagaagcgatgctacgctagtcacaatcaccactttcatatttagaatatatgtatgtaaaaatatagtagaatttcattttgtttttttctatgctataaatgaattctcattttgcatctgctcatactccgttttatatcaataccaaagaaggaagatatctggttctaaaagccgttaaagtatgcgatgttagaactgtagaatgcgaaggaagtaaagcttcctgcgtactcaaagtagataaaccctcatcgcccgcgtgtgagagaagaccttcgtccccgtccagatgcgagagaatgaataaccctggaaaacaagttccgtttatgaggacggacatgctacaaaatatgttcgcggctaatcgcgacaacgtggcgtcgagacttttgaactaaaatacaattatatccttttcgatattaataaatccgtgtcgtccaggttttttatctctttcagtatgtgaatagataggtattttatctctattcatcatcgaatttaagagatccgataaacattgtttgtattctccagatgtcagcatctgatacaacaatatatgtgcacataaacctctggcacttatttcatgtaccttccccttatcactaaggagaatagtatttgagaaatatgtatacatgatattatcatgaattagatatacagaatttgtaacactctcgaaatcacacgatgtgtcggcgttaagatctaatatatcactcgataacacattttcatctagatacactagacattttttaaagctaaaatagtctttagtagtgacagtaactatgcgattattttcatcgatgatacatttcatcggcatattattacgcttaccatcaaagactataccatgtgtatatctaacgtattctagcatggttgccatacgcgcattaaacttttcaggatctttggatagatcttccaatctatctatttgagaaaacatttttatcatgttcaatagttgaaacgtcggatccactatatagatattatctataaagattttaggaactacgttcatggtatcctggcgaatattaaaactatcaatgatatgattatcgttttcatcttttatcaccatatagtttctaagatatgggattttacttaatataatattatttcccgtgataaattttattagaaaggccaaatctataagaaaagttctagaattagtctgaagaatatctatatcgccgtaccgtatatttggattaattagatatagagaatatgatccgtaacatatacaacttttattatggcgtctaagatattcttccatcaacttattaacatttttgactagggaagatacattatgacgtcccattacttttgccttgtctattactgcgacgttcatagaatttagcatatctcttgccaattcttccattgatgttacattataagaaattttagatgaaattacatttggagctttaatagtaagaactcctaatatgtccgtgtatgtggtcactaatacagattgtagttctataatcgtaaataatttacctatattatatgtttgagtctgtttagaaaagtagctaagtatacgatcttttatttctgatgcagatgtattaacatcggaaaaaaatctttttttattcttttttactaaagatacaaatatgtctttgttaaaaacagttattttttgaatatttctagcttgtaattttaacatatgatattcgttcacactaggtactctgcctaaataggtttctataatctttaatgtaatattaggaagagtattctgatcaggattcctattcattttgaggatttaaaactctgattattgtctaatatggtctctacgcaaactttttcacagagcgatagagtttttgataactcgtttttcttaagaaatataaaactactgtctccagagctcgctctatcttttattttatttaattcgatacaaactcctgatactggttcagaaagtaattcattaattttcagtcctttatagaagatatttaatatagataatacaaaattttcagttcttgatatcgatctgattgatcctagaactagatatattaataacgtgctcattaggcagtttatggcagcttgataattagatatagtatattccagttcatatttattagataccgcattgcccagattttgatattctatgaattcctctgaaaataaatccaaaataactaaacattctattttttgtggattagtgtactctcttccctctatcatgttcactactggtgtccacgatgataaatatctagagggaatataatatagtccataggatgccaatctagcaatgtcgaataactgtaatttgattcttcgttcttcattatgaattgattcttgaggtataaacctaacacaaattatattattagacttttcgtatgtaatgtctttcatgttataagtttttaatcctggaatagaatctattttaatgaggcttttaaacgcagagttctccaacgagtcaaagcataatactctgttgtttttcttatatacgatgttacgattttcttctttgaatggaataggtttttgaattagtttataattacaacataatagataaggaagtgtgcaaatagtacgcggaaaaaacataatagctcccctgttttcatccatggttttaagtaaatgatcactggcttctttagtcaatggatattcgaacattaaccgtttcatcatcattggacagaatccatatttcttaatgtaaagagtgatcaaatcattgtgtttattgtaccatcttgttgtaaatgtgtattcggttatcggatctgctcctttttctattaaagtatcgatgtcgatctcgtctaagaattcaactatatcgacatatttcatttgtatacacataaccattactaacgtagaatgtataggaagagatgtaacgggaacagggtttgttgattcgcaaactattctaatacataattcttctgttaatacgtcttgcacgtaatctattatagatgccaagatatctatataattattttgtaagatgatgttaactatgtgatctatataagtagtgtaataattcatgtatttcgatatatgttccaactctgtctttgtgatgtctagtttcgtaatatctatagcatcctcaaaaaatatattcgcatatattcccaagtcttcagttctatcttctaaaaaatcttcaacgtatggaatataataatctattttacctcttctgatatcattaatgatatagtttttgacactatcttctgtcaattgattcttattcactatatctaagaaacggatagcgtccctaggacgaactactgccattaatatctctattatagcttctggacataattcatctattataccagaattaatgggaactattccgtatctatctaacatagttttaagaaagtcagaatctaagacctgatgttcatatattggttcatacatgaaatgatctctattgatgatagtgactatttcattctctgaaaattggtaactcattctatatatgctttccttgttgatgaaggatagaatatactcaatagaatttgtaccaacaaactgttctcttatgaatcgtatatcatcatctgaaataatcatgtaaggcatacatttaacaattagagacttgtctcctgttatcaatatactattcttgtgataatttatgtgtgaggcaaatttgtccacgttctttaattttgttatagtagatatcaaatccaatggagctacagttcttggcttaaacagatatagtttttctggaacgaattctacaacattattataaaggactttgggtagataagtgggatgaaatcctattttaattaatgcgatagccttgtcctcgtgcagatatccaaacgcttttgtgatagtatggcattcattgtctagaaacgctctacgaatatctgtgacagatatcatctttagagaatatactagtcgcgttaatagtactacaatttgtattttttaatctatctcaataaaaaaattaatatgtatgattcaatgtataactaaactactaactgttattgataactagaatcagaatctaatgatgacgtaaccaagaagtttatctactgccaatttagctgcattatttttagcatctcgtttagattttccatctgccttatcgaatactcttccgtcgatgtctacacaggcataaaatgtaggagagttactaggccccactgattcaatacgaaaagaccaatctctcctagtaatttggcagtactcattaataacggtgacagggttagcacctttccaatcaataatttttttagccggaataacatcatcaaaagacttatgatcctctctcattgatttttcgcgggatacatcatctattatgacgtcagccatagcatcagcatccggcttatccgcctccgttgtcataaaccaacgaggaggaatatcgtcggagctgtacaccatagcactacgttgaagatcgtacagagctttattaacttctcgcttctccatattaagttgtctagttagttgtgcagcagtagctccttcgattccaatggttttaatagcctcacacacaatctctgcgttagaacgctcgtcgatatagattttagacatttttagagagaactaacgcaatcagtaataaaactaatttattttatcattttttttattcatcatcctctggtggttcgtcgtttctatcgaatgtagctctgattaacccgtcatctataggtgatgctggttctggagattctggaggagatggattattatctggaagaatctctgttatttccttgttttcatgtatcgattgcgttgtaacattaagattgcgaaatgctctaaatttgggaggcttaaagtgttgtttgcaatctctacacgcgtgtctaactagtggaggttcgtcagcggctctagtttgaatcatcatcggcgtagtattcctacttttacagttaggacacggtgtattgtatttctcgtcgagaacgttaaaataatcgttgtaactcacatcctttattttatctatattgtattctactcctttcttaatgcattttataccgaataagagatagcgaaggaattctttttcggtgccgctagtacccttaatcatatcacatagtgttttatattccaaatttgtggcaatagacggtttatttctatacgatagtttgtttctggaatcctttgagtattctataccaatattattctttgattcgaatttagtttcttcgatattagattttgtattacctatattcttgatgtagtactttgatgatttttccatggcccattctattaagtcttccaagttggcatcatccacatattgtgatagtaattctcggatatcagtagcggttaccgccattgatgtttgttcattggatgagtaactactaatgtatacattttccatttataacacttatgtattaactttgttcatttatattttttcattattatgttgatattaacaaaagtgaatatatatatgttaataattgtattgtggttatacggctacaattttataattagtgaaagtcagtgtccgatgatcaatgacgatagctttactctgaaaagaaagtatcaaatcgatagtgcggagtcaacaataaaaatggataagaagaggacaaagtttcagaatagagccaaaatggtaaaagaaataaatcagacaataagagcagcacaaactcattacgagacattgaaactaggatacataaaatttaagagaatgattaggactactactctagaagatatagcaccatctattccaaataatcagaaaacttataaactattctcggacatttcagccatcggcaaagcatcacggaatccaagtaagatggtatatgctctgctgctttacatgtttcccaatttgtttggagatgatcatagattcattcgttatagaatgcatccaatgagtaaaatcaaacacaagatcttctctcctttcaaacttaatcttattagaatattagtggaagaaagattctataataatgaatgcagatctaataaatggagaataattggaacacaagttgataaaatgttgatagctgaatctgataaatatacaatagatgcaaggtataacctaaaacccatgtatagaatcaagggaaaatctgaagaagataccctctttatcaaacagatggtagaacaatgtgtgacatcccaggaattggtggaaaaagtgttgaagatactgtttagagatttgttcaagagtggagaatacaaagcgtacagatacgatgatgatgtagaaaatggatttattggattggatacactaaaattaaacattgttcatgatatagttgaaccatgtatgcctgttcgtaggccagtggctaagatactgtgtaaagaaatggtaaataaatactttgagaatccgctacatattattggtaaaaatcttcaagagtgcattgactttgttagtgaataggcatttcatctttctccaatactaattcaaattgttaaattaataatggatagtataaatagttattagtgataaaatagtaaaaataattattagaataagagtgtagtatcatagataactctcttctataaaaatggattttattcgtagaaagtatcttatatacacagtagaaaataatatagattttttaaaggatgatacattaagtaaagtaaacaattttaccctcaatcatgtactagctctcaagtatctagttagcaattttcctcaacatgttattactaaggatgtattagctaataccaatttttttgttttcatacatatggtacgatgttgtaaagtgtacgaagcggttttacgacacgcatttgatgcacccacgttgtacgttaaagcattgactaagaattatttatcgtttagtaacacaatacaatcgtacaaggaaaccgtgcataaactaacacaagatgaaaaatttttagaggttgccaaatacatggacgaattaggagaacttataggcgtaaattatgacttagttcttaatccattatttcacggaggggaacccatcaaagatatggaaatcatttttttaaaactgtttaagaaaacagacttcaaagttgttaaaaaattaagtgttataagattacttatttgggcttacctaagcaagaaagatacaggcatagagtttgcggataatgatagacaagatatatatactctatttcaacaaactggtagaatcgtccatagcaatctaacagaaacgtttagagattatatctttcccggagataagactagctattgggtgtggttaaacgaaagtatagctaatgatgcggatattgttcttaatagacacgccattaccatgtatgataaaattcttagttatatatactctgagataaaacaaggacgcgttaataaaaacatgcttaagttagtttatatctttgagcctgaaaaagatatcagagaacttctgctagaaatcatatatgatattcctggagatatcctatctattattgatgcaaaaaacgacgattggaaaaaatattttattagtttttataaagctaattttattaacggtaatacatttattagtgatagaacgtttaacgaggacttattcagagttgttgttcaaatagatcccgaatatttcgataatgaacgaattatgtctttattctctacgagtgctgcggacattaaacgatttgatgagttagatattaataacagttatatatctaatataatttatgaggtgaacgatatcacattagatacaatggatgatatgaagaagtgtcaaatctttaacgaggatacgtcgtattatgttaaggaatacaatacatacctgtttttgcacgagtcggatcccatggtcatagagaacggaatactaaagaaactgtcatctataaaatccaagagtagacggctgaacttgtttagcaaaaacattttaaaatattatttagacggacaattggctcgtctaggtcttgtgttagatgattataaaggagacttgttagttaaaatgataaaccatcttaagtctgtggaggatgtatccgcattcgttcgattttctacagataaaaaccctagtattcttccatcgctaatcaaaactattttagctagttataatatttccatcatcgtcttatttcaaaggtttttaagagataatctatatcatgtagaagaattcttggataaaagcatccatctaaccaagacggataagaaatatatacttcaattgataagacacggtagatcatagaacagaccaaatatattattaataatttgtatatacatagatataattatcacatattaaaaattcacacatttttgataaatgggaactgctgcaacaattcagactcccaccaaattaatgaataaagaaaatgcagaaatgattttggaaaaaattgttgatcatatagttatgtatattagtgacgaatcaagtgattcagaaaataatcctgaatatattgattttcgtaacagatacgaagactatagatctctcattataaaaagtgatcacgagtttgtaaagctatgtaaaaatcatgcagagaaaagttctccagaaacgcaacaaatgattatcaaacacatatacgaacaatatcttattccagtatctgaagtactattaaaacctataatgtccatgggtgacataattacatataacggatgtaaagacaatgaatggatgctagaacaactctctaccctaaactttaacaatctccgcacatggaactcatgtagcataggcaatgtaacgcgtctgttttatacattttttagttatctgatgaaagataaactaaatatataagtataatcccattctaatactttaacctgatgtattagcatcttattagaatattaacctaactaaaagacataacataaaaactcattacatagttgataaaaagcggtaggatataaatattatggctgccaccgttccgcgttttgacgacgtgtacaaaaatgcacaaagaagaattctagatcaagaaacattttttagtagaggtctaagtagaccgttaatgaaaaacacatatctatttgataattacgcgtatggatggataccagaaactgcaatttggagtagtagatacgcaaacttagatgcaagtgactattatcccatttcgttgggattacttaaaaagttcgagtttctcatgtctctatataaaggtcctattccagtatacgaagaaaaagtaaatactgaattcattgctaatggatcgttctctggtagatacgtatcatatcttcgaaagttttctgctcttccaacaaacgagtttattagttttttgttactgacttccattccaatctataatatcttgttctggtttaaaaatactcagtttgatattactaaacacacattattcagatacgtctatacagataatgccaaacacctggcgttggctaggtatatgcatcaaacaggagactataagcctttgtttagtcgtctcaaagagaattatatatttaccggtcccgttccaataggtatcaaagatataaatcaccctaatcttagtagagcaagaagtccatccgattatgagacattagctaatattagtactatattgtactttaccaagtatgatccggtattaatgtttttattgttttacgtacctgggtattcaattactacaaaaattactccagccgtagaatatctaatggataaactgaatctaacaaagagcgacgtacaactgttgtaaattattttatgcttcgtaaaatgtaggttttgaaccaaacattctttcaaagaatgagatgcataaaactttattatccaatagattgactatttcggacgtcaatcgtttaaagtaaacttcgtaaaatattctttgatcactgccgagtttaaaacttctatcgataattgtttcatatgttttaatatttacaagttttttggtccatggtacattagccggacaaatatatgcaaaataatatcgttctccaagttctatagtttctggattatttttattatattcagtaaccaaatacatattagggttatctgcggatttataatttgagtgatgcattcgactcaacataaataattctagaggagacgatctactatcaaattcggatcgtaaatctgtttctaaagaacggagaatatctatacatacctgattagaattcatccgtccttcagacaacatctcagacagtctggtcttgtatgtcttaatcatattcttatgaaacttggaaacatctcttctagtttcactagtacctttattaattctctcaggtacagattttgaattcgacgatgccgagtatttcatcgttgtatatttcttcttcgattgcataatcagattcttatataccgcctcaaactctattttaaaattattaaacaatactctattattaatcagtcgttctaactcctttgctatttctatggacttatctacatcttgactgtctatctctgtaaacacggagtcggtatctccatacacgctacgaaaacgaaatctgtaatctataggcaacgatgttttcacaatcggattaatatctctatcgtccatataaaatggattacttaatggattggcaaaccgtaacataccgttagataactctgctccatttagtaccgattctagatacaagatcattctacgtcctatggatgtgcaactcttagccgaagcgtatgagtatagagcactatttctaaatcccatcagaccatatactgagttggctactatcttgtacgtatattgcatggaatcatagatggccttttcagttgaactggtagcctgttttaacatctttttatatctggctctctctgccaaaaatgttcttaatagtctaggaatggttccttctatcgatctatcgaaaattgctatttcagagatgaggttcggtagtctaggttcacaatgaaccgtaatatatctaggaggtggatatttctgaagcaagagctgattatttatttcttcttccaatctattggtactaacaacgacaccgactaatgtttccggagatagatttccaaagatacacacattaggatacagactgttataatcaaagattaatacattattactaaacattttttgttttggagcaaataccttaccgccttcataaggaaacttttgttttgtttctgatctaactaagatagttttagtttccaacaatagctttaacagtggacccttgatgactgtactcgctctatattcgaataccatggattgaggaagcacatatgttgacgcacccgcgtctgtttttgtttctactccataatactcccacaaatactgacacaaacaagcatcatgaatacagtatctagccatatctaaagctatgtttagattataatccttatacatctgagctaaatcaacgtcatcctttccgaaagataatttatatgtatcattaggtaaagtaggacataatagtacgactttaaatccattttcccaaatatctttacgaattactttacatataatatcctcatcaacagtcacataattacctgtggttaaaacctttgcaaatgcagcggctttgcctttcgcgtccgtagtatcgtcaccgatgaacgtcatttctctaactcctctatttaatactttacccatgcaactgaacgcgttcttggatatagaatccaatttgtacgaatccaatttttcagatttttgaatgaatgaatatagatcgaaaaatatagttccattattgttattaacgtgaaacgtagtattggccatgccgcctactcccttatgactagactgatttctctcataaatacagagatgtacagcttcctttttgtccggagatctaaagataatcttctctcctgttaataactctagacgattagtaatatatctcagatcaaagttatgtccgttaaaggtaacgacatagtcgaacgttagttccaacaattgtttagctattcgtaacaaaactatttcagaacataaaactagttctcgttcgtaatccatttccattagtgactgtatcctcaaacatcctctatcgacggcttcttgtatttcctgttccgttaacatctcttcattaatgagcgtaaacaataatcgtttaccacttaaatcgatataacagtaacttgtatgcgagattgggttaataaatacagaaggaaacttcttatcgaagtgacactctatatctagaaataagtacgatcttgggatatcgaatctaggtatttttttagcgaaacagttacgtggatcgtcacaatgataacatccattgttaatctttgtcaaatattgctcgtccaacgagtaacatccgtctggagatatcccgttagaaatataaaaccaactaatattgagaaattcatccatggtggcattttgtatgctgcgtttctttggctcttctatcaaccacatatctgcgacggagcattttctatctttaatatctagattataacttattgtctcgtcaatgtctatagttctcatctttcccaacggcctcgcattaaatggaggaggagacaatgactgatatatttcgtccgtcactacgtaataaaagtaatgaggaaatcgtataaatacggtctcaccatttcgacatctggatttcagatataaaaatctgttttcaccgtgactttcaaaccaattaatgcaccgaacatccatttatagaatttagaaatatattttcatttaaatgaatcccaaacattggggaagagccgtatggaccattatttttatagtactttcgcaagcgggtttagacggcaacatagaagcgtgtaaacgaaaactatatactatagttagcactcttccatgtcctgcatgtagacggcacgcgactatcgctatagaggacaataatgtcatgtctagcgatgatctgaattatatttattattttttcatcagattatttaacaatttggcatctgatcccaaatacgcgatcgatgtgacaaaggttaaccctttataaacttaacccattataaaacttatgattagtcacgactgaaataaccgcgtgattattttttggtataattctacacggcatggtttctgtgactatgaattcaacccccgttacattagtgaaatctttaacaaacagcaagggttcgtcaaagacataaaactcattgtttacaatcgaaatagaccccctatcacacttaaaataaaaaatatccttatcctttaccaccaaataaaattctgattggtcaatgtgaatgtattcacttaacagttccacaaatttatttattaactccgaggcacatacatcgtcggtattttttatggcaaactttactcttccagcatccgtttctaaaaaaatattaacgagttccatttatatcatccaatattattgaaatgacgttgatggacaaatgatacaaataagaaggtacggtacctttgtccaccatctcctccaattcatgctctattttgtcattaactttaatgtatgaaaacagtacgccacatgcttccatgacagtgtgtaacactttggatacaaaatgtttgacattagtataattgttcaagactgtcaatctataatagatagtagctataatatattctatgatggtattgaagaagatgacaaccttggcatattgatcatttaacacagacatggtatcaacagatagcttgaatgaaagagaatcagtaattggaataagcgtcttctcgatggagtgtccgtataccaacatgtctgatattttgatgtattccattaaattatttagttttttctttttattctcgttaaacagcatttctgtcaacggaccccaacatcgttgaccgattaagttttgattgatttttccgtgtaaggcgtatctagtcagatcgtatagcctatccaataatccatcgtctgtgtgtagatcacatcgtacactttttaattctctatagaagagcgacagacatctggagcaattacagacagcaatttctttattctctacagatgtaagatacttgaagacattcctatgatgatgcagaattttggataacacggtattgatggtatctgttaccataattcctttgatggctgatagtgtcagagcacaagatttccaatctttgacaatttttagcaccattatctttgttttgatatctatatcagacagcatggtgcgtctgacaacacaaggattaagacggaaagatgaaatgattctctcaacatcttcaatggataccttgctattttttctggcattatctatatgtgcgagaatatcctctagagaatcagtatcctttttgatgatagtggatctcaatgacatgggacgtctaaaccttcttattctatcaccagattgcatggtgatttgtcttctttcttttatcataatgtaatctctaaattcatcggcaaattgtctatatctaaaatcataatatgagatgtttacctctacaaatatctgttcgtccaatgttagagtatttacatcagttttgtattccaaattaaacatggcaacggatttaattttatattcctctattaagtcctcgtcgataataacagaatgtagataatcatttaatccatcgtacatggttggaagatgctcgttgacaaaatctttaattgtcttgatgaaggtgggactatatctaacatcttgattaataaaatttataacattgtccataggatactttgtaactagttttatacacatctcttcatcggtaagtttagacagaatatcgtgaacaggtggtatattatattcatcagatatacgaagaacaatgtccaaatctatattgtttaatatattatatagatgtagtgtagctcctacaggaatatctttaactaagtcaatgatttcatcaaccgttagatctattttaaagttaatcatataggcattgatttttaaaaggtatgtagccttgactacattctcattaattaaccattccaagtcactgtgtgtaagaagattatattctatcataagcttgactacatttggtcccgataccattaaagaattcttatgatataaggaaacagattttaggtactcatctactctacaagaattttggagagccttaacgatatcagtgacgtttattatttcaggaggaaaaaacctaacattgagaatatcggaattaatagcttccagatacagtgattttggcaatagtccgtgtaatccataatccagtaacacgagctggtgcttgctagacaccttttcaatgtttaatttttttgaaataagctttgataaagccttcctcgcaaattccggatacatgaacatgtcggcgacatgattaagtattgttttttcattatttttatattttctcaacaagttctcaataccccaatagatgatagaatatcacccaatgcgtccatgttgtctatttccaacaggtcgctatatccaccaatagaagttttcccaaaaaagattctaggaacagttctaccaccagtaatttgttcaaaatagtcacgcaattcattttcgggtttaaattctttaatatcgacaatttcatacgctcctcttttgaaactaaacttatttagaatatccagtgcatttctacaaaaaggacatgtatacttgacaaaaattgtcactttgttattggccaacctttgttgtacaaattcctcggccattttaatatttaagtgatataaaactatctcgacttatttaactctttagtcgagatatatggacgcagatagctatatgatagccaactacagaaggcaaacgctataaaaaacataattacgacgagcatatttataaatatttttattcagcattacttgatatagtaatattaggcacagtcaaacattcaaccactctcgatacattaactctctcattttctttaacaaattctgcaatatcttcgtaaaaagattcttgaaactttttagaatatctatcgactctagatgaaatagcgttcgtcaacatactatgttttgtatacataaaggcgcccattttaacagtttctagtgacaaaatgctagcgatcctaggatcctttagaatcacatagattgacgattcgtctctcttagtaactctagtaaaataatcatacaatctagtacgcgaaataatattatccttgacttgaggagatctaaacaatctagttttgagaacatcgataagttcatcgggaatgacatacatactatctttaatagaactcttttcatccagttgaatggattcgtccttaaccaactgattaatgagatcttctattttatcattttccagatgatatgtatgtccattaaagttaaattgtgtagcgcttctttttagtctagcagccaatactttaacatcactaatatcgatatacaaaggagatgatttatctatggtattaagaattcgtttttcgacatctgtcaaaaccaattcctttttgcctgtatcatccagttttccatcctttgtaaagaaattattttctactagactattaataagactgataaggattcctccataattgcacaatccaaactttttcacaaaactagactttacaagatctacaggaatgcgtacttcaggtttcttagcttgtgattttttcttttgtggacattttcttgtgaccaactcatctaccatttcattgattttagcagtgaaataagctttcaatgcacgggcactgatactattgaaaacgagttgatcttcaaattccgccatttaagttcaccaaacaacttttaaatacaaatatatcaatagtagtagaataagaactataaaaaaaataataattaaccaataccaaccccaacaaccggtattattagttgatgtgactgttttctcatcacttagaacagatttaacaatttctataaagtctgtcaaatcatcttccggagaccccataaatacaccaaatatagcggcgtacaacttatccatttatacattgaatattggcttttctttatcgctatcttcatcatattcatcatcaatatcaacaagtcccagattacgagccagatcttcttctacattttcagtcattgatacacgttcactatctccagagagtccgataacgttagccaccacttctctatcaatgattagtttcttgagtgcgaatgtaatttttgtttccgttccggatctatagaaaactacaggtgtgataattgccttggccaattgtctttctcttttactgagtgattctagttcaccttctatagatctgagaatggatgattctccagtcgaaacatattctaccatggctccgtttaatttgttgatgaagatggattcatccttaaatgttttctctgtaatagtttccaccgaaagactatgcaaagaatttggaatgcgttccttgtgcttaatgtttccatagacggcttctagaagttgatacaacataggactagccgcggtaacttttatttttagaaagtatccatcgcttctatcttgtttagatttatttttataaagtttagtctctccttccaacataataaaagtggaagtcatttgactagataaactatcagtaagttttatagagatagacgaacaattagcgtattgagaagcatttagtgtaacgtattcgatacattttgcattagatttactaatcgattttgcatactctataacacccgcacaagtctgtagagaatcgctagatgcagtaggtcttggtgaagtttcaactctcttcttgattaccttactcatgattaaacctaaataattgtactttgtaatataatgatatatattttcactttatctcatttgagaataaaaatgtttttgtttaaccactgcatgatgtacagatttcggaatcacaaaccaccggtggttttattttatccttgtccaatgtgaattgaatgggagcggatgcgggtttcgtacgtagatagtacattcccgtttttagaccgagactccatccgtaaaaatgcatactcgttagtttggaataactcggatctgctatatggatattcatagattgactttgatcgatgaaggctcccctgtctgcagccatttttatgatcgtcttttgtggaatttcccaaatagttttataaactcgcttaatatcttctggaaggtttgtattctgaatggatccaccatctgccataatcctattcttgatctcatcattccataattttctctcggttaaaactctaaggagatgcggattaactacttgaaattctccagacaatactctccgagtgtaaatattactggtatacggttccaccgactcattatttcccaaaatttgagcagttgatgcagtcggcataggtgccaccaataaactatttctaagaccgtatgttctgattttatcttttagaggttcccaattccaaagatccgacggtacaacattccaaagatcatattgtagaataccgttactggcgtacgatcctacatatgtatcgtatggtccttccttctcagctagttcacaactcgcctctaatgcaccgtaataaatggtttcgaagatcttcttatttagatcttgtgcttccaggctatcaaatggataatttaagagaataaacgcgtccgctaatccttgaacaccaataccgataggtctatgtctcttattagagatttcagcttctggaataggataataattaatatctataattttattgagatttctgacaattactttgaccacatccttcagtttgagaaaatcaaatcgcccatctattacaaacatgttcaaggcaacagatgccagattacaaacggctacctcattagcatccgcatattgtattatctcagtgcaaagattactacacttgatagttcctaaattttgttgattactctttttgttacacgcatccttataaagaatgaatggagtaccagtttcaatctgagattctataatcgctttccagacgactcgagcctttattatagatttgtatctcctttctctttcgtatagtgtatacaatcgttcgaactcgtctccccaaacattgtccaatccaggacattcatccggacacatcaacgaccactctccgtcatccttcactcgtttcataaagagatcaggaatccaaagagctataaatagatctctggttctatgttcctcgtttcctgtattctttttaagatcgaggaacgccataatatcagaatgccacggttccaagtatatggccataactccaggccgtttgtttcctccctgatctatgtatctagcggtgttattataaactctcaacattggaataataccgtttgatataccattggtaccggagatatagcttccactggcacgaatattactaattgatagacctattccccctgccattttagagattaatgcgcatcgttttaacgtgtcatagataccctctatgctatcatcgatcatgttaagtagaaaacagctagacatttggtgacgactagttcccgcattaaataaggtaggagaagcgtgcgtaaaccatttttcagaaagtagattgtacgtctcaatagctgagtctatatcccattgatgaattcctactgcgacacgcattaacatgtgctgaggtctttcaacgatcttgttgtttattttcaacaagtaggatttttccaaagttttaaaaccaaaatagttgtatgaaaagtctcgttcgtaaataataaccgagttgagtttatccttatatttgttaactatatccatggtgatacttgaaataatcggagaatgtttcccatttttaggattaacatagttgaataaatcctccatcacttcactaaatagtttttttgtttccttgtgtagatttgatacggctattctggcggctagaatggcataatccggatgttgtgtagtacaagtggctgctatttcggctgccagagtgtccaattctaccgttgttactccattatatattccttgaataaccttcatagctattttaataggatctatatgatccgtgtttaagccataacataattttctaatacgagacgtgattttatcaaacatgacattttccttgtatccatttcgtttaatgacaaacatttttgttggtgtaataaaaaaattatttaacttttcattaatagggatttgacgtacgtagcgtacaaaatgattgttcctggtatatagataaagagtcctatatatttgaaaatcgttacggctcgattaaactttaatgattgcatagtgaatatatcattaggatttaactccttgactatcagggcggcaccagaaattaccatcaaaagcattaatacagttatgcctatcgcagttagaacggttatagcatccaccatttatatctaaaaattagatcaaagaatatgtgacaaagtcctagttgtatattgagaattgacaaaacaatgtttcttacatattttttttttattagtaaccgacttaatagtaggaactggaaaactagacttgattattctataagtatagatacccttccaaataatattctctttgataaaagttccagaaaatgtagaattttttaaaaagttatcttttgctattaccaagattgtgtttagacgcttattattaatatgagtgatgaaatccacaccgcctctagatatcgcctttatttccacattagatggtaaatccaatagtgaaactatctttttaggaatgtatggactcgcgtttagaggagtgaacgtcttgggcgtcggaaaggatgattcgtcaaacgaataaacaatttcacaaatggatgttaatgtattagtaggaaattttttgacgctagtggaattgaaaattctaatggatgatgttctacctatttcatccgataacatgttaatttccgacaccaacggttttaatatttcgatgatatacggtagtctctctttcggacttatatagcttattccacaatacgagtcattatatactccaaaaaacaaaataactagtataaaatctgtatcgaatgggaaaaacgaaattatcgacataggtatagaatccggaacattgaacgtattaatacttaattctttttctgtggtaagtaccgataggttattgacattgtatggttttaaatattctataacttgagacttgatagatattagtgatgaattgaaaattatttttatcaccacgtgtgtttcaggatcatcgtcgacgcccgtcaaccaaccgaacggagtaaaataaatatcattaatatatgctctagatattagtatttttatcaatcctttgattatcatcttctcgtaggcgaatgattccatgatcaagagtgatttaagaacatcctccggagtattaatgggcttagtaaacagtccatcgttgcaataataaaagttatccaagttaaaggatattatgcattcgtttaaagatatcacctcatctgacggagacaattttttggtaggttttagagactttgaagctacttgtttaacaaagttattcatcgtcgtttactattctatttaattttgtagttaatttatcacatatcacattaattgactttttggtccatttttccatacgtttatattcttttaatcctgcgttatccgtttccgttatatccagtgatagatcgtgcaggttaaatagaatgctcttaaataatgtcatttttttatccgctaaaaatttaaagaatgtataaacttttttcaaagatttaaaacttttaggtggtgtcctagtacacaatatcataaacaaactaataaacatcccgcattcagattccaacagctgattaacttccacattaatacagcctattttcgctccaaatgtacattcgaaaaatctgaataaaacatcaatgtcgcaatttgtattatccaatacagaatgtttgtgattcgtgttaaaaccatcggagaaggaatagaaataaaaattattatagtggtggaattcagttggaatattgcctccggagtcataaaaggatactaaacattgttttttatcataaattacacatttccaatgagacaaataacaaaatccaaacattacaaatctagaggtagaacttttaattttgtctttaagtatatacgataagatatgtttattcataaacgcgtcaaatttttcatgaatcgctaaggagtttaagaatctcatgtcaaattgtcctatataatccacttcggatccataagcaaactgagagactaagttcttaatacttcgattgctcatccaggctcctctctcaggctctattttcatcttgacgacctttggattttcaccagtatgtattcctttacgtgataaatcatcgattttcaaatccatttgtgagaagtctatcgccttagatactttttcccgtagtcgaggtttaaagaaatacgctaacggtatactagtaggtaactcaaaaacatcatatatagaatggtaacgcgtctttaactcgtcggttaactctttcttttgatcgagttcgtcgctactattgggtctgctcaggtgccccgactctactagttccaacatcataccgataggaatacaagacactttgccggcggttgtagatttatcatatttttccactacatatccgttacaatttgttaaaaatttagatacatctatattgctacataatccagctagtgaatatatatgacataataaattggtaaatcctagttctggtattttactaattactaaatctgtatatctttccatttatcatggaaaagaatttaccagatatcttcttttttccaaactgcgttaatgtattctcttacaaatattcacaagatgaattcagtaatatgagtaaaacggaacgtgatagtttctcattggccgtgtttccagttataaaacatagatggcataacgcacacgttgtaaaacataaaggaatatacaaagttagtacagaagcacgtggaaaaaaagtatctcctccatcactaggaaaacccgcacacataaacctaaccgcgaagcaatatatatacagtgaacacacaataagctttgaatgttatagttttctaaaatgtataacaaatacagaaatcaattcgttcgatgagtatatattaagaggactattagaagctggtaatagtttacagatattttccaattccgtaggtaaacgaacagatactataggtgtactagggaataagtatccatttagcaaaattccattggcctcattaactcctaaagcacaacgagagatattttcagcgtggatttctcatagacctgtagttttaactggaggaactggagtgggtaagacgtcacaggtacccaagttattgctttggtttaattatttatttggtggattctctactctagataaaatcactaactttcacgaaagaccagtcattctatctcttcctaggatagctttagttagattgcatagcaataccattttaaaatcattgggatttaaggtactagatggatctcctatttctttacggtacggatctataccggaagaattaataaacaaacaaccaaaaaaatatggaattgtattttctacccataagttatctctaacaaaactatttagttatggcactcttattatagacgaagttcatgagcatgatcaaataggagatattattatagcagtagcgagaaagcatcatacgaaaatagattctatgtttttaatgactgccacgttagaggatgaccgagaacggctaaaagtatttttacctaatcccgcatttatacatattcctggagatacactgtttaaaattagcgaggtatttattcataataagataaatccatcttccagaatggcatacatagaagaagaaaagagaaatttagttactgctatacagatgtatactcctcctgatggatcatccggtatagtctttgtggcatccgttgcacagtgtcacgaatataaatcatatttagaaaaaagattaccgtatgatatgtatattattcatggtaaggtcttagatatagacgaaatattagaaaaagtgtattcatcacctaatgtatcgataattatttctactccttatttggaatccagcgttactatacgcaatgttacacacatttatgatatgggtaaagtttttgtccccgctccttttggaggatcgcaagaatttatttctaaatctatgagagatcaacgaaaaggaagagtaggaagagttaatcctggtacatacgtctatttctatgatctgtcttatatgaagtctatacagcgaatagattcagaatttctacataattatatattgtacgctaataagtttaatctaacactccccgaagatttgtttataatccctacaaatttggatattctatggcgtacaaaggaatatatagactcgttcgatattagtacagaaacatggaataaattattatccaattattatatgaagatgatagagtatgctaaactttatgtactaagtcctattctcgctgaggagttggataactttgagaggacgggagaattaactagtattgtacgagaagccattttatctctaaatttacgaattaagattttaaattttaaacataaagatgatgatacgtatatacacttttgtaaaatattattcggtgtctataacggaacaaacgctactatatattatcatagacctctaacgggatatatgaatatgatttcagatactatatttgttcctgtagataataactaaaaatcaaactctaatgaccacatctttttttagagatgaaaaattttctacatctccttttgtagacacgactaaacattttgcaaaaaaaagtttattagtgtttagataatcgtatacttcatcagtgtagatagtaaatgtgaacaaataaaaggtattcttactcaatagattggtaaattccatagaatatattaatcctttcttcttgagatcccacatcatttcaaccagagacgttttatccaatgatttacctcgtactataccacatacaaaactagattttgcagtgacgtcgtacctggtattcctaccaaacaaaattttacttttagttcttttagaaaattctaaggtagaatctctatttgccaatatgtcatctatggaattaccactagcaaaaaatgatagaaatatatattgatacatcgcagctggttttgatctactatactttaaaaacgaatcagattccataattgcctgtatatcatcagctgaaaaactatgttttacacgtattccttcggcatttctttttaatgatatatcttgtttagacaatgataaagttatcatgtccatgagagacgcgtctccgtatcgtataaatatttcattagatgttagacgcttcattaggggtatacttctataaggtttcttaatcagtccatcattggttgcgtcaagaactactatcggatgttgttgggtatctctagtgttacacatggccttactaaagtttgggtaaataactatgatatctctattaattatagatgcatatatttcattcgtcaaggatattagtatcgacttgctatcgtcattaatacgtgtaatgtaatcatataaatcatgcgatagccaaggaaaattcaaatagatgttcatcatataatcgtcgctataattcatattaatacgttgacattgactaatttgtaatatagcctcgccacgaagaaagctctcgtattcagtttcatcgataaaggataccgttaaatataactggttgccgatagtctcatagtctattaagtggtaagtttcgtacaaatacagaatccctaaaatattatctaatgttggattaatctttaccataactgtataaaatggagacggagtcataactattttaccgtttgtacttactggaatagacgaaggaataatctccggacatgctggtaaagacccaaatgtctgtttgaagaaatccaatgttccaggtcctaatctcttaacaaaaattacgatattcgatcccgatatcctttgcattctatttaccagcatatcacgaactatattaagattatctatcatgtctattctcccaccgttatataaatcgcctccgctaagaaacgttagtatatccatacaatggaatacttcatttctaaaatagtattcgttttctaattctttaatgtgaaatcgtatactagaaagggaaaaattatctttgagttttccgttagaaaagaaccacgaaactaatgttctgattgcgtccgattccgttgctgaattaatggatttacaccaaaaactcatataacttctagatgtagaagcattcgctaaaaaattagtagaatcaaaggatataagtagatgttccaacaagtgagcaattcccaagatttcatctatatcattctcgaatccgaaattagaaattcccaagtagatatcctttttcatccgatcgttgatgaaaatacgaactttattcggtaagacaatcatttactaaggagtaaaataggaagtaatgttcgtatgtcgttatcatcgtataaattaaaggtgtgttttttaccattaagtgacattataattttaccaatattggaattataatataggtgtatttgcgcactcgcgacggttgatgcatcggtaaatatagctgtatctaatgttctagtcggtatttcatcatttcgctgtctaataatagcgttttctctatctgtttccattacagctgcctgaagtttattggtcggataatatgtaaaataataagaaatacatacgaataacaaaaataaaataagatataataaagatgccatttagagatctaattttgttcaacttgtccaaattcctacttacagaagatgaggaatcgttggagatagtgtcttccttatgtagaggatttgaaatatcttatgatgacttgataacttactttccagataggaaataccataaatatatttctaaagtatttgaacatgtagatttatcggaggaattaagtatggaattccatgatacaactttgcgagatttagtctatcttagattgtacaagtattccaagtgtatacggccgtgttataaattaggagataatctaaaaggcatagttgttataaaggacaggaatatttatattagggaagcaaatgatgacttgatagaatatctcctcaaggaatacactcctcagatttatacatattctaatgagcgcgtccccataactggttcaaaattaattctttgtggattttctcaagttacatttatggcgtatacaacgtcgcatataacaacaaataaaaaggtagatgttctcgtttccaaaaaatgtatagatgaactagtcgatccaataaattatcaaatacttcaaaatttatttgataaaggaagcggaacaataaacaaaatactcaggaagatattttattcggtaacaggtggccaaactccataggtagctttttctatttcggattttagaatttccaaattcaccagcgatttatctgttttggtgaaatccaaggatttattaatgtccacaaatgccatttgttttgtctgtggattgtatttgaaaatggaaacgatgtagttagatagatgcgctgcgaagtttcctattagggttccgcgcttcacgtcacccagcatacttgaatcaccatcctttaaaaaaaatgataagatatcaacatggagtatatcatactcggattttaattcttctactgcatcactgacattttcacaaatactacaatacggtttaccgaaaataatcagtacgttcttcatttatgggtatcaaaaacttaaaatcgttactgctggaaaataaatcactgacgatattagatgataatttatacaaagtatacaatggaatatttgtggatacaatgagtatttatatagccgtcgccaattgtgtcagaaacttagaagagttaactacggtattcataaaatacgtaaacggatgggtaaaaaagggagggcatgtaaccctttttatcgatagaggaagtataaaaattaaacaagacgttagagacaagagacgtaaatattctaaattaaccaaggacagaaaaatgctagaattagaaaagtgtacatccgaaatacaaaatgttaccggatttatggaagaagaaataaaggcagaaatgcaattaaaaatcgataaactcacatttcaaatatatttatctgattctgataacataaaaatatcattgaatgagatactaacacatttcaacaataatgagaatgttacattattttattgtgatgaacgagacgcagaattcgttatgtgtctcgaggctaaaacacatttctctaccacaggagaatggccgttgataataagtaccgatcaggatactatgctatttgcatctgctgataatcatcctaagatgataaaaaacttaactcaactgtttaaatatgttccatctgcagaggataactatttagcaaaattaacggcgttagtgaatggatgtgatttctttcctggactctatggggcatctataacacccaacaacttaaacaaaatacaattgtttagtgattttacaatcgataatatagtcactagtttggcaattaaaaattattatagaaagactaactctaccgtagacgtgcgtaatattgttacgtttataaacgattacgctaatttagacgatgtctactcgtatattcctccttgtcaatgcactgttcaagaatttatattttccgcattagatgaaaaatggaatgaatttaaatcatcttatttagaaagcgtgccgttaccctgccaattaatgtatgcgttagaaccacgcaaggagattgatgtttcagaagttaaaactttatcatcttatatagatttcgaaaatactaaatcagatatcgatgttataaaatctatatcctcgatcttcggatattctaacgaaaactgtaacacgatagtattcggcatctataaggataatttactactgagtataaatagttcattttactttaacgatagtctgttaataaccaatactaaaagtgataatataataaatataggttactagattaaaaatggtgttccaactcgtgtgctctacgtgcggcaaagatatttctcacgaacgatataaattgattatacgaaaaaaatcattaaaggatgtactcgtcagtgtaaagaacgaatgttgtaggttaaaattatctacacaaatagaacctcaacgtaacttaacagtgcaacctctattggatataaactaatatggatccggttaattttatcaagacatatgcgcctagaggttctattatttttattaattataccatgtcattaacaagtcatttgaatccatcgatagaaaaacatgtgggtatttattatggtacgttattatcggaacacttggtagttgaatcaacatatagaaaaggagttcgaatagtcccattggatagtttttttgaaggatatcttagtgcaaaagtatacatgttagagaatattcaagttatgaaaatagcagctgatacgtcattaactttattgggtattccgtatggatttggtcatgatagaatgtattgttttaaattggtagctgactgttataaaaatgccggtattgatacatcgtctaaacgaatattaggtaaagatatttttctgagccaaaacttcacagacgataatagatggataaagatatatgattctaataatttaacattttggcaaattgattaccttaaagggtgagttaatatgcataactactcctccgttgttttttccctcgttctttttcttaacgttgtttgccatcactctcataatgtaaagatattctaaaatggtaaacttttgcatatcggacgcagaaattggtataaatgttgtaattgtattatttcccgtcaatggactagtcacagctccatcagttttatatcctttagagtatttctcactcgtgtctaacattctagagcattccatgatctgtttatcgttgatattggccggaaagatagattttttattttttattatattactattggcaattgtagatataacttctggtaaatatttttctaccttttcaatctcttctattttcaagccggctatatattctgctatattgttgctagtatcaataccttttctggctaagaagtcatatgtggtattcactatatcagttttaactggtagttccattagcctttccacttctgcagaataatcagaaattggttctttaccagaaaatccagctactataataggctcaccgatgatcattggcaaaatcctatattgtaccagattaatgagagcatatttcatttccaataattctgctagttcttgagacattgatttatttgatgaatctagttggttctctagatactctaccatttctgccgcatacaataacttgttagataaaatcagggttatcaaagtgtttagcgtggctagaatagtgggcttgcatgtattaaagaatgcggtagtatgagtaaaccgttttaacgaattatatagtctccagaaatctgtggcgttacatacatgagccgaatgacatcgaagattgtccaatatttttaatagctgctctttgtccattatttctatatttgactcgcaacaattgtagataccattaatcaccgattcctttttcgatgccggacaatagcacaattgtttagctttggactctatgtattcagaattaatagatatatctcttaatacagattgcactatacattttgaaactatgtcaaaaattgtagaacgacgctgttctgcagccatttaactttaaataatttacaaaaatttaaaatgagcatccgtataaaaatcgataaactgcgccaaattgtggcatatttttcagagttcagtgaagaagtatctataaatgtagactcgacggatgagttaatgtatatttttgccgccttgggcggatctgtaaacatttgggccattatacctctcagtgcatcagtgttctaccgcggagccgaaaatattgtgtttaatcttcctgtgtccaaggtaaaatcgtgtttgtgtagttttcacaatgatgccatcatagatatagaacctgatctggaaaataatctagtaaaactttctagttatcatgtagtaagtgtcgattgtaataaggaactgatgcctattaggacagatactactatttgtctaagtatagatcaaaagaaatcttacgtgtttaattttcacaagtatgaagaaaaatgttgtggtagaaccgtcattcatttagaatggttgttgggctttatcaagtgtattagtcagcatcagcatttggctattatgtttaaagatgacaatattattatgaagactcctggtaatactgatgcattttccagggaatattctatgactgaatgttctcaagaactacaaaagttttctttcaaaatagctatctcgtctctcaacaaactacgaggattcaaaaagagagtcaatgtttttgaaactagaatcgtaatggataatgacgataacattttaggaatgttgttttcggatagagttcaatcctttaagatcaacatctttatggcgtttttagattaatactttcaatgagataaatatgggtggcggagtaagtgttgagctccctaaacgggatccgcctccgggagtacccactgatgagatgttattaaacgtggataaaatgcatgacgtgatagctcccgctaagcttttagaatatgtgcatataggaccactagcaaaagataaagaggataaagtaaagaaaagatatccagagtttagattagtcaacacaggacccggtggtctttcggcattgttaagacaatcgtataatggaaccgcacccaattgctgtcgcacttttaatcgtactcattattggaagaaggatggaaagatatcagataagtatgaagagggtgcagtattagaatcgtgttggccagacgttcacgacaccggaaaatgcgatgttgatttattcgactggtgtcagggggatacgttcgatagaaacatatgccatcagtggatcggttcagcctttaataggagtaatagaactgtagagggtcaacaatcgttaataaatctgtataataagatgcaaacattatgtagtaaagatgctagtgtaccaatatgtgaatcatttttgcatcatttacgcgcacacaatacagaagatagcaaagagatgatcgattatattctaagacaacagtctgcggactttaaacagaaatatatgagatgtagttatcccactagagataagttagaagagtcattaaaatatgcggaacctcgagaatgttgggatccagagtgttcgaatgccaatgttaatttcttgctaacacgtaattataataatttaggactttgcaatattgtacgatgtaatactagcgtgaacaacttacagatggataaaacttcctcattaagattgtcatgtggattaagcaatagtgatagattttctactgttcccgtcaatagagcaaaagtagttcaacataatattaaacactcgttcgacctaaaattgcatttgatcagtttattatctctcttggtaatatggatactaattgtagctatttaaatgggtgccgcggcaagcatacagacgacggtgaatacactcagcgaacgtatctcgtctaaattagaacaagaagcgaatgctagtgctcaaacaaaatgtgatatagaaatcggaaatttttatatccgacaaaaccatggatgtaacctcactgttaaaaatatgtgctctgcggacgcggatgctcagttggatgctgtgttatcagccgctacagaaacatatagtggattaacaccggaacaaaaagcatacgtgccagctatgtttactgctgcgttaaacattcagacgagtgtaaacactgttgttagagattttgaaaattatgtgaaacagacttgtaattctagcgcggtcgtcgataacaaattaaagatacaaaacgtaatcatagatgaatgttacggagccccaggatctccaacaaatttggaatttattaatacaggatctagcaaaggaaattgtgccattaaggcgttgatgcaattgacgactaaggccactactcaaatagcacctaaacaagttgctggtacaggagttcagttttatatgattgttatcggtgttataatattggcagcgttgtttatgtactatgccaagcgtatgttgttcacatccaccaatgataaaatcaaacttattttagccaataaggaaaacgtccattggactacttacatggacacattctttagaacttctccgatggttattgctaccacggatatgcaaaactgaaaatatattgataatattttaatagattaacatggaagttatcactgatcgtctagacgatatagtgaaacaaaatatagcggatgaaaaatttgtagattttgttatacacggtctagagcatcaatgtcctgctatacttcgaccattaattaggttgtttattgatatactattatttgttatagtaatttatatttttacggtacgtctagtaagtagaaattatcaaatgttgttggcgttggtggcgctagtcatcacattaactattttttattactttatactataatagtactagactgacttctaacaaacatctcacctgccataaataaatgcttgatattaaagtcttctatttctaacactattccatctgtggaaaataatactctgacattatcgctaattgacacatcggtgagtgatatgcctataaagtaataatcttctttgggcacatataccagtgtaccaggttctaacaacctatttactggtgctcctatagcatactttttctttaccttgagaatatccatcgtttgcttggtcaatagcgatatgtgattttttatcaaccactcgaaaaagtaattggagtgttcatatcctctacgggctattgtctcatggccgtgtatgaaatttaagtaacacgactgtggtagatttgttctatagagccggttgccgcaaatagatagaactaccaatatgtctgtacaaatgttaaacattaattgattaacagaaaaaacaatgttcgttctgggaatagaaaccagatcaaaacaaaattcgttagaatatatgccacgtttatacattgaatataaaataactacagtttgaaaaataacagtatcatttaaacatttaacttgcggggttaatctcacaactttactgtttttgaactgttcaaaatatagcatagatccgtgagaaatacgtttagccgcctttaatagaggaaatcccaccgcctttctggatctcaccaacgacgatagttctgaccagcaactcatttcttcatcatccacctgttttaacatataataggcaggagatagatatccgtcattgcaatattccttctcgtaggcacacaatctaatattgataaaatctccattctcttctctgcatttattatcttgtttcggtggctgattaggctgtagtcttggtttaggctttggtatatcgttgttgaatctattttggtcattaaatctttcatttcttcctggtatatttttatcacctcgtttggttggatttttgtctatattatcgtttgtaacatcggtacgggtattcatttatcacaaaaaaaacttctctaaatgagtctactgctagaaaacctcatcgaagaagataccatattttttgcaggaagtatatctgagtatgatgatttacaaatggttattgccggcgcaaaatccaaatttccaagatctatgctttctatttttaatatagtacctagaacgatgtcaaaatatgagttggagttgattcataacgaaaatatcacaggagcaatgtttaccacaatgtataatataagaaacaatttgggtctaggagatgataaactaactattgaagccattgaaaactatttcttggatcctaacaatgaagttatgcctcttattattaataatacggatatgactgccgtcattcctaaaaaaagtggtaggagaaagaataagaacatggttatcttccgtcaaggatcatcacctatcttgtgtattttcgaaactcgtaaaaagattaatatttataaagaaaatatggaatccgcgtcgactgagtatacacctatcggagacaacaaggctttgatatctaaatatgcgggaattaatatcctaaatgtgtattctccttccacatccataagattgaatgccatttacggattcaccaataaaaataaactagagaaacttagtactaataaggaactagaatcgtatagttctagccctcttcaagaacccattaggttaaatgattttctgggactattggaatgtgttaaaaagaatattcctctaacagatattccgacaaaggattgattactataaatggagaatgttcctaatgtatactttaatcctgtgtttatagagcccacgtttaaacattctttattaagtgtttataaacacagattaatagttttatttgaagtattcgttgtattcattctaatatatgtattttttagatctgaattaaatatgttcttcatgcctaaacgaaaaatacccgatcctattgatagattacgacgtgctaatctagcgtgtgaagacgataaattaatgatctatggattaccatggatgacaactcaaacatctgcgttatcaataaatagtaaaccgatagtgtataaagattgtgcaaagcttttgcgatcaataaatggatcacaaccagtatctcttaacgatgttcttcgcagatgatgattcattttttaagtatttggctagtcaagatgatgaatcttcattatctgatatattgcaaatcactcaatatctagactttctgttattattattgatccaatcaaaaaataaattagaagccgtgggtcattgttatgaatctctttcagaggaatacagacaattgacaaaattcacagactttcaagattttaaaaaactgtttaacaaggtccctattgttacagatggaagggtcaaacttaataaaggatatttgttcgactttgtgattagtttgatgcgattcaaaaaagaatcctctctagctaccaccgcaatagatcctgttagatacatagatcctcgtcgcaatatcgcattttctaacgtgatggatatattaaagtcgaataaagtgaacaataattaattctttattgtcatcatgaacggcggacatattcagttgataatcggccccatgttttcaggtaaaagtacagaattaattagacgagttagacgttatcaaatagctcaatataaatgcgtgactataaaatattctaacgataatagatacggaacgggactatggacgcatgataagaataattttgaagcattggaagcaactaaactatgtgatgtcttggaatcaattacagatttctccgtgataggtatcgatgaaggacagttctttccagacattgttgaattctgtgagcgtatggcaaacgaaggaaaaatagttatagtagccgcactcgatgggacatttcaacgtaaaccgtttaataatattttgaatcttattccattatctgaaatggtggtaaaactaactgctgtgtgtatgaaatgctttaaggaggcttccttttctaaacgattgggtgaggaaaccgagatagaaataataggaggtaatgatatgtatcaatcggtgtgtagaaagtgttacatcgactcataatattatattttttatctaaaaaactaaaaataaacattgattaaattttaatataatacttaaaaatggatgttgtgtcgttagataaaccgtttatgtattttgaggaaattgataatgagttagattacgaaccagaaagtgcaaatgaggtcgcaaaaaaactgccgtatcaaggacagttaaaactattactaggagaattattttttcttagtaagttacagcgacacggtatattagatggtgccaccgtagtgtatataggatctgctcccggtacacatatacgttatttgagagatcatttctataatttaggagtgatcatcaaatggatgctaattgacggccgccatcatgatcctattttaaatggattgcgtgatgtgactctagtgactcggttcgttgatgaggaatatctacgatccatcaaaaaacaactgcatccttctaagattattttaatttctgatgtgagatccaaacgaggaggaaatgaacctagtacggcggatttactaagtaattacgctctacaaaatgtcatgattagtattttaaaccccgtggcgtctagtcttaaatggagatgcccgtttccagatcaatggatcaaggacttttatatcccacacggtaataaaatgttacaaccttttgctccttcatattcagctgaaatgagattattaagtatttataccggtgagaacatgagactgactcgagttaccaaatcagacgctgtaaattatgaaaaaaagatgtactaccttaataagatcgtccgtaacaaagtagttgttaactttgattatcctaatcaggaatatgactattttcacatgtactttatgctgaggaccgtgtactgcaataaaacatttcctactactaaagcaaaggtactatttctacaacaatctatatttcgtttcttaaatattccaacaacatcaactgaaaaagttagtcatgaaccaatacaacgtaaaatatctagcaaaaattctatgtctaaaaacagaaatagcaagagatccgtacgcagtaataaatagaaacgtactactgagatatactaccgatatagagtataatgatttagttactttaataaccgttagacataaaattgattctatgaaaactgtgtttcaggtatttaacgaatcatccataaattatactccggttgatgatgattatggagaaccaatcattataacatcgtatcttcaaaaaggtcataacaagtttcctgtaaattttctatacatagatgtggtaatatctgacttatttcctagctttgttagactagatactacagaaactaatatagttaatagtgtactacaaacaggcgatggtaaaaagactcttcgtcttcccaaaatgttagagacggaaatagttgtcaagattctctatcgccctaatataccattaaaaattgttagatttttccgcaataacatggtaactggagtagagatagccgatagatctgttatttcagtcgctgattaatcaattagtagagatgagataagaacattataataatcaataatatatcttatatctcgtttagaaaaatgctaatattaaaatagctaacgctagtaatccaatcggaagccatttgatatctataatagggtatctaatttcctgattcagatagcggacagctatattctcggtagctactcgtttggaatcacaaacattatttacatctaatttactatctgtaatggaaacgtttcccaatgaaatggtacaatccgatacattgcattttgttatatttttttttaaagaggctggtaacaacgcatcgcttcgtttacatggctcgtaccaacaataatagggtaatcttgtatctattcctatccgtactatgcttttatcaggataaatacatttacatcgtatatcgtctttgttagcatcacagaatgcataaatttgttcgtccgtcatgataaaaatttaaagtgtaaatataactattatttttatagttgtaataaaaagggaaatttgattgtataccttcggttctttaaaagaaactgacttgataaaaatggctgtaatctctaaggttacgtatagtctatatgatcaaaaagagattaatgctacagatattatcattagtcatgttaaaaatgacgacgatatcggtaccgttaaagatggtagactaggtgctatggatggggcattatgtaagacttgtgggaaaacggaattggaatgtttcggtcactggggtaaagtaagtatttataaaactcatatagttaagcctgaatttatttcagaaattattcgtttactgaatcatatatgtattcactgcggattattgcgttcacgagaaccgtattccgacgatattaacctaaaagagttatcgggacacgctcttaggagattaaaggataaaatattatccaagaaaaagtcatgttggaacagtgaatgtatgcaaccgtatcaaaaaattactttttcaaagaaaaaggtttgtttcgtcaacaagttggatgatattaacgttcctaattctctcatctatcaaaagttaatttctattcatgaaaagttttggccattattagaaattcatcaatatccagctaacttattttatacagactactttcccatccctccgttgattattagaccggctattagtttttggatagatagtatacccaaagaaaccaatgaattaacttacttattaggtatgatcgttaagaattgtaacttgaatgctgatgaacaggttatccagaaggcggtaatagaatacgatgatattaaaattatttctaataacacttccagtatcaatttatcatatattacatccggcaaaaataatatgattagaagttatatcgtcgcccgacgaaaagatcagacggctagatctgtaattggtcccagtacatctatcaccgttaatgaggtaggaatgcccgcatatattagaaatacacttacagaaaagatatttgttaatgcctttacagtggataaagttaaacaactattagcatcaaaccaagttaaattttactttaataaacgattaaaccaattaacaagaatacgccaaggaaagtttatcaaaaataaaatacatttattgcctggtgattgggtagaagtagctgttcaagaatatacaagtattatttttggaagacagccgtctctacatagatacaacgtcatcgcttcatctatcagagctaccgaaggagatactatcaaaatatctcccggaattgccaactctcaaaatgctgatttcgacggagatgaagaatggatgatattagaacaaaatcctaaagctgtaattgaacaaagtattcttatgtatccgacgacgttactcaaacacgatattcatggagcccccgtttatggatctattcaagatgaaatcgtagcagcgtattcattgtttaggatacaagatctttgtttagatgaagtattgaacatcttggggaaatatggaagagagttcgatcctaaaggtaaatgtaaattcagcggtaaagatatctatacttacttgataggtgaaaagattaattatccgggtctcttaaaggatggtgaaattattgcaaacgacgtagatagtaattttgttgtggctatgaggcatctgtcattggctggactcttatccgatcataagtcgaacgtggaaggtatcaactttattatcaagtcatcttatgtttttaagagatatctatctatttacggttttggggtgacattcaaagatctgagaccaaattcgacgttcactaataaattggaggccatcaacgtagaaaaaatagaacttatcaaagaagcatacgccaaatatctcaacgatgtaagagacgggaaaatagttccattatctaaagctttagaggcggactatgtggaatccatgttatccaacttgacaaatcttaatatccgagagatagaagaacatatgagacaaacgctgatagatgatccagataataacctcctgaaaatggccaaagcgggttataaagtaaatcctacagaactaatgtatattctaggtacgtatggacaacaaaggattgatggtgaaccagcagagactcgagtattgggtagagtcttaccttactatcttccagactctaaggatccagaaggaagaggttacattcttaattctttaacaaaaggattaacaggttctcaatattacttttcgatgctggttgcaagatctcaatctactgatatcgtctgtgaaacatcacgtaccggaacactggctagaaaaatcattaaaaagatggaggatatggtggtcgacggatacggacaagtagttataggtaatacgctcatcaagtacgccgccaattataccaaaattctaggctcagtatgtaaacctgtagatcttatctatccagatgagtccatgacttggtatttggaaattagtgctctgtggaataaaataaaacagggattcgtttactctcagaaacagaaacttgcaaagaagacattggcgccgtttaatttcctagtattcgtcaaacccaccactgaggataatgctattaaggttaaggatctgtacgatatgattcataacgtcattgatgatgtgagagagaaatacttctttacggtatctaatatagattttatggagtatatattcttgacgcatcttaatccttctagaattagaattacaaaagaaacggctatcactatctttgaaaagttctatgaaaaactcaattatactctaggtggtggaactcctattggaattatttctgcacaggtattgtctgagaagtttacacaacaagccctgtccagttttcacactactgaaaaaagtggtgccgtcaaacaaaaacttggtttcaacgagtttaataacttgactaatttgagtaagaataagaccgaaattatcactctggtatccgatgatatctctaaacttcaatctgttaagattaatttcgaatttgtatgtttgggagaattaaatccagacatcactcttcgaaaagaaacagataggtatgtagtagatataatagtcaatagattatacatcaagagagcagaaattaccgaattagtcgtcgaatatatgattgaacgattcatctcctttagcgtcattgtaaaggaatggggtatggaaacattcattgaggacgaggataatattagatttactgtctatctaaatttcgttgaaccagaggaattgaatcttagtaagtttatgatggttcttccgggggcagccaacaagggaaagattagtaaattcaagattcctatctctgattatacgggttatgacgacttcaatcaaacaaaaaagctcaataagatgactgtagaactcatgaatctaaaagaattaggttctttcgatttggaaaacgtcaacgtgtatcctggagtatggaatacatacgatatcttcggtatcgaggccgctcgtgaatacttgtgcgaagccatgttaaacacctatggagaagggttcgattatctgtatcagccttgtgatcttctcgctagtttactatgtgctagttacgaaccagaatcagtgaataaattcaagttcggcgcagctagtactcttaagagagctacgttcggagacaataaagcattgttaaacgcggctcttcataaaaagtcagaacctattaacgataatagtagctgccacttttttagcaaggtccctaatataggaactggatattacaaatactttatcgacttgggtcttctcatgagaatggaaaggaaactatctgataagatatcttctcaaaagatcaaggaaatggaagaaacagaagacttttaattcttatcaataacatatttttctatgatctgtcttttaaacgatggattttccacaaatgcgcctctcaagtccctcatagaatgatacacgtataaaaaatatagcataggcaatgactccttatttttagacattagatatgccaaaatcatagccccgcttctatttactcccgcagcacaatgaaccaacacgggctcgtttcgttgatcacatttagataaaaaggcggttacgtcgtcaaaatatttactaatatcggtagttgtatcatctaccaacggtatatgaataatattaatattagagttaggtaatgtatatttatccatcgtcaaatttaaaacatatttgaacttaacttcagatgatggtgcatccatagcatttttataatttcccaaatacacattattggttacccttgtcattatagtgggagatttggctctgtgcatatctccagttgaacgtagtagtaagtatttatacaaacttttcttatccatttataacgtacaaatggataaaactactttatcggtaaacgcgtgtaatttagaatacgttagagaaaaggctatagtaggcgtacaagcagccaaaacatcaacacttatattctttgttattatattggcaattagtgcgctattactctggtttcagacgtctgataatccagtctttaatgaattaacgagatatatgcgaattaaaaatacggttaacgattggaaatcattaacggatagcaaaacaaaattagaaagtgatagaggtagacttctagccgctggtaaggatgatatattcgaattcaaatgtgtggatttcggcgcctattttatagctatgcgattggataagaaaacatatctgccgcaagctattaggcgaggtactggagacgcgtggatggttaaaaaggcggcaaaggtcgatccatctgctcaacaattttgtcagtatttgataaaacacaagtctaataatgttattacttgtggtaatgagatgttaaatgaattaggttatagcggttattttatgtcaccgcattggtgttccgattttagtaatatggaatagtgttagataaatgcggtaacgaatgttcctgtaaggaaccataacagtttagatttaacgttaaagatgagcataaacataataaacaaaattacaatcaaacctataacattaatatcaaacaatccaaaaaatgaaatcagtggagtagtaaacgcgtacataactcctggataacgtttagtagctgccgttcctattctagaccaaaaattcggtttcatgttttcgaaacggtgttctgcaacaagtcggggatcgtgttctacatatttggcggcattatccagtatctgcctattgatcttcatttcgttttcaattctggctatttcaaaataaaatcccgatgatagacctccagactttataatttcatctacgatgttcagcgccgtagtaactctaataatataggctgataagctaacatcataccctcctgtatatgtgaatatggcatgatttttgtccattacaagctcggttttaactttattgcctgtaataatttctctcatctgtaggatatctatttttttgtcatgcattgccttcaagacgggacgaagaaacgtaatatcctcaataacgttatcgttttctacaataactacatattctacctttttattttctaactcggtaaaaaaattagaatcccatagggctaaatgtctagcgatatttcttttcgtttcctctgtacacatagtgttacaaaaccctgaaaagaagtgagtatacttgtcatcatttctaatgtttcctccagtccactgtataaacgcataatccttgtaatgatctggatcatccttgactaccacaacatttcttttttctggcataacttcgttgtcctttacatcatcgaacttctgatcattaatatgctcatgaacattaggaaatgtttctgatggaagtctatcaataactggcacaacaataacaggagttttcgccgccgccatttagttattgaaattaatcatatacaactctttaatacgagttatattttcgtctatccattgtttcacatttacatatttcgacaaaaagatataaaatgcgtattccaatgcttctctgtttaatgaattactaaaatatacaaacacgtcactgtctggcaataaatgatatcttagaatattgtaacaatttattttgtattgcacatgttcgtgatctatgagttcttcttcgaatggcataggatctccgaatctgaaaacgtataaataggagttagaataataatatttgagagtattggtaatatataaactctttagcggtataattagtttttttctctcaatttctatttttagatgtgatggaaaaatgactaattttgtagcattagtatcatgaactctaatcaaaatcttaatatcttcgtcacacgttagctctttgaagtttttaagagatgcatcagttggttcgaccgatggagtaggtgcaacaattttttgttcgatgtatgtatgtactggagccattgttttaactataatggtgcttgtatcgaaaaactttaatgcagatagcggaagctcttcgccgcgactttctacatcgtaattgggttctaacgccgatctctgaatggatactagttttctaagttctaatgtgattctctgaaaatgtaaatccaattcctccggcattatagatgtgtatacatcggtaaataaaactatagtatccaacgatcccttctcgcaaattctagtcttaaccaaaaaatcgtatataaccacggagatggcgtatttaagagtggattcttctaccgttttgttcttggatgtcatataggaaactataaagtccgcactactgttaagaatgattactaacgcaactatatagttcaaattaagcattttggaaacataaaataactctgtagacgatacttgactttcgaataagtttgcagacaaacgaagaaagaacagacctctcttaatttcagaagaaaactttttttcgtattcctgacgtctagagtttatatcaataagaaagttaagaattagtcggttaatgttgtatttcattacccaagtttgagatttcataatattatcaaaagacatgataatattaaagataaagcgctgactatgaacgaaatagctatatggttcgctcaaaaatatagtcttgttaaacgtggaaacgataactgtatttttaatcacgtcagcggcatctaaattaaatataggtatatttattccacacactctacaatatgccacaccatcttcataataaataaattcgttagcaaaattattaattttagtgaaatagttagcgtcaactttcatagcttccttcaatctaatttgatgctcacacggtgcgaattccactctaacatcccttttccatgcctcaggttcatcgatctctataatatctagttttttgcgtttcacaaacacaggctcgtctctcgcgatgagatctgtatagtaactatgtaaatgataactagatagaaagatgtagctatatagatgacgatcctttaagagaggtataataactttaccccaatcagatagactgttgttatggtcttcggaaaaagaatttttataaatttttccagtattttccaaatatacgtacttaacatctaaaaaatccttaatgataataggaatggataatccgtctattttataaagaaatacatatcgcacattatacttttttttggaaatgggaataccgatgtgtctacataaatatgcaaagtctaaatattttttagagaatcttaattggtccaaattcttttccaagtacggtaatagatttttcatattgaacggtatcttcttaatctctggttctagttccgcattaaatgatgaaactaagtcactatttttataactaacgattacatcacctctaacatcatcatttaccagaatactgatcttcttttgtcgtaaatacatgtctaatgtgttaaaaaaaagatcatacaagttatacgtcatttcatctgtggtattcttgtcattgaaggataaactcgtactaatctcttctttaacagcctgttcaaatttatatcctatatacgaaaaaatagcaaccagtgtttgatcatccgcgtcaatattctgttctatcgtagtgtataacaatcgtatatcttcttctgtgatagtcgatacgttataaaggttgataacgaaaatatttttatttcgtgaaataaagtcatcgtaggattttggacttatattcgcgtctagtagatatgcttttatttttggaatgatctcaattagaatagtctctttagagtccatttaaagttacaaacaactaggaaattggtttatgatgtataatttttttagtttttatagattctttattctatacttaaaaaatgaaaataaatacaaaggttcttgagggttgtgttaaattgaaagcgagaaataatcataaattatttcattatcgcgatatccgttaagtttgtatcgtaatggcgtggtcaattacaaataaagcggatactagtagcttcacaaagatggctgaaatcagagctcatctaaaaaatagcgctgaaaataaagataaaaacgaggatattttcccggaagatgtaataattccatctactaagcccaaaaccaaacgagccactactcctcgtaaaccagcggctactaaaagatcaaccaaaaaggaggaagtggaagaagaagtagttatagaggaatatcatcaaacaactgaaaaaaattctccatctcctggagtcagcgacattgtagaaagcgtggccgctgtagagctcgatgatagcgacggggatgatgaacctatggtacaagttgaagctggtaaagtaaatcatagtgctagaagcgatctctctgacctaaaggtggctaccgacaatatcgttaaagatcttaagaaaattattactagaatctctgcagtatcgacggttctagaggatgttcaagcagctggtatctctagacaatttacttctatgactaaagctattacaacactatctgatctagtcaccgagggaaaatctaaagttgttcgtaaaaaagttaaaacttgtaagaagtaaatgcgtgcacttttttataaagatggtaaactctttaccgataataattttttaaatcctgtatcagacgataatccagcgtatgaggttttgcaacatgttaaaattcctactcatttaacagatgtagtagtatatgaacaaacgtgggaggaggcgttaactagattaatttttgtgggaagtgattcaaaaggacgtagacaatacttttacggaaaaatgcatgtacagaatcgcaacgctaaaagagatcgtatttttgttagagtatataacgttatgaaacgaattaattgttttataaacaaaaatataaagaaatcgtccacagattccaattatcagttggcggtttttatgttaatggaaactatgttttttattagatttggtaaaatgaaatatcttaaggagaatgaaacagtagggttattaacactaaaaaataaacacatagaaataagtcccgatgaaatagttatcaagtttgtaggaaaggacaaagtttcacatgaatttgttgttcataagtctaatagactatataagccgctattgaaactgacggatgattctagtcccgaagaatttctgttcaacaaactaagtgaacgaaaggtatatgaatgtatcaaacagtttggtattagaatcaaggatctccgaacgtatggagtcaattatacgtttttatataatttttggacaaatgtaaagtccatatctcctcttccatcaccaaaaaagttaatagcgttaactatcaaacaaactgctgaagtggtaggtcatactccatcaatttcaaaaagagcttatatggcaacgactattttagaaatggtaaaggataaaaattttttagatgtagtatctaaaactacgttcgatgaattcctatctatagtcgtagatcacgttaaatcatctacggatggatgatatagatctttacacaaataattacaaaaccgataaatggaaatggataagcgtatgaaatctctcgcaatgaccgctttctttggggagctaagcacattagatattatggcattgataatgtctatatttaaacgccatccaaacaataccattttttcagtggataaggatggtcagtttatgattgatttcgaatacgataattataaggcttctcaatatttggatctgaccctcactccgatatctggagatgaatgcaagactcacgcatcgagtatagccgaacaattggcgtgtgtggatattattaaagaggatattagcgaatatatcaaaactactccccgtcttaaacgatttataaaaaaataccgcaatagatcagatactcgcatcagtcgagatacagaaaagcttaaaatagctctagctaaaggcatagattacgaatatataaaagacgcttgttaataagtaaatgaaaaaaaactagtcgtttataataaaacacgatatggatgccaacgtagtatcatcttctactattgcgacgtatatagacgctttagcgaagaatgcttcggaattagaacagaggtctaccgcatacgaaataaataatgaattggaactagtatttattaagccgccattgattactttgacaaatgtagtgaatatctctacgattcaggaatcgtttattcgatttaccgttactaataaggaaggtgttaaaattagaactaagattccattatctaaggtacatggtctagatgtaaaaaatgtacagttagtagatgctatagataacatagtttgggaaaagaaatcattagtgacggaaaatcgtcttcacaaagaatgcttgttgagactatcgacagaggaacgtcatatatttttggattacaagaaatatggatcctctatccgactagaattagtcaatcttattcaagcaaaaacaaaaaactttacgatagactttaagctaaaatattttctaggatccggtgcccagtctaaaagttctttattacacgctattaatcatccaaagtcaaggcctaatacatctctggaaatagaatttacacctagagacaatgaaacagttccatatgatgaactaataaaggaattgacgactctctcgcgtcatatatttatggcttctccagagaatgtaattctttctccgcctattaacgcgcctataaaaacctttatgttgcctaaacaagatatagtaggtttggatctggaaaatctatatgccgtaactaagactgacggcattcctataactatcagagttacatcaaacgggttgtattgttattttacacatcttggttatattattagatatcctgttaagagaataatagattccgaagtagtagtctttggtgaggcagttaaggataagaactggaccgtatatctcattaagctaatagagcctgtgaatgcaatcaatgatagactagaagaaagtaagtatgttgaatctaaactagtggatatttgtgatcggatagtattcaagtcaaagaaatacgaaggtccgtttactacaactagtgaagtcgtcgatatgttatctacatatttaccaaagcaaccagaaggtgttattctgttctattcaaagggacctaaatctaacattgattttaaaattaaaaaggaaaatactatagaccaaactgcaaatgtagtatttaggtacatgtccagtgaaccaattatctttggagagtcgtctatctttgtagagtataagaaatttagcaacgataaaggctttcctaaagaatatggttctggtaagattgtgttatataacggcgttaattatctaaataatatctattgtttggaatatattaatacacataatgaagtgggtattaagtccgtggttgtacctattaagtttatagcagaattcttagttaatggagaaatacttaaacctagaattgataaaaccatgaaatatattaactcagaagattattatggaaatcaacataatatcatagtcgaacatttaagagatcaaagcatcaaaataggagatatctttaacgaggataaactatcggatgtgggacatcaatacgccaataatgataaatttagattaaatccagaagttagttattttacgaataaacgaactagaggaccgttgggaattttatcaaactacgtcaagactcttcttatttctatgtattgttccaaaacatttttagacgattccaacaaacgaaaggtattggcgattgattttggaaacggtgctgacctggaaaaatacttttatggagagattgcgttattggtagcgacggatccggatgctgatgctatagctagaggaaatgaaagatacaacaaattaaactctggaattaaaaccaagtactacaaatttgactacattcaggaaactattcgatccgatacatttgtctctagtgtcagagaagtattctattttggaaagtttaatatcatcgactggcagtttgctatccattattcttttcatccgagacattatgctaccgtcatgaataacttatccgaactaactgcttctggaggcaaggtattaatcactaccatggacggagacaaattatcaaaattaacagataaaaagacttttataattcataagaatttacctagtagcgaaaactatatgtctgtagaaaaaatagctgatgatagaatagtggtatataatccatcaacaatgtctactccaatgactgaatacattatcaaaaagaacgatatagtcagagtgtttaacgaatacggatttgttcttgtagataacgttgatttcgctacaattatagaacgaagtaaaaagtttattaatggcgcatctacaatggaagatagaccatctacaagaaactttttcgaactaaatagaggagccattaaatgtgaaggtttagatgtcgaagacttacttagttactatgttgtttatgtcttttctaagcggtaaataataatatggtatgggttctgatctcccagttctaaatgcattaaataattccaatagagcgatttttgttcctataggaccttccaactgtggatactctgtattgttaatagatatattaatacttttgtcgggtaacagaggttctacgtcttttaaaaataaaagtttgataacatctggcctgttcataaataaaaacttggcgattctatatatactcttattatcaaatctagccattgtcttatagatgtgagctactgtaggtgtaccatttgattttctttctaatactatatatttctctcgaagaagttcttgcacatcatctgggaataaaatactactgttgagtaaatcagttattttttttatatcgatattgatggacatttttatagttaaggataataagtatcccaaagtagataacgacgataacgaagtatttatacttttaggaaatcacaatgactttatcagattaaaattaacaaaattaaaggagcatgtatttttttctgaatatattgtgactccagatacatatggatctttatgcgtcgaattaaatgggtctagttttcagcacggcggtagatatatagaggtggaggaatttatagatgctggaagacaagttagatggtgttctacatccaatcatatatctaaagatatacccgaagatatgcacactgataaatttgtcatttatgatatatacacttttgacgctttcaagaataaacgattggtattcgtacaggtacctccgtcgttaggagatgatagtcatttgactaatccgttattgtctccgtattatcgtaattcagtagccagacaaatggtcaatgatatgatttttaatcaagattcatttttaaaatatttattagaacatctgattagaagccactatagagtttctaaacatataacaatagttagatacaaggataccgaagaattaaatctaacgagaatatgttataatagagataagtttaaggcgtttgtattcgcttggtttaacggcgtttcggaaaatgaaaaggtactagatacgtataaaaaggtatctaatttgatataatgaattcagtgactgtatcacacgcgccatatactattacttatcacgatgattgggaaccagtaatgagtcaattggtagagttttataacgaagtagccagttggctgctacgagacgagacgtcgcctattcctgataagttctttatacagttgaaacaaccgcttagaaataaacgagtatgtgtgtgcggtatagatccgtatccgaaagatggaactggtgtaccgttcgaatcaccaaattttacaaaaaaatcaattaaggagatagcttcatctatatctagattaaccggagtaattgattataaaggttataaccttaatataatagacggggttataccctggaattattacttaagttgtaaattaggagaaacaaaaagtcacgcgatctactgggataagatttccaagttactgctgcagcatataactaaacacgttagtgttctttattgtttgggtaaaacagatttctcgaatatacgggccaagttagaatccccggtaactaccatagtcggatatcatccagcggctagagaccgccaattcgagaaagatagatcatttgaaattatcaacgttttactggaattagacaacaaggcacctataaattgggctcaagggtttatttattaatgctttagtgaaattttaacttgtgttctaaatggatgcggctattagaggtaatgatgttatctttgttcttaagactataggtgtcccgtcagcgtgcagacaaaatgaagatccaagatttgtagaagcatttaaatgcgacgagttagaaagatatattgagaataatccagaatgtacactattcgaaagtcttagggatgaggaagcatactctatagtcagaattttcatggatgtagatttagacgcgtgtctagacgaaatagattatttaacggctattcaagattttattatcgaggtgtcaaactgtgtagctagattcgcgtttacagaatgcggcgccattcatgaaaatgtaataaaatccatgagatctaatttttcattgactaagtctacaaatagagataaaacaagttttcatattatctttttagacacgtataccactatggatacattgatagctatgaaacgaacactattagaattaagtagatcatctgaaaatccactaacaagatcgatagacactgccgtatataggagaaaaacaactcttcgggttgtaggtactaggaaaaatccaaattgcgacactattcatgtaatgcaaccaccgcatgataatatagaagattacctattcacttacgtggatatgaacaacaatagttattacttttctctacaacaacgattggaggatttagttcctgataagttatgggaaccagggtttatttcattcgaagacgctataaaaagagtttcaaaaatattcattaattctataataaactttaatgatctcgatgaaaataattttacaacggtaccactggtcatagattacgtaacaccttgtgcattatgtaaaaaacgatcgcataaacatccgcatcaactatcgttggaaaatggtgctattagaatttacaaaactggtaatccacatagttgtaaagttaaaattgttccgttggatggtaataaactgtttaatattgcacaaagaattttagacactaactctgttttattaaccgaacgaggagaccatatagtttggattaataattcatggaaatttaacagcgaagaacccttgataacaaaactaattttgtcaataagacatcaactacctaaggaatattcaagcgaattactctgtccaagaaaacgaaagactgtagaagctaacatacgagacatgttagtagattcagtagagaccgatacctatccggataaacttccgtttaaaaatggtgtattggacctggtagacggaatgttttactctggagatgatgctaaaaaatatacgtgtactgtatcaaccggatttaaatttgacgatacaaagttcgtcgaagacagtccagaaatggaagagttaatgaatatcattaacgatatccaaccattaacggatgaaaataagaaaaatagagagctatatgaaaaaacattatctagttgtttatgcggtgctaccaaaggatgtttaacattcttttttggagaaactgcaactggaaagtcgacaaccaaacgtttgttaaagtctgctatcggtgacctgtttgttgagacgggtcaaacaattttaacagatgtattggataaaggacctaatccatttatcgctaacatgcatttgaaaagatctgtattctgtagcgaactacctgattttgcctgtagtggatcaaagaaaattagatctgacaatattaaaaagttgacagaaccttgtgtcattggaagaccgtgtttctccaataaaattaataatagaaaccatgcgacaatcattatcgatactaattacaaacctgtttttgataggatagataacgcattaatgagaagaattgccgtcgtgcgattcagaacacacttttctcaaccttctggtagagaggctgctgaaaataatgacgcgtacgataaagtcaaactattagacgaggggttagatggtaaaatacaaaataatagatatagattcgcatttctatacttgttggtgaaatggtacagaaaatatcatgttcctattatgaaactatatcctacacccgaagagattcctgactttgcattctatctcaaaataggtactctgttagtatctagctctgtaaagcatattccattaatgacggacctctccaaaaagggatatatattgtacgataatgtggtcactcttccgttgactactttccaacagaaaatatccaagtattttaattctagactatttggacacgatatagagagcttcatcaatagacataagaaatttgccaatgttagtgatgaatatctgcaatatatattcatagaggatatttcatctccgtaaatatatgctcatatatttatagaagatatcacatatctaaatgaataccggaatcatagatttatttgataatcatgttgatagtataccaactatattacctcatcagttagctactctagattatctagttagaactatcatagatgagaacagaagcgtgttattgttccatattatgggatcaggtaaaacaataatcgctttgttgttcgccttggtagcttccagatttaaaaaggtttacattctagtgcctaatatcaacattttgaaaatttttaattataatatgggtgtagctatgaacttgtttaatgacgaattcatagctgagaatatctttattcattccacaacaagtttttattctcttaattataacgataacgtcattaattataacggattatctcgctacaataactctatttttatcgttgatgaggcacataatatctttgggaataatactggagaacttatgaccgtgataaaaaataaaaacaagattccttttctactattgtctggatctcccattactaacacacctaatactctgggtcatattatagatttaatgtccgaagagacgatagattttggtgagattattagtcgtggtaagaaagtaattcagacacttcttaacgaacgcggtgtgaatgtacttaaggatttgcttaaaggaagaatatcatattacgaaatgcctgataaagatctaccaacgataagatatcacggacgtaagtttctagatactagagtagtatattgtcacatgtctaaacttcaagagagagattatatgattactagacgacagctatgttatcatgaaatgtttgataaaaatatgtataacgtgtcaatggcagtattgggacaacttaatctgatgaataatttagatactttatttcaggaacaggataaggaattgtacccaaatctgaaaataaataatggcgtgttatacggagaagaattggtaacgttaaacattagttccaaatttaaatactttattaatcggatacagacactcaacggaaaacattttatatacttttctaattctacatatggcggattggtaattaaatatatcatgctcagtaatggatattctgaatataatggttctcagggaactaatccacatatgataaacggcaaaccaaaaacatttgctatcgttactagtaaaatgaaatcgtctttagaggatctattagatgtgtataattctcctgaaaacgatgatggtagtcaattgatgtttttgttttcgtcaaacattatgtccgaatcctatactctgaaagaggtaaggcatatttggtttatgactatcccagatactttttctcaatacaaccaaattcttggacgatctattagaaaattctcttacgccgatatttctgaaccagttaatgtatatcttttagccgccgtatattccgatttcaatgacgaagtaacgtcattaaacgattacacacaggatgaattgattaatgttttaccatttgacatcaaaaagctgttatatctaaaatttaagactaaagaaacgaatagaatatactctattcttcaagagatgtctgaaacgtattctcttccaccacatccatcaattgtaaaagttttattgggagaattggtcagacaatttttttataataattctcgtattaagtataacgactccaagttacttaaaatggttacatcagttataaaaaataaagaagacgctaggaattacatagatgatattgtaaacggtcacttctttgtatcgaataaagtatttgataaatctcttttatacaaatacgaaaacgatattattacagtaccgtttagactttcctacgaaccatttgtttggggagttaactttcgtaaagaatataacgtggtatcttctccataaaactgatgaaatatataaagaaataaatgtcgagctttgttaccaatggataccttccagttacattggaaccacacgagctgacgttagacataaaaactaatattaggaatgccgtatataagacgtatctccatagagaaattagtggtaaaatggccaagaaaatagaaattcgtgaagacgtggaattacctctcggcgaaatagttaataattctgtagttataaacgttccgtgtgtaataacctacgcgtattatcacgttggggatatagtcagaggaacattaaacatcgaagatgaatcaaatgtaactattcaatgtggagatttaatctgtaaactaagtagagattcgggtactgtatcatttagcgattcaaagtactgcttttttcgaaatggtaatgcgtatgacaatggcagcgaagtcactgccgttctaatggaggctcaacaaggtatcgaatctagttttgtttttctcgcgaatatcgtcgactcataaaaaagagaatagcggtaagtataaacacgaatactatggcaataattgcgaatgttttattctcttcgatatatttttgataatatgaaaaacatgtctctctcaaatcggacaaccatctcataaaatagttctcgcgcgctggagaggtagttgctgctcgtataatctccccagaataatatacttgcgtgtcgtcgttcaatttatacggatttctatagttctctgttatataatgcggttttccatcatgattagacgacgacaatagtgttctgaatttagatagttgatcagaatgaatgtttattggcgttggaaaaattatccatacagcgtctgcagagtggttgatagttgttcctagatatgtaaaataatccaacttactaggcagcaaattgtctagataaaatactgaatcaaacggtgcagacgtattggcggatctaatggaatccaattgattaactatcttttgaaaatatacatttttatgatccaatacttgtaagaatatagaaataatgataagtccatcatcgtgtttttttgcctcttcataagaactatattttttcttattccaatgaacaagattaatctctccagagtatttgtacacatctatcaagtgattggatccataatcgtcttcctttccccaatatatatgtagtgatgataacacatattcattggggagaaaccctccacttatatatcctcctttaaaattaatccttactagttttccagtgttctggatagtggttggtttcgactcattataatgtatgtctaacggcttcaatcgcgcgttagaaattgcttttttagtttctatattaataggagatagttgttgcggcatagtaaaaatgaaatgataactgtttaaaaatagctcttagtatgggaattacaatggatgaggaagtgatatttgaaactcctagagaattaatatctattaaacgaataaaagatattccaagatcaaaagacacgcacgtgtttgctgcgtgtataacaagtgacggatatccgttaataggagctagaagaacttcattcgcgttccaggcgatattatctcaacaaaattcagattctatctttagagtatccactaaactattacggtttatgtactacaatgaactaagagaaatctttagacggttgagaaaaggttctatcaacaatatcgatcctcactttgaagagttaatattattgggtggtaaactagataaaaaggaatctattaaagattgtttaagaagagaattaaaagaggaaagtgatgaacgtataacagtaaaagaattcggaaatgtaattctaaaacttacaacgcgcgataaattatttaataaagtatatataggttattgcatggcgtgttttattaatcaatcgttggaggatttatcgcatactagtatttacaatgtagaaattagaaagattaaatcattaaatgattgtattaacgacgataaatacgaatatctgtcttatatttataatatgctagttaatagtaaatgaacttttacagatctagtataattagtcagattattaagtataatagacgactagctaagtctattatttgcgaggatgactctcaaattattacactcacggcattcgttaaccaatgcctatggtgtcataaacgagtatccgtgtccgctattttattaactactgataacaaaatattagtatgtaacagacgagatagttttctctattctgaaataattagaactagaaacatgtttagaaagaaacgattatttctgaattattccaattatttgaacaaacaggaaagaagtatactatcgtcatttttttctctagatccagctactgctgataatgatagaatagacgctatttatccgggtggcatacccaaaaggggtgagaatgttccagagtgtttatccagggaaattaaagaagaagttaatatagacaattcttttgtattcatagacactcggttttttattcatggcatcatagaagataccattattaataaattttttgaggtaatcttctttgtcggaagaatatctctaacgagtgatcaaatcattgatacatttaaaagtaatcatgaaatcaaggatctaatatttttagatccgaattcaggtaatggactccaatacgaaattgcaaaatatgctctagatactgcaaaactcaaatgttatggccatagaggatgttattacgaatcattaaaaaaattaactgaggatgattgattagaaaatataaattaatttaccatcgtgtatttttataacgggattgtccggcatatcatgtagatagttaccgtctacatcgtatactcgaccatctacgcctttaaatcctctatttattgacattaatctattagaattggaataccaaatattagtaccctcaattagtttattggtaatatttttgttagacgatagatcgatggctcttgaaaccaaggttttccaaccggactcattgtcgatcggtgagaagtctttttcattagcatgaatccattctaatgatgtatgtttaaacactctaaacaattggacaaattcttttgatttgctttgaatgatttcaaataggtcttcgtctacagtaggcataccattagataatctagccattataaagtgcacgtttacatatctacgttctggaggagtaagaacgtgactattgagacgaatggctcttcctactatctgacgaagagacgcctcgttccatgtcatatctaaaatgaagatatcattgattgagaagaagctaataccctcgcctccactagaagagaatacgcatgttttaatgcattctccgttagtgtttgattcttggttaaactcagccaccgccttgattctagtatcttttgttctagatgagaactctatattagagataccaaagactttgaaatatagtaataagatttctattcctgactgattaacaaatggttcaaagactagacatttaccatgggatgctaatattcccaaacatacatctataaatttgacgcttttctcttttaattcagtaaatagagagatatcagccgcactagcatcccctcccaatagttctccccttttaaaggtatctaatgcagatttagaaaattctctatctcttaatgaatttttaaaatcattatatagtgttgctatctcttgcgcgtattcgcccggatcacgattttgtctttcaggaaagctatcgaacgtaaacgtagtagccatacgtctcagaattctaaatgatgatatacctgtttttatttcagcgagtttagccttttgataaatttcttcttgctttttcgacatattaacgtatcgcattaatactgttttcttagcgaatgatgcagacccttctacgtcatcaaaaatagaaaactcgttattaactatgtacgaacataggcctcctagtttggagactaattctttttcatcaactagacgtttattctcaaatagcgattggtgttgtaaggatcctggtcgtagtaagttaaccaacatggtgaattcttgcacactattgacgataggtgtagccgataaacaaatcatcttatggttttttaatgcgatggtcttagataaaaaattatatactgaacgagtaggacggatcttaccatcttctttgattaatgatttagaaatgaagttatgacattcatcaataatgacgcatattctactcttggaattaatagttttgatattagtaaaaaatttatttctaaaattttgatcatcgtaattaataaaaatacaatccttcgttatctctggagcgtatctgagtatagtgttcatccaaggatcttctatcaaagcctttttcaccaataagataatagcccaattcgtataaatatccttaagatgtttgagaatatatacagtagtcattgttttaccgacacccgtttcatggaacaataaaagagaatgcatactgtctaatcctaagaaaactcttgctacaaaatgttgataatccttgaggcgtactacgtccgaccccatcatttcaacaggcatattagtagttctgcgcaatgcataatcgatataggccgcgtgtgatttactcatttatgagtgataagtaataactatgttttaaaaatcacagcagtagtttaactagtcttctctgatgtttgttttcgatactttttgaatcagaagtcatactagaataaagcaacgagtgaacgtaatagagagcttcgtatactctattcgaaaactctaagaacttattaatgaattccgtatccactggattgtttaaaatactaaattgaacactgttcacatccttccaagaagaagacttagtgacggacttaacatgagacataaataaatccaaattttttttacaaacatcactagccaccataatggcgctatcttttaaccagctatcgcttacgcattttagcagtctaacatttttaaagagactacaatatattctcatagtatcgattacacctctaccgaataaagttggaagtttaataatacaatatttttcgtttacaaaatcaaataatggtcgaaacacgtcgaaggttaacatcttataatcgctaatgtatagattgttttcagtgagatgattattagatttaatagcatctcgttcacgtttgaacagtttattgcgtgcgctgaggtcggcaactacggcgtccgctttagtactcctcccataatactttacgctattaatctttaaaatttcatagactttatctagatcgctttctggtaacatgatatcatgtgtaaaaagttttaacatgtcggtcggcattctatttagatcattaactctagaaatctgaagaaagtaattagctccgtattccagactaggtaatgggcttttacctagagacagattaagttctggcaatgtttcataaaatggaagaaggacatgcgttccctcccggatattttttacaatttcatccatttacaactctatagtttgttttcattattattagttattatctcccataatcttggtaatacttaccccttgatcgtaagataccttatacaggtcattacatacaactaccaattgtttttgtacataatagattggatggttgacatccatggtggaataaactactcgaacagatagtttatctttccccctagatacattagccgtaatagttgtcggcctaaagaatatctttggtgtaaagttaaaagttagggttcttgttccattattgctttttgtcagtagttcattataaattctcgagatgggtccgttctctgaatatagaacatcatttccaaatctaacttctagtctagaaataatatcggtcttattcttaaaatctattcccttgatgaagggatcgttaatgaacaaatccttggcctttgattcggctgatctattatctccgttatagacgttacgttgactagtccaaagacttacaggaatagatgtatcgatgatgttgatactatgtgatatgtgagcaaagattgttctcttagtggcatcactatatgttccagtaatggcggaaaactttttagaaatgttatatataaaagaattttttcgtgttccaaacattagcagattagtatgaagataaacactcatattatcaggaacattatcaatttttacatacacatcagcatcttgaatagaaacgataccatcttctggaacctctacgatctcggcagactccggataaccagtcggtggaccatcgctaacaataactagatcatccaacaatctactcacatatgcatctatataatctttttcatcttgtgagtaccctggatacgaaataaatttattatccgtatttccataataaggtttagtataaacagagagcgatgttgccgcatgaacttcagttacagtcgccgttggttggtttatttgacctattactctcctaggtttctctataaatgatggtttaatttgtacattcttaaccatatatccaataaagctcaattcaggaacataaacaaattctttgttgaacgtttcaaagtcgaacgaagagtcacgaataacgatatcggatactggattgaaggttaccgttacggtaatttttgaatcggatagtttaagactgctgaatgtatcttccacatcaaacggagttttaatataaacgtatactgtagatggttctttaatagtgtcattaggagttaggccaatagaaatatcattaagttcactagaatatccagagtgtttcaaagcaattgtattattgatacaattattatataattcttcgccctcaatttcccaaataacaccgttacacgaagagatagatacgtgattaatacatttatatccaacatatggtacgtaaccgaatcttcccatacctttaacttctggaagttccaaactcagaaccaaatgattaagcgcagtaatatactgatccctaatttcgaagctagcgatagcctgattgtctggaccatcgtttgtcataactccggatagagaaatatattgcggcatatataaagttggaatttgactatcgactgcgaagacattagaccgtttaatagagtcatccccaccgatcaaagaattaatgatagtattattcattttctatttaaaatggaaaaagcttacaataaactccgtagagaaatatctataatttgtgagttttccttaaagtaacagcttccgtaaacgccgtctttatctcttagtaagtttattgtatttataaccttttccttatcttcatagaatactaaaggcaacaaagaaatttttggttcttctctaagagctacgtgagacttaaccatagacgccaacgaatccctacatattttagaacagaaatacccaacttcaccacccttgaatgtctcaatactaataggtttaaaaaccaaatcttgattacaaaaccaacacttatcaattacactatttgtcttaatagacacatctgccatagatttataatactttggtagtatacaagcgagtgcttcttctttagcgggcttaaagactgctttaggtgctgaaataaccacatctggaaggcttactcgcttagccatttaattacggaactatttttttatacttctaatgagcaagtagaaaacctctcatctacaaaaacatactcgtgtccataatcctctaccatagttacacgttttttagatctcatatgtgctaaaaagttttcccatactaattggttactattatttttcgtataatttttaacagtttgaggttttagatttttagttacagaagtgatatcgaatattttatccaaaaagaatgaataattaattgtcttagaaggagtgttttcttggcaaaagaataccaagtgcttaaatatttctactacttcattaatcttttctgtactcagattcagtttctcatcttttacttgattgattatttcaaagactaacttataatcctttttatttattctctcgttagccttaagaaaactagatacaaaatttgcatctacatcatccgtggatatttgatttttttccatgatatccaagagttccgagataatttctccagaacattgatgagacaataatctccgcaatacatttctcaaatgaataagtttattagacacatggaagtttgactttttttgtacctttgtacatttttgaaataccgactcgcaaaaaatacaatattcatatccttgttcagatactataccgttgtgtctacaaccgctacataatcgtagattcatgttaacactctacgtatctcgtcgtccaatattttatataaaaacattttatttctagacgttgccagaaaatcctgtaatatttttagttttttgggctgtgaataaagtatcgccctaatattgttaccgtcttccgccaatatagtagttaaattatccgcacatgcaaaagaacaccgcttaggcggattcagtacaatgttatatttttcgtaccaactcatttaaatatcataatctaaaatagttctgtaatatgtctagcgctaatatattgatcataatcctgtgcataaattaagatacaacaatgtctcgaaatcatcgacatggcttcttccatagttagaagatcgtcgtcaaagttagcaacgtgattcatcaacatttgctgttttgaggcagcaaatactgaaccgtcgccattcaaccattcataaaaaccatcgtctgaatccattgataatttcttgtactggtttttgagagctcgcatcaatctagcatttctagctcccggattgaaaacagaaagaggatcgtacatccagggtccattttctgtaaatagaatcgtataatgtcccttcaagaagatatcagacgatccacaatcaaagaattggtctccgagtttgtaacaaactgcggactttaacctatacatgataccgtttagcatgatttctggtgatacgtcaatcggagtatcatctattagagatctaaagccggtgtaacattctccaccaaacatattcttattctgacgtcgttctacataaaacatcattgctccattaacgataacaggggaatgaacagcactacccatcacattagttcccaatggatcaatgtgtgtaactccagaacatcttccatatcctatgttaggaggagcgaacaccactcttccactattgccatcgaatgccatagaataaatatccttggaattgatagaaatcggactgtcggatgttgtgatcatcttcataggattaacaactatgtatggtgccgcctgaagtttcatatcgtaactgatgccgtttataggtctagccacagaaaccaacgtaggtctaaatccaactatagacaaaatagaagccaatatctgttcctcatctgtcataacttgagagcatccagtatgaataatcttcattagatggggatctaccgcatcatcatcgttacaataaaaaattcccattctaatgttcataattgcttttctaatcatggtatgcatgtttgctctctgaatctctgtggaaattagatctgatacacctgtaatcactatcggattatcctccgtaagacgattaaccaacaacatataattataagactttacttttctaaattcataaagttgctggattaggctataggtgtctccatgtacatacgcgttctcgagcgcaggaagtttaataccgaatagtgccatcagaataggatgaatatagtaattagtttctggttttctataaataaaagacaaatcttgtgaactagacatatcggtaaaatgcatggattggaatcgtgtagtcgacagaagaatatgatgattagatggagagtatattttatctaactctttgagttggtcaccgattctaggactagctcgagaatgaataagtactaaaggatgagtacatttcacagaaacactagcattgttcaatgtgctctttacatgggtaaggagttgaaatagctcgtttctatttgttctgacaatatttagtttattcataatgttaagcatatcctgaatagtaaagttagatgtgtcatacttgttagtagttagatatttagcaattgcattcccatcatttctcaatctcgtactccaatcatgtgtagatgctacttcgtcgatggaaaccatacaatcctttttgataggctgttgagattgattatttcctgcacgtttaggtttggtacgttgatttctagcccctgcggatataaagtcatcgtctacaatttgggacaatgaattgcatacactacaagacaaagatttatcagaagtgtgaatatgatcttcatctaccaaagaaagagtttgattagtataactagattttagtcctgcgttagatgttaaaaaaacatcgctattgaccacggcttccattatttatattcgtagtttttactcgaaagcgtgattttaatatccaatcttattacttttggaatcgttcaaaacctttgactagttgtagaatttgatctattgccctacgcgtatactcccttgcatcatatacgttcgtcaccagatcgtttgtttcggcctgaagttggtgcatatctctttcaacattcgacatgagatccttaagggccatatcgtctagattttgttgagatgctgctcctggatttggattttgttgtgctgttgtacatactgtaccaccagtaggtgtaggagtacatacagtggccacaataggaggttgaggaggtgtaaccgttggagtagtacaagaaatatttccatccgattgttgtgtacatgtagttgttggtaacgtctgagaaggttgggtagatggcggtgtcgtcgtcttttgatctttattaaatttagagataatatcctgaacagcattgctcggcgtcaacgctggaaggagtgaactcgccggcgcatcagtatcttcagacagccaatcaaaaagattagacatatcagatgatgtattagtttgttgtcgtggttttggtgtaggaacagtactactaggtagaagaataggagccggtgtagctgttggaaccggctgtggagttatatgaatagttggttgtagcggttggataggctgtctgctggcgaccgtcatattatctctagctagttgttctcgcaactgtctttgataatacgactcttgagactttagtcctatttcaatcgcttcatcctttttcgtatccggatccttttcttcagaataatagattgacgactttggtgtagaggattctgccagcccctgtgagaacttgttaaagaagtccatttaaggctttaaaattgaattgcgattataagattaaatggcagacacagacgatattatcgactatgaatccgatgatctcaccgaatacgaggatgatgaagaagaggaagaagatggagagtcactagaaactagtgatatagatcccaaatcttcttataagattgtagaatcagcatccactcatatagaagatgcgcattccaatcttaaacatatagggaatcatatatctgctcttaaacgacgctatactagacgtataagtctatttgaaatagcgggtataatagcagaaagctataacttgcttcaacgaggaagattacctctagtttcagaattttctgacgaaacgatgaagcaaaatatgctacatgtaattatacaagagatagaggagggttcttgtcctatagtcatcgaaaagaacggagaattgttgtcggtaaacgattttgacaaagatggtctaaaattccatctagactatattatcaaaatttggaaacttcaaaaacgatattagaatttatacgaatatcgttctctaaatgtcacaatcaagtctcgcatgttcagcaatttattgtcgtactttatatcgtgttcattaacgatatcttgcaaaatagtaatgattctatcttccttcgatagatattcttcagagattattgtcttatattttttcttgttatccgatatgaatttgataagactttgaacattattgatacccgtctgtttaattttttctacagatattttagttttggcagattctatcgtatctgtcaatagacatccaacatcgacattcgacgtcaattgtctataaatcaacgtataaattttagaaataacattagcgaattgttgtgcattgatgtcgttattctgaaacagtatgattttaggtagcattttcttaacaaagagaacgtatttattgttactcagttgaacagatgatatatccagattactaacgcatctgattccgtataccaaactttcagaagaaatggtgtacaattgtttgtattcattcaatgtctctttttcagaaattagtttagagtcgaatactgcaataattttcaagagatagttttcatcagataagattttatttagtgtagatatgataaaactattgttttgttggagaacttgatacgccgcgttctctgtagtcgacgctctcaaatgggaaacaatctccattatttttttggaatcggatactatatcttcggtatcttgacgcagtctagtatacatagagttaagagagattagagtttgtacattaagcaacatgtctctaaatgtggctacaaacttttcctttttcacataatctagtttattatataccgatttcacaacggcaccagatttaaggaaccagaatgaaaaactctgataactacaatatttcatcatagttacgattttatcatcttctatagttggtgtaatagcgcatacctttttctccaagactggaaccaacgtcataaaaatgtttaaatcaaaatccatatcaacatctgatgcgctaagaccagtctcgcgttcaagattatctttactaatggtgacgaactcatcatatagaactctaagtttgtccattatttatttacagatttagttgtttaatttatttgtgctcttccagagttgggatagtatttttctaacgtcggtattatattattaggatctacgttcatatgtatcataatattaatcatccacgttttgataaatctatctttagcttctgaaataacgtatttaaacaaaggagaaaaatatttagctacggcatcagacgcaataacattttttgtaaatgtaacgtatttagacgacagatcttcgttaaaaagttttccatctatgtagaatccatcggttgttaacaccattcccgcgtcagattgaataggagtttgaatagtttgttttggaaatagatccttcaataacttatagttgggtgggaaaaaatcgattttatcactagactctttcttttttactatcattacctcatgaactatttcttgaatgagtatatgtattttctttcctatatcggacgcgttcattggaaaatataccatgtcgttaactataagaatatttttatcctcgtttacaaactgaataatatcagatgtagttcgtaaacgaactatatcatcaccagcacaacatctaactatatgatatccactagtttcctttagccgtttattatcttgttccatattagcagtcattccatcatttaagaaggcgtcaaagataatagggagaaatgacattttggattctgttacgactttaccaaaattaaggatatacggacttactatctttttctcaacgtcgatttgatgaacacacgatgaaaatgtgcttctatgagattgatcatgtagaaaacaacaagggatacaatatttccgcatatcatgaaatatattaagaaatcccaccttattatatttccccaaaggatccatgcatgtaaacattatgccgttatcattaataaagacttctttctcatcggatttgtaaaagttgttactgatttttttcattccaggatctagataattaataatgatgggttttctattcttattctttgtattttggcatatcctagaccagtaaacagtttccactttggtaaaatcagcagacttttgaacgctattaaacatggcattaatggcaataactaaaaatgtaaaatatttttctatgttaggaatatggtttttcactttaatagatatatggtttttggccaaaatgatagatatttttttatccgaggatagtaaaatattattagtcgccgtctctataaaaatgaagctagtctcgatatccaattttattctagaattgataggagtcgccaaatgtaccttatacgttatatctcccttgatgcgttccatttgtgtatctatatcggacacaagatctgtaaatagttttacgttattaatcatcacggtatcgccgtcgctagataacgctaatgtaccatccaagtcccaaatggagagatttaactgttcatcgtttagaataaaatgattaccggtcatattaataaagtgttcatcgtatctagataacaacgacttataattaatgtccaagtcttgaactcgctgaatgatcttttttaacccagttagttttagattggtacgaaatatattgttaaactttgattctacagtaatgtccaaatctagttgtggaaatacttccatcaacattgtttcaaacttgataatattattatctacatcttcatacgatccaaattccggaatagatgtatcacatgctcttgccacccagataaccaaaaagtcacacgctccaggatatacattgtataaaaagctatcgttttttagtagtgtttttttctgagtatatacgaagggattaaaaatagtattatcaacgtaactatattccaaattattcttatgagaatagataataatatcgtccttaatatctaacaaatttcctaaatatccctttaattgagtcattcgaagcgtcaatagaatatgtctcttaactatttccggctgttgtatatttaaatgacttcgtaaaaaataatatatgggcgacttctcatctatgtaatcatatggagtgagatatagggctcgttctacctcctgccccttacccacctgtaataccaattgcggacttactatatatcgcatatttatatcgtggggtaaagtgaaaatctactaccgatgatgtaagtcttacaatgttcgaaccagtaccagatcttaatttggaggcctccgtagaactaggggaggtaaatatagatcaaacaacacctatgataaaggaaaatagcggttttatatcccgtagtagacgtctattcgcccatagatctaaggatgatgagagaaaactagcactacgattctttttacaaagactttattttttagatcatagagagattcattatttgttcagatgcgttgacgctgtaaaagacgtcactattaccaaaaaaaataacattatcgtggcgccttatatagcacttttaactatcgcatcaaaaggatgcaaacttacagaaacaatgattgaagcattttttccagaactatataatgaacatagtaagaaatttaaattcaactctcaagtatccatcatccaagaaaaactcggataccagtttggaaactatcacgtttatgattttgaaccgtattactctacagtagctctggctattcgagatgaacattcatctggcatttttaatatccgtcaagagagttatctggtaagttcattatctgaaataacatatagattttatctaattaatctaaaatctgatcttgttcaatggagtgctagtacgggcgctgtaattaatcaaatggtaaatactgtattgattacagtgtatgaaaagttacaactggtcatagaaaatgattcacaatttacatgttcattggctgtggaatcaaaacttccaataaaattacttaaagatagaaatgaattatttacaaaattcattaacgagttaaaaaagaccagttcattcaagataagcaaacgcgataaggatacgctactaaaatattttacttaggactggagttagaatttatagacgactcatttcgtttatcattgttactattattactattactatcattattagtgttggcattattagtattcttcttgtcatcttgttcagaaatatacagcaatgctatacctaatactaaatacattatcatgctcgcaatggctctaacaacaacgaaccaaaatgaatttggtcgtagcttttgttcacaaaaatacataaagaaatgtctacataaatctatggcgccattggctacttgaaatagcgccagtcctcctacagattttaatatagctgtataacatgacatttattcatcatcaaaagagacagagtcaccatctgtcatatttagattttttttcatgtgttcaaagtatcctctactcatttcattataatagtttatcatacttagaattttaggacggatcaatgagtaagacttgactagatcgtcagtagtaatttgtgcatcgtctattctgcatccgcttcgtcgaataatgtatagcatcgctttgagattctccatagctatcaagtctttatacaatgacatggaaatatctgtgaatactttatacttctccaacatcgatgccttaacatcatcgcctactttagcattgaaaatacgttctattgtgtagatggatgtagcaagatttttaaacaacaatgccatcttacacgatgattgcctcaagtctccaatcttttgtttagaacgattagctacagagttcaacgcttggctgactagcatattattatctttagaaattgtattcttcaatgaggcgtttatcatatctgtgatttcgttagtcatattacagtctgactgggttgtaatgttatccaacatatcacctatggatacggtacacgtaccagcatttgtaataatcctatctaagatgttgtatggcattgcgcagaaaatatcttctcctgtaatatctccactctcgataaatctactcagattattcttaaatgccttattctctggagaaaagatatcagtgtccatcatttcattaatagtatacgcagaaaagataccacgagtatcaattctatccaagatacttatcggttccgagtcacagataatggtttcctctccttcgggagatcctgcatagaaatatctaggacaatagtttctatactgtctgtaactctgataatctctaaagtcactaactgataccatgaaattgagaagatcaaacgctgaagtaatcaatttttctgcctcgtttttactacaactagttttcatcaatgtagcgacgatgtattgtttagttactcttggtctaatactgatgatagagatattattgcttcccataatggatcttctagtagtcaccttaaagcccattgatgcgaatagcagatagataaagtcttggtatgactcctttctaatatagtacggactacctttgtcacccaactttatacccacataagccataacaacctctttaatagccgtttcatgaggtttatcagccatgagcctgagtagttggaagaatctcatgaatcccgtctcagaaagtcctatatgcatgatagatttatctttcctgggaaactctcgtatagtcatagatgaaatactcttcaaagtttctgaaataagattagtaacagtcttacctccgactactctgggtaacaaacatactctaataggtgttttctctgcggagataatatcagaaaggatagagcaataagtagtattattgtgattataaagaccgaatacataacaggtagaatttataaacatcatgtcctgaaggtttttagacttgtattcctcgtaatccataccgtcccaaaacatggatttggtaactttgatagccgtagatctttgttccttcgccaacaggttaaagaaattaataaagaatttgttgtttctatttatgtccacaaattgcacgtttggaagcgccacggttacattcactgcagcattttgaggatcgcgagtatgaagtacgatgttattgtttactggtatatctggaaagaaatctaccagtctaggaataagagattgatatcgcatagaaatagtaaagtttataatctcatcatcgaagagcattttgttaccattgtaataaatatccactctgtcatatgtataaatgaagtactgttcaaacatgatgagatgtttatatgttggcatagtagtgagatcgacgtttggtaatggcaatgtattaagattaactccataatgtctagcagcatctgcgatgttataagcgtcgtcaaagcggggtcgatcttgtattgttatatattgtctaacacctataagattatcaaaatcttgtctgcttaatacaccgttaacaatttttgccttgaattcttttattggtgcattaataacatccttatagaggatgttaaacaaataagtgttatcaaagttaagatctggatatttcttttctgctagaacatccattgagtcggagccatctggtttaatataaccaccgataaatctagctctgtattctgtatccgtcaatctaatattaagaaggtgttgagtgaaaggtggaagatcgtaaaagctgtgagtattaatgataggattagtttccgaactaatgttaattggggtattaataatatctatatttccagcgttaagtgtaacattaaacagttttaattcacgtgacgtggtatcaattaaataattaatgcccaatttggatatagcagcctgaagctcatcttgtttagttacggatcctaatgagttattaagcaatatatcgaacggatgaacgaaggttgttttaagttggtcacatactttgtaatctagacatagatgcggaagaacggtagaaactatacgaaataaatattcagagtcctctaattgatcaagagtaactattgacttaataggcatcatttatttagtattaaatgacgaccgtaccagtgacggatatacaaaacgatttaattacagagttttcagaagataattatccatctaacaaaaattatgaaataactcttcgtcaaatgtctattctaactcacgttaacaacgtggtagatagagaacataatgccgccgtagtgtcatctccagaggaaatatcctcacaacttaatgaagatctatttccagatgatgattcaccggccactattatcgaacgagtacaacctcatactactattattgacgatactccacctcctacttttcgtagagagttattgatatcggaacaacgtcaacaacgagaaaaaagatttaatattacagtatcgaaaaatgctgaagcaataatggaatctagatctatgataacttctatgccaacacaaacaccatccttgggagtagtttatgataaagataaaagaattcagatgttggaggatgaagtggttaatcttagaaatcaacgatctaatacaaaatcatctgataatttagataattttaccaaaatactatttggtaagactccgtataaatcaacagaagttaataagcgtatagccatcgttaattatgcaaatttgaacgggtctcccttatcagtcgaggacttggatgtttgttcagaggatgaaatagatagaatctataaaacgattaaacaatatcacgaaagtagaaaacaaaaaattatcgtcactaacgtgattattattgtcataaacattatcgagcaagcattgctaaaactcggatttgaagaaatcaaaggactgagtaccgatatcacttcagaaattatcgatgtggagatcggagatgactgcgatgctgtagcatcaaaactaggaatcggtaacagtccggttcttaatattgtattgtttatactcaagatattcgttaaacgaattaaaattatttaatttaatacattcccatatccagacaacaatcgtctggattaatctgttcctgtcgtctcataccggacgacatattaatctttttattagtaggcatctttttagatggtttctttttcccagcattaactgagtcgatacctagaagatcgtgattgatctctccgaccattccacgaacttctaattggccgtctctaacggtaccataaactattttaccagcattagtaacagcttggacaatctgaccatccatcgcattgtacgatgtagtagtaactgttgttctacgtctaggagcaccagaagtatttttggagcccttggaggctgatgtagaagaagacgaggattttgattttggtttacatgtaatacattttgaactctttgattttgtatcacatgcgccggcagtcacatctgtttgagaattaagattattgttgcctcctttgacggctgcatctccaccgatttgcgctagtagatttttaagctgtggtgtaatcttattaactgtttcgatataatcatcgtaactgcttctaacggctaaattttttttatccgccatttagaagctaaaaatatttttatttatacagaagatttaactagattatacaatgaactaatatgatccttttccagattatttacaaacttggtattttttggttctggaggaggcgaatttaaattcggacttggattcggattttgtgagttcttgatcttattatacatcgagtataggatggcgacggtaactgctacacaaataccgatcaacaaaagaataccaatcatttattgacaataacttcactattgatcaagtatgcaatatatcatcttttcactaaataagtagtaataatgattcaacaatgtcgagatatatggacgataataatttagttcatggaaatatcgctatgattggtatgaatgactccgctaactctgtggggcgcgcagtgctttccccacatagaataaattagcattccgactgtgataataataccaagtataaacgccataatactcaatactttccatgtacgagtgggactggtagacttactaaagtcaataaaggcgaagatacacgaaagaatcaaaagaatgattccagcgattagcacgccggaaaaataatttccaatcataagcatcatgtccatttaactaataaaaattttaaatcgccgaatgaacaaagtggaatataaaccatataaaaacaatagtttgtactgcaaaaataatatctatttttgttttcgaagatatggtaaaattaaatagtagtacacagcatgttataactaacagcagcaacggctcgtaattacttatcatttactagacgaaaaggtggtgggatattttcttgctcaaataatacgaatatatcacccatccattttatgcgatgtttatatactctaatctttaatagatctatagacgacgggtttaccaacaatatagattttatcgattcatctaatttaaacccttccttaaacgtgaatgatctattatctggcataacgatgaccctacctgatgaatcggacaatgtactgggccatgtagaataaattatcaacgaattatcgtctacgaacatttatatcatttgttttaattttaggacgcgaataaatagatataaaatagaaaataacagatattacaaccagtgttatggccgcgcccaaccaggtaggcagttttattttatcttttactacaggttctcctggatgtacgtcaccaacggcggacgtagttctagtacaattagacgtaagttccgcttgggaattttttaacgctaaagagttaacgttaatcgtgcacccaacgtatttacatctagttctttgaacatcttgattataatataaccattttctatctctagattcgtcggtgcactcatgtaaccaacataccctaggtcctaaatatttatctccggaattagattttggataattcgcgcaccaacaatttctatttcctttatgatcgttacaaaagacgtataatgccgtatccccaaaagtaaaataatcaggacgaataattctaataaactcagaacaatatctcgcatccatatgtttggagcaaatatcggaataagtagacatagccggtttccgttttgcacgtaaccattctaaacaattggggtttccaggatcgtttctacaaaatccagtcatgaaatcgtcacaatgttctgtcttgtaattattattaaatatttttggacagtgtttggtatttgtcttagaacaacattttgccacgctatcactatcgcccaggagataatccttttttataaaatgacatcgttgcccggatgctatataatcagtagcgtgttttaaatccttaatatattcaggagttacctcgttctgataatagattaatgatccaggacgaaatttgaaagaactacatggttctccatgaattaatacatattgtttagcaaattcaggaactataaaactactacaatgatctatcgacataccatctatcaaacaaaacttgggtttaatttctcccggagatgtttcataatagtacgtataactttcttctgcaaacttaacagctctattatattcaggataattaaaacctaattccatatatttgtctcgtatatctgctattcctggtgctattttgattctattaagagtaacagctgcccccattcttaataatcgtcagtatttaaactgttaaatgttggtatatcaacatctaccttatttcccgcagtataaggtttgttgcaggtatactgttcaggaatggttacatttatacttcttctatagtcctgtctttcgatgttcatcacatatgcaaagaacagaataaacaaaataatgtaagaaataatattaaatatctgtgaattcgtaaatacattgattgccataataattacagcagctacaatacacacaatagacattcccacagtgttgccattacctccacgatacatttgagttactaagcaataggtaataactaagctagtaagaggcaatagaaaagatgagataaatatcatcaatatagagattagaggagggctatatagagccaagacgaacaaaatcaaaccgagtaacgttctaacatcattatttttgaagattcccaaataatcattcattcctccataatcgttttgcatcatacctccatctttaggcataaacgattgctgctgttcctctgtaaataaatctttatcaagcactccagcacccgcagagaagtcgtcaagcatattgtaatatcttaaataactcatttatatattaaaaaatgtcactattaaagatggagtataatctttatgccgaactaaaaaaaatgacttgtggtcaacccctaagtctttttaacgaagacggggatttcgtagaagttgaaccgggatcatcctttaagtttctgatacctaagggattttacgcctctccttccgtaaagacgagtctagtatttgaaacattaacaacgaccgataataaaatcactagtatcaatccaacaaatgcgccaaagttatatcctcttcaacgcaaagtcgtatctgaagtagtttctaatatgaggaaaatgatcgaatcaaaacgtcctctatacattactcttcacttggcgtgtggatttggtaagactattaccacgtgttatcttatggctacacacggtagaaaaaccgtcatttgcgtacccaataaaatgttaatacatcaatggaagacacaggtagaggcagtcggattggaacataagatatccatagatggagtaagtagtctattaaaggaactaaagactcaaagtccggatgtattaatagtagtcagtagacatctgacaaacgatgccttttgtaaatatatcaataagcattatgatttgttcatcttggatgaatcacatacgtataatctgatgaacaatacagcagttacaagatttttagcgtattatcctccgatgatgtgttattttttaactgctacacctagaccagctaaccgaatttattgtaacagtattattaatattgccaagttatccgatctaaaaaaaactatctatgcggtagatagtttttttgagccatattccacagacaatattagacatatggtaaaacgactagatggaccatctaataaatatcatatatataccgagaagttattatctgtagacgagcctagaaatcaacttattcttaataccctggtagaagaattcaagtcaggaactattaatcgcattttagttattactaaactacgtgaacatatggtattattctacaaacgattattagatcttttcggaccagaggttgtatttataggagacgcccaaaatagacgtactccagatatggtcaaatcaatcaaggaactaaatagatttatattcgtatccaccttattttattccggtactggtttagatattcctagtttggattcgttgttcatttgctcggcagtaatcaacaatatgcaaatagagcaattactagggagggtatgtcgagaaacagaactattagataggacggtatatgtatttcctaacacatccatcaaagaaataaagtacatgataggaaatttcatgcaacgaattattagtctgtctgtagataaactaggatttaaacaagaaagttatcggaaacatcaagaatccgatcccacttctgtatgtacaacatcctccagagaagaacgtgtattaaatagaatatttaactcgcaaaatcgttaagaagtttaagcgacgatccgcatgctgcgcaggccagtgtattacccctcatagtattaatataatccaatgatacttttgtgatgtcggaaatcttaaccaatttagactgacaggcagaacacgtcatgcaatcatcatcgtcatcgataactgtagtcttgggcttctttttgcggctcttcattccggaacgcacattggtgctatccatttaggtagtaaaaaataagtcagaatatgccctataacacgatcgtgcaaaacctggtatatcgtctctatctttatcacaatatagtgtatcgacatctttattattattgacctcgtttatcttggaacatggaatgggaacatttttgttatcaacggccacctttgccttaattccagatgttgtaaaattataactaaacagtctatcatcgacacaaatgaaattcttgtttagacgtttgtagtttacgtatgcggctcgttcgcgtctcattttttcagatattgcaggtactataatattaaaaataagaatgaaataacataggattaaaaataaagttatcatgacttctagcgctgatttaactaacttaaaagaattacttagtctgtacaaaagtttgaaattttcagattctgcggctatagaaaagtataattctttggtagaatggggaacatctacttactggaaaataggcgtgcaaaaggtagctaatgtcgagacgtcaatatctgattattatgatgaggtaaaaaataaaccgtttaatattgatccgggctattacattttcttaccggtatattttgggagcgtctttatttattcgaagggtaaaaatatggtagaacttggatctggaaactcttttcaaataccagatgatatgcgaagtgcgtgtaacaaagtattagacagcgataacggaatagactttctgagatttgttttgttaaacaatagatggataatggaagatgctatatcaaaatatcagtctccagttaatatatttaaactagctagtgagtacggattaaacatacccaaatatttagaaattgaaatagaggaagacacattatttgacgacgagttatactctattatagaacgctcttttgatgataaatttccaaaaatatccatatcgtatattaagttgggagaacttaggcggcaagttgtagactttttcaaattctcgttcatgtatattgagtccatcaaggtagatcgtataggagataatatttttattcctagcgttataacaaaatcaggaaaaaagatattagtaaaagatgtagaccatttaatacgatctaaggttagagaacatacatttgtaaaagtaaaaaagaaaaacacattttccattttatacgactatgatgggaacggaacagaaactagaggagaagtaataaaacgaattatagacactataggacgagactattatgttaacggaaagtatttctctaaggttggtagtgcaggcttaaagcaattgactaataaattagatattaatgagtgcgcaactgtcgatgagttagttgatgagattaataaatccggaactgtaaaacgaaaaataaaaaaccaatcagcatttgatttaagcagagaatgtttgggatatccagaagcagattttataacgttagttaataacatgcggttcaaaatagaaaattgtaaggttgtaaatttcaatattgaaaatactaattgtttaaataacccgagtattgaaactatatatggaaactttaaccagttcgtctcaatctttaatatcgtcaccgatgtcaaaaaaagattattcgagtgaaataatatgcgcctttgatataggtgcaaaaaatcctgccagaactgttttagaagtcaaggataactccgttagggtattggatatatcaaaattagactggagttctgattgggaaaggcgcatagctaaagatttgtcacaatatgaatacactacagttcttctagaacgtcagcctagaaggtcgccgtatgttaaatttatctattttattaaaggctttttatatcatacatcggctgccaaagttatttgcgtctcgcctgtcatgtctggtaattcatatagagatcgaaaaaagagatcggtcgaagcatttcttgattggatggacacattcggattgcgagactccgttccggatagacgcaaattagacgatgtagcggatagtttcaatttggctatgagatacgtattagataaatggaatactaattatacaccttataataggtgtaaatctagaaattacataaaaaaaatgtaataacgttagtaacgccattatggataatctatttacctttctacatgaaatagaagatagatatgccagaactatttttaactttcatctaataagttgcgatgaaataggagatatatatggtcttatgaaagaacgcatttcctcagaggatatgtttgataatatagtatataataaagatatacatcctgccattaagaaactagtgtattgcgacatccaacttactaaacacattattaatcagaatacgtatccggtatttaacgattcttcacaagtgaaatgttgtcattatttcgacataaactcagataatagcaatattagctctcgtacagtagagatatttgagagggaaaagtcatctcttgtatcatatattaaaactaccaataagaagagaaaggtcaattacggcgaaataaagaaaactgttcatggaggcactaatgcaaattacttttccggtaaaaagtctgacgagtatctgagtactacagttagatccaacattaatcaaccttggatcaaaaccatttctaagagaatgagagtagatatcattaatcactctatagtaacgcgtggaaaaagctctatattacaaactatagaaattatttttactaatagaacatgtgtgaaaatattcaaggattctactatgcacattattctatccaaggacaaggatgaaaaggggtgtatacacatgattgacaaattattctatgtctattataatttatttctgttgttcgaagatatcatccaaaacgagtactttaaagaagtagctaatgttgtaaaccacgtacttacggctacggcattagatgagaaattattcctaattaagaaaatggctgaacacgatgtttatggagttagcaatttcaaaatagggatgtttaacctgacatttattaagtcgttggatcataccgttttcccctctctgttagatgaggatagcaaaataaagttttttaaggggaaaaagctcaatattgtagcattacgatctctggaggattgtataaattacgtgactaaatccgagaatatgatagaaatgatgaaggaaagatcgactattttaaatagcatagatatagaaacggaatcggtagatcgtctaaaagaattgcttctaaaatgaaaaaaaacactgattcagaaatggatcaacgactagggtataagtttttggtgcctgatcctaaagccggagttttttatagaccgttacatttccaatatgtatcgtattctaattttatattgcatcgattgcatgaaatcttgaccgtcaagcggccactcttatcgtttaagaataatacagaacgaattatgatagaaattagcaatgttaaagtgactcctccagattactcacctataatcgcgagtattaaaggtaagagttatgatgcattagccacgttcactgtaaatatctttaaagaggtaatgaccaaagagggtatatccatcactaaaataagtagttatgagggaaaagattctcatttgataaaaattccgctactaataggatacgggaataaaaatccacttgatacagccaagtatcttgttcctaatgtcataggtggagtctttatcaataaacaatctgtcgaaaaagtaggaattaatctagtagaaaagattacaacatggccaaaatttagggttgttaagccaaactcattcactttctcgttttcctccgtatcccctcctaatgtattaccgacaagatatcgccattacaagatatctctggatatatcacaattggaagcgttgaatatatcatcgacaaagacatttataacggtcaatattgttttgctgtctcaatatttatctagagtgagtctagaattcattagacgtagtttatcatacgatatgcctccagaagttgtctatctagtaaacgcgataatagatagtgctaaacgaattactgaatctattactgactttaatattgatacatacattaatgacctggtggaagctgaacacattaaacaaaaatctcagttaacgatcaacgagttcaaatatgaaatgctgcataactttttacctcatatgaactatacacccgatcaactaaagggattttatatgatatctttactaagaaagtttctctactgtatctaccacacttctagatatccagatagagattcgatggtttgtcatcgcatcctaacgtacggcaaatattttgagacgttggcacatgatgaattagagaattacataggcaacatccgaaacgatatcatgaacaatcacaagaacagaggcacttacgcggtaaacattcatgtactaacaactcccggacttaatcacgcgttttctagcttattgagtggaaagttcaaaaagtcagacggtagttatcgaacacatcctcactattcatggatgcagaatatttctattcctaggagtgttggattttatccggatcaagtaaagatttcaaagatgttttctgtcagaaaataccatccaagtcaatatctttacttttgttcatcggacgttccggaaagaggtcctcaggtaggtttagtatctcaattgtctgtcttgagttccattacaaatatactaacgtctgagtatttggatttggaaaagaaaatttgtgagtatatcagatcatattataaagatgatataagttactttgaaacaggatttccaatcactatagaaaatgctctagtcgcatctcttaatccaaatatgatatgtgattttgtaactgactttagacgtagaaaacggatgggattcttcggtaacttggaggtaggtattactttagttagggatcacatgaatgaaattcgcattaatattggagcgggaagattagtcagaccattcttggttgtggataacggagagctcatgatggatgtgtgtccggagttagaaagcagattagacgacatgacattctctgacattcagaaagagtttccgcatgtcatcgaaatggtagatatagaacaatttacttttagtaacgtatgtgaatcggttcaaaaatttagaatgatgtcaaaggatgaaagaaagcaatacgatttatgtgactttcctgccgaatttagagatggatatgtggcatcttcattagtgggaatcaatcacaattctggacccagagctattcttggatgtgctcaagctaaacaagctatctcttgtctgagttcggatatacgaaataaaatagacaatggaattcatttgatgtatccagagaggccaatcgtgattagtaaggctttagaaacttcaaagattgcggctaattgcttcggccaacatgttactatagcattaatgtcgtacaaaggtatcaatcaagaggatggaattatcatcaaaaaacaatttattcagagaggcggtctcgatatagttaccgcaaagaaacatcaagtagaaattccgttggaaaactttaataacaaagaaagagataggtctaacgcctattcaaaattagaaagtaatggattagttagactgaatgctttcttggaatccggagacgctatggcacgaaatatctcatcaagaactcttgaagatgattttgctagagataatcagattagcttcgatgtttccgagaaatataccgatatgtacaaatctcgcgttgaacgagtacaagtagaacttactgacaaagttaaggtacgagtattaaccatgaaagaaagaagacccattctaggagataaatttaccactagaacgagtcaaaagggaacagtcgcgtatgtcgcggatgaaacggaacttccatacgacgaaaatggtatcacaccagatgtcattattaattctacatccatcttctctagaaaaactatatctatgttgatagaggttattttaacagccgcatattctgctaagccgtacaacaataagggagaaaaccgacctgtctgttttcctagtagtaacgaaacatccatcgatacatatatgcaattcgctaaacaatgttatgagcattcaaatccgaaattgtccgatgaagaattatcggataaaatcttttgtgaaaagattctctatgatcctgaaacggataagccttatgcatccaaagtattttttggaccaatttattacttgcgtctgaggcatttaactcaggacaaggcaaccgttagatgtagaggtaaaaagacgaagctcattagacaggcgaatgagggacgaaaacgtggaggaggtatcaagttcggagaaatggagagagactgtttaatagcgcatggcgcagccaatactattacagaagttttaaaagactcagaagaggattatcaagatgtgtatgtttgtgaaaattgtggagacatagcagcacaaatcaagggtattaatacatgtcttagatgttcaaaacttaatctctctcctctcttaacaaaaattgataccacgcacgtatctaaagtatttcttactcaaatgaacgccagaggcgtaaaagtcaaattagatttcgaacgaaggcctccttcgttttataaaccattagataaagttgatctcaagccgtcttttctggtgtaatattctagtttggtagtagatacatatcaatatcatcaaattcgagatccgaattataaaatgggcgtggattgttaactatagaatcggacgtctgatattcgaaaatctgtggagttttaggttttggtggaggtgtaactgctacttgggatactgaagtctgatattcagaaagctgggggatgttctggttcgacatccaccgatggtgtcacatcactaatcggttcggtaacgtctgtggatggaggtgctacttctacagaacctgtagcctcagttgtcaacggagatacatttttaatgcgaggaaatgtataatttggtaatggtttctcatgtggatctgaagaagaggtaagatatctactagaaagataccgatcacgttctagttctcttttgtagaacttaactttttctttctcagcatctagttgatattccaacctcttcacgttactacgttcagattccaattcacgttcgcatgggttacctccgcagtttttacgagcgatttcacgttcagccttcatgcgtctctccttctctctatcgagtttatcagagcagtctttctgaaggcgatcgaactccataaatttctccaacgctttgattgtttccatagatttccgaagttcagcttttaggactgtgattctttttctttcgaattcacagctggatgtgcaaccgtttccattaccgccatctctaagtttcttttctagatcggcaacatttcatccccatgccttttacattcctcgagtctactgtcgtcgaaatatcgttccagctccttttcgacatcaataactttagcacgttgtctctcaagctctcttttgtagttatctgattccctggcacgtttaagatcttcatgcaattgagtcagctcttaacacaatctcttgcttcttcgtcatagtacttacaatcactatgggatccattgttaccacgtctacactcggcgagctcgcgtttaagagattcaatttcccgtttgtattggtccatgtttccattgctaccaccattagatttacaggctgctagttgtcgttcgagatcagaaatacgggttttcttggaattgatttcgtcgatgtacttggcatcgaaacacttattaagttctttttccaattctacgattttatttctttcgcgagtcaattccctcctgtagtaactatctgttttgtcagattcacgctctctacgtagactttcttgcaagttactaatttgttccctagcacgtccgagtttagttttatatgctgaatagagttctgattcatcctttgagcagatctctagcgatcgtttaagattcctgattctagtctttagcctatttacctcctcagaagatgttccgttaccgttgcgtttacactcgttaagctgtctatcaagatccatgattctatctctaagacgttgcatctctctttccatatcagcattgctttcattattacgtctgcagtcactcaactgtctttcaatatctgagattctatctctaagacgtcgcatctctctctgtttcggcattggtttcattattacgtctacagtcgttcaactgtctttcaagatctgatattctagattggagtctgctaatctctgtagcattttcacggcattcactcagttgtctttcaagatctgagattttagattggagtctgctaatctctgtaagatttcctcctccgctctcgatgcagtcggtcaacttattctctagttctctaatacgcgaacgcagtgcatcaacttcttgcgtgtcttcctggttgcgtgtacattcatcgagtctagattcgagatctctaacgcgtcgtcgttcttcctcaagttctctgcgtactacagaaagcgtgtccctatcttgttgatatttagcaatttctgattctagagtactgattttgcttacgtagttactaatagttgtcttggccttatcaagatcctccttgtatttgtcgcattccttgatatccctacgaagtctggacagttcccattcgacattacgacgtttatcgatttcagctcggagatcgtcatcgcgttgttttagccacatacgactgagttcaagttctcgttgacaagatccatctacttttccattcctaatagtatccagttccttttctagttctgaacgcatttctcgttccctatcaagcgattctctcaattctcggatagtcttcttatcaatttctaataaatctgaaccatcatctgtcccattttgaatatccctgtgttctttgatctcttttgtaagtcggtcgattctttcggttttataaacagaatccctttccaaagtcctaatcttactgagtttatcactaagttctgcattcaattcggtgagttttctcttggcttcttccaactctgttttaaactctccactatttccgcattcttcctcgcatttatctaaccattcaattagtttattaataactagttggtaatcagcgattcctatagccgttcttgtaattgtgggaacataattaggatcttctaatggattgtatggcttgatagcatcatctttatcattattagggggatggacaaccttaattggttggtcctcatctcctccagtagcgtgtggttcttcaataccagtgttagtaataggcttaggcaaatgcttgtcgtacgcgggcacttcctcatccatcaagtatttataatcgggttctacgtctgaatattcttttctaagagacgcgacttcgggagttagtagaagaactctgtttctgtatctatcaacgctggaatcaatactcaagttaaggatagcgaatacctcatcgtcatcatccgtatcttctgaaacaccatcatatgacatttcatgaagtctaacgtattgataaatagaatcagatttagtattaaacagatccttaacctttttagtaaacgcatatgtatattttagatctccagatttcataatatgatcacatgccttaaatgtcagtgcttccatgatataatctggaacactaatgggtgacgaaaaagatacagcaccatatgctacgttgataaataaatctgaaccactaagtagataatgattaatgttaaggaagaggaaatattcagtatatagatatgccttagcatcatatcttgtactaaacacgctaaacagtttattgatgtgatcaatttccaacagaataattagagcagcgggaataccaacaaacatattaccacatccgtattttctatgaatatcacatatcatgttaaaaaatcttgatagaagagcgaatatctcgtctgacttaatgagtcgtagttcagcagcaacataagtcataactgtaaatagaacatactttcctgtagtgttgattctagactccacatcaacaccattattaaaaatagttttatatacatctttaatctgctctccgttaatcgtcgaacgttctagtatacggaaacactttgatttcttatctgtagttaatgacttagtgatatcacgaagaatattacgaattacatttcttgtttttcttgagagacctgattcagaactcaactcatcgttccatagtttttttacctcagtggcgaaatctttggagtgcttggtacatttttcaataaggttcgtgacctccatttattataaaaaattttattcaaaacttaactacaatcgggtaattataaaatcgtagatctcccatgtggtggaatactaccatctatcgcatgtggatggacagtaggtaatggccatgggaacagtaatgtttgcatatttatctttcttgccagtattactgcatattgtcccaatgtttcgatgtgatgttctaacctatcaactgccgctgtatcacaacaatagtgtccgatgaaattaagattatgatccaatgtgtttaatatatgattatcaagtcttatacgatccgcgtcttttttgacaggatcaggttcttctacaggaagaagtttcggcctcttatgatattcatgtctgggaaacggtggtctagggtgaggctccggtatcggagtgggttttggattataatcatcatcgtctatgacatcatcttcgacttcgatatttattttgctatcttgatgatgtcctgtatcagttgcattttcagcactcgactgaatattagcgcattcattgtctattattaccatatttctaaacccaaaatgtatgtgttgaacatcagtactatcgttgatgagtcttatagcatgaattcgcttatcgttatcgggtttatcttctgtcaccttagcaattccttttttattaaactctacataatcatatccatttctattgtttgttctaatataaacgagtatagcatcattgctaaatttttcaatagtatcgaaaacagaatatcctaaaccatataatatatattcagggacactcaaactaaatgtccaggattctcctaaatacgtaaactttaatagtgcgaaatcattcaaaaatctaccacttatagatagatagtacataaatgcgtatagtagtctacctatctctttattatgaaaaccggcattacgatcatatatgtcgtgatatacctgtgatccgtttacgttaaaccataaatacatgggtgatcctataaacatgaatttatttctaattctcagagctatagttaattgaccgtgtaatatttgcttacatgcatacttgatacgctcattaataaaatttttatcattgctcgttatctcagaatcgtatatataaggagtaccatcgtgattcttaccagatattatacaaaatactatatataaaatatattgaccaacgttagtaatcatataaatgtttaacgttttaaattttgtattcaatgatccattatcatacgctagcatggtcttatgatattcattctttaaaatataatattgtgttagccattgcattggggctcctaatggagattttttattctcatccattttaggataggctttcataaagtccctaataacttcgtgaataatgtttctatgttttctactgatgcatgtatttgcttcgatttttttatcccatgtttcatctatcatagatttaaacgcagtaatgctcgcaacattaacatcttgaaccgttggtacaattccgttccataaatttataatgttcgccatttatataactcattttttgaatatacttttaattaacaaaagagttaagttactcatatgggcgccgtccagtctgaacatcaatctttttagccagagatatcatagccgctcttagagtttcagcgtgattttccaacctaaatagaacttcatcgttgcgtttacaacacttttctatttgttcaaactttgttgttacattagtaatctttttttccaaattagttagccgttgtttgagagtttcctcattgtcgtcttcatcggctttaacaattgcttcgcgtttagcctctggctttttagcagcctttgtagaaaaaaattcagttgctggaattgcaagatcgtcatctccggggaaaagagttccgtccatttaaagtacagattttagaaactgacactctgcgttatttatatttggtacaacacatggattataaatatcgatgttaataacatcagaaaatgtaaagtctatacattgttgcatcgtgttaaattttctaatggatctagtattattgggtccaacttctgcctgaaatccaaatatggaagcggatacaaaaccgtttcctggataaaccacacatctccacttttgctttacatcagaaattgtgtcgttgacatcttgaactctcctatctaatgccggtgttccacctatagattttgaatattcgaatgctgcatgagtagcattaaattccttaatattgccataattttcatatattgagtaaccctggataaaaagtaaacacaccgcagccgtcgctaccacaataaaaaaaattgatagagagttcatttataatctattagaagctgacaaaatttttttacacgcatcagacaatgctttaataaatagttcaacatctacttttgtcatatcgaaccgatggtatgattctaacctagaattacatccgaaaaagttgactatgttcatagtcattaagtcattaacaaacaacattccagactctggattataagacgatactgtttcgtcacaattacctaccttaatcatgtgattatgaatattggctattagagcaccttctaagaaatctataatatctttgaaacacgatttaaaatcaaaccacgaatatacttctacgaagaaagttagtttacccataggagaaataactataaatggagatctaaatacaaaatccggatctatgatagttttaacattattatattctctattaaatacctccacatctaaaaatgttaattttgaaactatgtcttcgtttattaccgtacctgaactaaacgctataagctctattgtttgagaactctttaaacgatattcttgaaatacatgtaacaaagtttcctttaactcggtcggtttatctaccatagttacagaatttgtatccttatctataatataataatcaaaatcgtataaagttatataattatcgcgttcagattgggatcttttcaaatagactaaaaaccccatttctctagtaagtatcttatgtatatgtttgtaaaatatcttcatggtgggaatatgctctaccgcagttagccattcctcattgacagcggtagatgtattagacaaaactattccaatgtttaacaagggccattttacgagattattaaatccttgtttgataaatgtagccaatgagggttcgagttcaacgacgattgaattctcttcccgcggatgctgcatgatgaacgacgggatgttgttcgattgatttggaattctttttcgactttttgtttatattaaatattttaaaatttatagcggatagcaattcatgtaccacggataatgtagacgcgtattgcgcatcgatatctttattattagataaatttatcaataaatgtgagaagtttgcctcgttaaggtcttccatttaaatattatataaacatttgtgtttgtatcttattcgtcttttatggaatagttttttactagtaaagctgcaattacacactttgtccgtaaaacataaatataaacaccagcttttatcaatcgttccaaaaagtcgacggcggacatttttaacatggcatctattttaaatacacttaggtttttggaaaaaacatcattttataattgtaacgattcaataactaaagaaaagattaagattaaacataagggaatgtcatttgtattttataagccaaagcattctaccgttgttaaatacttgtctggaggaggtatatatcatgatgatttggttgtattggggaaggtaacaattaataatctaaagatgatgctattttacatggatttatcatatcatggagtgacaagtagtggagcaatttacaaattgggatcgtctatcgatagactttctctaaataggactattgttacaaaagttaataattatgatgatacattttttgacgacgatgattgatcgctattgcacaattttgtttttttactttctaatatagcgtttagattctttttcatgtgcgaatattgatttactaaaatatcgatgtttaacttttgttctatgacgtccttatcagcggtatcggtacatatacgtaattcaccttcacaaaatacggagtcttcgataataatagccaatcgattattggatctagctgtctgtatcatattcaacatgtttaatatatcctttcgtttcccctttacaggcatcgatcgtagcatattttccgcgtctgagatggaaatgttaaaactacaaaaatgcgtaatgttagcccgtcctaatattggtacgtgtctataagtttggcatagtagaataatagacgtgtttaaatgccttccaaagtttaagaattctattagagtattgcattttgatagtttatcacctacatcatcaaaaataagtaaaaagtgtgctgattttttatgattttgtgcgacagcaatacatttttctatgttacttttagttcgtatcagattatattctagagattcctgactactaacgaaattaatatgatttggccaaatgtatccatcataatctgggttataaacgggtgtaaacaagaatatatgtttatattttttaactagtgtagaaaacagagatagtaaatagatagtttttccagatccagatcctcccgttaaaaccattctaaacggcatttttaataaattttctcttgaaaattgtttttcttggaaacaattcataattatatttacagttactaaattaatttgataataaatcaaaatatggaaaactaaggtcgttagtagggaggagaacaaagaaggcacatcgtgacataaataacatttattatcatgatgacaccagaaaacgacgaagagcagacatctgtgttctccgctactgtttacggagacaaaattcaaggaaagaataaacgcaaacgcgtgattggtctatgtattagaatatctatggttatttcactactatctatgattaccatgtccgcgtttctcatagtgcgcctaaatcaatgcatgtctgctaacgaggctgctattactgacgccgctgttgccgttgctgctgcatcatctactcatagaaaggttgcgtctagcactacacaatatgatcacaaagaaagctgtaatggtttatattaccagggttcttgttatatattacattcagactaccagttattctcggatgctaaagcaaattgcactgcggaatcatcaacactacccaataaatccgatgtcttgattacctggctcattgattatgttgaggatacatggggatctgatggtaatccaattacaaaaactacatccgattatcaagattctgatgtatcacaagaagttagaaagtatttttgtgttaaaacaatgaactaatatttatttttgtacattaataaatgaaatcgcttaatagacaaactgtaagtaggtttaagaagttgtcggtgccggccgctataatgatgatactctcaaccattattagtggcataggaacatttctgcattacaaagaagaactgatgcctagtgcttgcgccaatggatggatacaatacgataaacattgttatttagatactaacattaaaatgtctacagataatgcggtttatcagtgtcgtaaattacgagccagattgcctagaccggatactagacatctgagagtattgtttagtattttttataaagattattgggtaagtttaaaaaagaccaatgataaatggttagatattaataatgataaagatatagatattagtaaattaacaaattttaaacaactaaacagtacgacggatgctgaagcgtgttatatatacaagtctggaaaactggttaaaacagtatgtaaaagtactcaatctgtactatgtgttaaaaaattctacaagtgacaacaaaaaatgaattaataataagtcgttaacgtacgccgccatggacgccgcgtttgttattactccaatgggtgtgttgactataacagatacattgtatgatgatctcgatatctcaatcatggactttataggaccatacattataggtaacataaaaactgtccaaatagatgtacgggatataaaatattccgacatgcaaaaatgctactttagctataagggtaaaatagttcctcaggattctaatgatttggctagattcaacatttatagcatttgtgccgcatacagatcaaaaaataccatcatcatagcatgcgactatgatatcatgttagatatagaagataaacatcagccattttatctattcccatctattgatgtttttaacgctacaatcatagaagcgtataacctgtatacagctggagattatcatctaatcatcaatccttcagataatctgaaaatgaaattgttgtttaattcttcattctgcatatcagacggcaatggatggatcataattgatgggaaatgcaatagtaattttttatcataaaagttgtaaagtaaataataaaacaataaatattgaactagtagtacgtatattgagcaatcagaaatgatgctggtacctcttatcacggtgaccgtagttgcgggaacaatattagtatgttatatattatatatttgtaggaaaaagatacgtactgtctataatgacaataaaattatcatgacaaaattaaaaaagataaagagttctaattccagcaaatctagtaaatcaactgatagcgaatcagactgggaggatcactgtagtgctatggaacaaaacaatgacgtagataatatttctaggaatgagatattggacgatgatagcttcgctggtagtttaatatgggataacgaatccaatgtcatggcgcctagcacagaacacatttacgatagtgttgctggaagcacgctgctaataaataatgatcgtaatgaacagactatttatcagaacactacagtagtaattaatgagacggagactgttgaagtacttaatgaagataccaaacagaatcctaactattcatccaatcctttcgtaaattataataaaaccagtatttgtagcaagtcaaatccgttcattacagaactcaacaataaatttagtgagaataatccgtttagacgagcacatagcgatgattatcttaataagcaagaacaagatcatgaacacgatgatatagaatcatcggtcgtatcattggtgtgattagtttcctttttataaaattgaagtaatatttagtattattgctgccgtcacgttgtacaaatggagatattccctgtattcggcatttctaaaattagcaattttattgctaataatgactgtagatattatatagatacagaacatcaaaaaattatatctgatgagatcaatagacagatggatgaaacggtacttcttaccaacatcttaagcgtagaagttgtaaatgacaatgagatgtaccatcttattccccatagactatcgactattatactctgtattagttctgtcggaggatgtgttatctctatagataatgacatcaatgacaaaaatattctaacatttcccattgatcatgctgtaatcatatccccactgagtaaatgtgtcgtagttagcaagggtcctacaaccatattggttgttaaagcggatatacccagcaaacgattggtaacatcgtttacaaacgacatactgtatgtaaacaatctgtcactgattaattatttgccgttgtctgtattcattattagacgagtcaccgactatttggatagacacatatgcgatcagatatttgcgaataataagtggtattccattataaccatcgacgataagcaatatcctattccatcaaactgtataggtatgtcctctgccaagtacataaattctagcatcgagcaagatactttaatacatgtttgtaacctcgagcatccattcgacttagtatacaaaaaaatgcagtcgtacaattctgtacctatcaaggaacaaatattgtacggtagaattgataatataaatatgagcattagtatttctgtggattaatagatttctagtatggggatcattaatcatctctaatctctaaatacctcataaaacgaaaaaaaagctattatcaaatactgtacggaatggattcattctcttctctttttatgaaactctgttgtatatctactgataaaactggaagcaaaaaatctgataaaaagaataagaataagatcaaggattatatggaacacgattattataaaataacaatagttcctggttcctcttccacgtctactagctcgtggtattatacacatgcctagtaatagtctctttgcgttgacggaaagcagactagaaataacaggctaaaatgttcagacaccataatagttcccaacccagataataacagagtaccatcaacacattcctttaaactcaatcccaaacccaaaaccgttaaaatgtatccggccaattgatagtagataatgaggtgtacagcgcatgataatttacacagtaaccaaaatgaaaatactttagtaattataagaaatatagatggtaacgtcatcatcaacaatccaataatatgccggagagtaaacattgacggataaaacaaaaatgctccgcataactctatcatggcaataacacaaccaaatacttgtaagattcctaaattagtagaaaatacaacggatatcgatgtataagtgatctcgagaaataataagaataaagtaatgcccgtaaagataaacatcaacattgtttggtaatcattaaaccaattagtatgaagttgaactaatttcacagtagattttattccagtgttatcctcgcatgtatacgtacctggtaagatatctttatattctataatcaatgagacatcactatccgataacgaatgaagtctagcactagtatgccatttacttaatatggtcgtcttggaagttttattataagttaaaatatcatggttgtccaatttccatctaatatactttgtcggattatctatagtacacggaataatgatggtattattacatgctgtatactctatagtctttgtagatgttataatcataaaagtacagaggtatatcaacgatattctaactcttgacattttttatttatttaaaatgatacctttgttatttattttattctattttgctaacggtatcgaatggcataagtttgaaacgagtgaagaaataatttctacttacttattagacgacgtattatacacgggtgttaatggggcggtatacacattttcaaataataaactaaacaaaactggtttagctaatactaattatatcacaacatctataaaagtagaggatgcggataaggatacattagtatgcggaaccaataacggaaatcccaaatgttggaaaatagacggttcagacgacccaaaacatagaggtagaggatacgctccttatcaaaatagcaaagtaacgataatcagtcacaacggatgtgtactatctgacataaacatatcaaaagaaggaattaaacgatggagaagatttgacggaccatgtggttatgatttatacacggcggataacgtaattccaaaagatggtttacgaggagcattcgtcgataaagatggtacttatgacaaagtttacattcttttcactgatactatcggctcaaagagaattgtcaaaattccgtatatagcacaaatgtgcctaaacgacgaaggtggtccatcatcattgtctagtcatagatggtcgacgtttctcaaagtcgaattagaatgtgatatcgacggaagaagttatagacaaattattcattctagaactataaaaacagataatgatacgatactatatgtattcttcgatagtccgcattatgtacctattctatgaataccattaaacaatctttttctacgtcaaaattggaaggatatacaaagcaattgccgtctccagctcctggtatatgtctaccagctggaaaagttgttccacataccacgtttgaagtcatagaaaaatataatgtactagatgatattataaagcctttatctaaccaacctatcttcgaaggaccgtctggtgttaaatggttcgatataaaggagaaggaaaatgaacatcgggaatatagaatatacttcataaaagaaaattctatatattcgttcgatacaaaatctaaacaaactcgtagctcgcaagtcgatgcgcgactattttcagtaatggtaacttcgaaaccgttatttatagcagatatagggataggagtaggaatgccacaaatgaaaaaaatacttaaaatgtaatcttaatcgagtacaccacacgacaatgaacaaacataagacagattatgctggttatgcttgctgcgtaatatgcggtctaattgttggaattatttttacagcgacactattaaaagttgtagaacgtaaattagttcatacaccatcaatagataaaacgataaaagatgcatatattagagaagattgtcctactgactggataagctataataataaatgtatccatttatctactgatcgaaaaacctgggaggaaggacgtaatgcatgcaaagctctaaatccaaattcggatctaattaagatagagactccaaacgagttaagttttttaagaagcattagacgcggatattgggtaggagaatccgaaatattaaaccagacaaccccatataattttatagctaagaatgccacgaagaatggaactaaaaaacggaaatatatttgtagcacaacgaatactcccaaactgcattcgtgttacactatataacaattacactacatttttatcataccactacttcggttagatgttttagaaaaaaataaatatcgccgtaccgttcttgtttttataaaaataacaattaacaattatcaaattttttctttaatattttacgtggttgaccattcttggtggtaaaataatctcttagtgttggaatggaatgctgtttaatgtttccacactcatcgtatattttgacgtatgtagtcacatcgtttacgcaatagtcagactgtagttctatcatgcttcctacattagaaggaggaacagttttaaagtctcttggttttaatctattaccgttagttttcatgaaatcctttgttttatccacttcacattttaaataaatgtccactatacattcttctgttaattttactagatcgtcatgggtcatagaatttataggttccgtagtccatggatccaaactagcaaacttcgcgtatacggtatcgcgattagtgtatacaccaactgtatgaaaattaagaaaacagtttaatagatcaacagaaatatttaatcctccgtttgatacagatgcaccatatttatggattttggattcacacgttgtttgtctgaggggttcgtctagcgttgcttctacataaacttctattcccatatattctttattgtcagaatcgcataccgatttatcatcatacactgtttgaaaactaaatggtatacacatcaaaataacaaatactaacgagtacattctgcaatattgttatcgtaattggaaaaatagtgttcgagtgagttggattatgtgagtattggattgtatattttattttatattttgtaataagaataaaatgctaatgtcaagtttattccaatagatgtcttattaaaaacatatataataaataacaatggctgaatggcataaaattatcgaggatatctcaaaaaataataagttcgaggatgccgccatcgttgattacaagactacaaagaatgttctagctgctattcctaacagaacatttgccaagattaatccgggtgaaattattcctctcatcactaatcgtaatattctaaaacctcttattggtcagaaatattgtattgtatatactaactctctaatggatgagaacacgtatgctatggagttgcttactgggtacgcccctgtatctccgatcgttatagcgagaactcataccgcacttatatttttgatgggtaagccaacaacatccagacgtgacgtgtatagaacgtgtagagatcacgctacccgtgtacgcgcaactggtaattaaaataaaaagtaatattcatatgtagtgtcaattttaaatgatgatgatgaaatggataatatccatattgacgatgtcaataatgccggtattggcatacagctcatcgatttttagatttcattcagaggatgtggaattatgttatgggcatttgtattttgataggatctataatgtagtaaatataaaatataatccgcatattccatatagatataattttattaatcgcacgttaaccgtagatgaactagacgataatgtcttttttacacatggttattttttaaaacacaaatatggttcacttaatcctagtttgattgtctcattatcaggaaacttaaaatataatgatatacaatgctcagtaaatgtatcgtgtctcattaaaaatttggcaacgagtacatctactatattaacatctaaacataagacttattctctacatcggtccacgtgtattactataataggatacgattctattatatggtataaagatataaatgacaagtataatggcatctatgattttactgcaatatgtatgctaatagcgtctacattgatagtgaccatatacgtgtttaaaaaaataaaaatgaactcttaattatgctatgctattagaaatggataaaatcaaaattacggttgattcaaaaattggtaatgttgttaccatatcgtataacttggaaaagataactattgatgtcacacctaaaaagaaaaaagaaaaggatgtattattagcgcaatcagttgctgtcgaagaggcaaaagatgtcaaggtagaagaaaaaaatattatcgatattgaagatgacgatgatatggatgtagaaagcgcataatacgatctataaaaataagtatataaatactttttatttactgtactcttactgtgtagtggtgataccctactcgattatttttttaaaaaaatacttattctgattcttctagccatttccgtgttcgttcgaatgccacatcgacgttaaagataggggagtagttgaaatctagttctgcattgttggtacgcacctcaaatgtagtgttggatatcttcaacgtatagttgttgagtagtgatggttttctaaatagaattctcttcatatcattcttgcacgcgtacatttttagcatccatcttggaattctagatccttgttctattcccaatggtttcatcaatagaagattaaacatatcgtacgaacacgatggagagtaatcgtagcaaaagtaagcatttcctttaatctcagatcccggatactggatatattttgcagccaacacgtgcatccatgcaacatttcctacatatacccggctatgcaccgcgtcatcatcgactgtacgatacataatgttaccgtgttgcttacattgctcgtaaaagactttcgtcaatttgtctccttctccgtaaattccagtgggtcttaggcaacaagtatacaattttgctccattcatgattacggaattattggctttcataaccagttgctcggccatacgtttactttttgcgtatacatgtcctggtgatatatcataaagggtatgctcatggccgatgaatggatcaccgtgtttatttggtcctattgcttccatgctactagtatagatcaaatacttgattcctaggtccacacaagctgccaatatagtctgtgttccataatagtttactttcatgatttcattatcggtgtattttccaaatacatccactagagcagccgtatgaataatcagatttaccccatctagcgcttctctcaccttatcaaagtcgtttatatcacattgtatatagtttataaccttaactttcgaggttattggttgtggatcttctacaatatctatgactctgatttcttgaacatcatctgcactaattaacagttttactatatacctgcctagaaatccggcaccaccagtaaccgcgtacacggccattgctgccactcataatatcagactacttattctattttactaaataatggctgtttgtataatagaccacgataatatcagaggagttatttactttgaaccagtccatggaaaagataaagttttaggatcagttattggattaaaatccggaacgtatagtttgataattcatcgttacggagatattagtcaaggatgtgattccataggcagtccagaaatatttatcggtaacatctttgtaaacagatatggtgtagcatatgtttatttagatacagatgtaaatatatctacaattattggaaaggcgttatctatttcaaaaaatgatcagagattagcgtgtggagttattggtatttcttacataaatgaaaagataatacattttcttacaattaacgagaatggcgtttgatatatcagttaatgcgtctaaaacaataaatgcattagtttacttttctactcagcaaaataaattagtcatacgtaatgaagttaatgatacacactacactgtcgaatttgatagggacaaagtagttgacacgtttatttcatataatagacataatgacaccatagagataagaggggtgcttccagaggaaactaatattggttgcgcggttaatacgccggttagtatgacttacttgtataataagtatagttttaaactgattttagcagaatatataagacacagaaatactatatccggcaatatttattcggcattgatgacactagatgatttggctattaaacagtatggagacattgatctattatttaatgagaaacttaaagtagactccgattcgggactatttgactttgtcaactttgtaaaggatatgatatgttgtgattctagaatagtagtagctctatctagtctagtatctaaacattgggaattgacaaataaaaagtataggtgtatggcattagccgaacatatatctgatagtattccaatatctgagctatctagactacgatacaatctatgtaagtatctacgcggacacactgagagcatagaggataaatttgattattttgaagacgatgattcgtctacatgttctgccgtaaccgacagggaaacggatgtataattttttttatagcgtgaaggatatgataaaaaatataattgttgtatttatcccattccaatcaccttatatgattctgtaacacaatgaaggagtctcatagatgtatagaggtcagatactggtttgataaactgtttattccacatgagtatgtttgactttatggttagacccgcatactttaacaaatcactgaaaattggagttaggtattgacctctcagaatcagttgccgttctggaacattaaatgtattttttatgatatactccaacgcatttatgtgggcatacaacaagtcattactaatggagtattccaagagttttagttgtctagtatttaacaagagaagagatttcaacagactgtttatgaactcgaatgccgcctcattgtcgcttatattgatgatgtcgaattctcccaatatcatcaccgatgagtagctcatcttgttatcgggatccaagttttctaaagatgtcattaaaccctcgatcatgaatggatttatcatcatcgtttttatgttggacatgagcttagtccgtttgtccacatctatagacgacgatttctgaattattttatatatccctctctttaactccaggaacttgtcaggatggtctactttaatatgttctcgtctaagagatgaaaatctttggatggttgcacgcgacttttctctaaaggatgacgttgcccaagatcctctcttaaatgaatccatcttatccttggacaagatggacagtctattttccttagatggtttaatatttttgttacccatgatctataaaggtagacctaatcgtctcggatgacctatatatttattttcagttttattatacgcataaattgtaaaaaatatgttaggtttacaaaaatgtctcgtggggcattaatcgtttttgaaggattggacaaatctggaaaaacaacacaatgtatgaacatcatggaatctataccggcaaacacgataaaatatcttaactttcctcagagatccactgtcactggaaagatgatagatgactatctaactcgtaaaaaaacctataatgatcatatagttaatctattattttgtgcaaatagatgggagtttgcatcttttatacaagaacaactagaacagggaattactttaatagttgatagatacgcgttctctggagtagcgtatgccgccgctaaaggcgcgtcaatgactctcagtaagagttatgaatctggattgcctaaacccgacttagttatattcttggaatctggtagcaaagaaattaatagaaacgtcggcgaggaaatttatgaagatgttacattccaacaaaaggtattacaagaatataaaaaaatgattgaagaaggagatattcattggcaaattatttcttctgaattcgaggaagatgtaaagaaggagttgattaagaatatagttatagaggctatacacacggttactggaccagtggggcaactgtggatgtaatagtgaaattacattttttataaatagatgttagtacagtgttataaatggatgaagcatattactctggcaacttggaatcagtactcggatacgtgtccgatatgcataccgaactcgcatcaatatctcaattagttattgccaagatagaaactatagataatgatatattaaacaaggacattgtaaattttatcatgtgtagatcaaacttggataatccatttatctctttcctagatactgtatatactattatagatcaagagaactatcagaccgaattgattaattcattagacgacaatgaaattatcgattgtatagttaataagtttatgagcttttataaggataacctagaaaatatagtagatgctatcattactctaaaatatataatgaataatccagattttaaaactacgtatgccgaagtactcggttccagaatagccgatatagatattaaacaagtgatacgtgagaatatactacaattgtctaatgatatccgcgaacgatatttgtgaaaaatattaaaaaaaaatactttttttattaaatgacgtcgcttcgcgaatttagaaaattatgctgtgatatatatcacgcatcaggatataaagaaaaatctaaattaattagagactttataacagatagggatgataaatatttgatcattaagctattgcttcccggattagacgatagaatttataacatgaacgataaacaaattataaaattatatagtataatatttaaacaatctcaggaagatatgctacaagatttaggatacggatatataggagacactattaggactttcttcaaagagaacacagaaatccgtccacgagataaaagcattttaactttagaagacgtggatagtttcttaactacgttatcatccgtaactaaagaatcgcatcaaataaaattattgactgatatcgcatccgtttgtacatgtaatgatttaaaatgtgtagtcatgcttattgataaagatctaaaaattaaagcgggtcctcggtacgtacttaacgctattagtcctaatgcctatgatgtgtttagaaaatctaataacttgaaagagataatagaaaatgcatctaaacaaaatctagactctatatctatttctgttatgactccaattaatcccatgttagcggaatcgtgtgattctgtcaataaggcgtttaaaaaatttccatcaggaatgtttgcggaagtcaaatacgatggtgaaagagtacaagttcataaaaataataacgagtttgccttctttagtagaaacatgaaaccagtactctctcataaagtggattatctcaaagaatacataccgaaagcatttaaaaaagctacgtctatcgtattggattctgaaattgttcttgtagacgaacataatgtaccgctcccgtttggaagtttaggaatacacaaaaagaaagaatataaaaactctaacatgtgtttgttcgtgtttgactgtttgtactttgatggattcgatatgacggacattccattgtacgaacgaagatcttttctcaaagatgttatggttgaaatacccaatagaatagtattctcagagttgacgaatattagtaacgagtctcagttaactgacgtattggatgatgcactaacgagaaaattagaaggattggtcttaaaagatattaatggagtatacgaaccgggaaagagaagatggttaaaaataaagcgagactatttgaacgagggttccatggcagattctgccgatttagtagtactaggtgcttactatggtaaaggagcaaagggtggtatcatggcagtctttctaatgggttgttacgacgatgaatccggtaaatggaagacggttaccaagtgttcaggacacgatgataatacgttaagggttttgcaagaccaattaacgatggttaaaattaacaaggatcccaaaaaaattccagagtggttggtagttaataaaatctatattcccgattttgtagtagaggatccgaaacaatctcagatatgggaaatttcaggagcagagtttacatcttccaagtcccataccgcaaatggaatatccattagatttcctagatttactaggattagagaagataaaacgtggaaagaatctactcatctaaacgatttagtaaacttgactaaatcttaatagttacatacaaactgaaaattaaaataacactatttagttggtggtcgccatggatggtgttattgtatactgtctaaacgcgttagtaaaacatggcgaggaaataaatcatataaaaaatgatttcatgattaaaccatgttgtgaaagagtttgtgaaaaagtcaagaacgttcacattggcggacaatctaaaaacaatacagtgattgcagatttgccatatatggataatgcggtatccgatgtatgcaattcactgtataaaaagaatgtatcaagaatatccagatttgctaatttgataaagatagatgacgatgacaagactcctactggtgtatataattattttaaacctaaagatgttattcctgttatcatatctataggaaaggataaagatgtctgtgaactattaatctcatcagacatatcgtgtgcatgcgtggagttaaattcatatcacgtagccattcttcccatggatgtttccttttttaccaaaggaaatgcatcattgattattctcctgtttgatttctctatcgatgcagcacctctcttaagaagtgtaaccgataataatgttattatatctagacaccagcgtctacatgacgagcttccgagttccaattggttcaagttttacataagtataaagtccgactattgttctatattatatatggttgttgatggatctgtgatgcatgcgatagctgataatagaactcacgcaattattagcaaaaatatattagacaatactacgattaacgatgagtgtagatgctgttattttgaaccacagattaggattcttgatagagatgagatgctcaatggatcatcgtgtgatatgaacagacattgtattatgatgaatttacctgatgtaggcaaatttggatctagtatgttggggaaatatgaacctgacatgattaagattgctctttcggtggctggtaatttaataagaaatcgagactacattcccgggagacgaggatatagctactacgtttacggtatagcctctagataatttttttaagcacgaaataaaaaacataattttaaaccaatctatttcatactattttgtgtgatcaccatggacataaagatagatattagtatttctggtgataaatttacggtgactactaggagggaaaatgaagaaagaaaaaaatatctacctctccaaaaagaaaaaactactgatgttatcaaacctgattatcttgagtacgatgacttgttagatagagatgagatgtttactattctagaggaatattttatgtacagaggtctattaggcctcagaataaaatatggacgactctttaacgaaattaaaaaattcgacaatgatgcggaagaacaattcggtactatagaagaactcaagcagaaacttagattaaattctgaagagggagcagataactttatagattatataaaggtacaaaaacaggatatcgtcaaacttactgtatacgattgcatatctatgataggattgtgtgcatgcgtggtagatgtttggagaaatgagaaactgttttctagatggaaatattgtttacgagctattaaactgtttattaatgatcacatgcttgataagataaaatctatactgcagaatagactagtatatgtggaaatgtcatagaaagttaaaagttaatgagagcaaaaatatataaggttgtattccatatttgttattttttctgtaatagttagaaaaatacattcgatggtctatctaccagattattatgtgttataaggtactttttctcataataaactagagtatgagtaagatagtgtttttcaaaacatataaatctaaaattgatggatgagatatacagctattaatttcgaaaatatattttaatctgataactttaaacatggatttttgatggtggtttaacgttttaaaaaaagattttgttattgtagtatatgataatattaaaagatggatataaagaatttgctgactgcatgtactattttttacattactacattggctacggcagatatacctactccgccaccaacgggtcatgtgacaagggagaatatcttgataagaggcataatcaatgttgtaatcggtgtccacctggagaatttgccaaggttagatgtaatggtaacgataacacaaaatgtgaacgctgcccacctcatacatataccacaatcccaattattctaatggatgtcatcaatgtagaaaatgcccaaccggatcatttgataaggtaaagtgtaccggaacacagaacagtaaatgttcgtgtcttcctggttggtattgtgctactgattcttcacagactgaagattgttgaaattgtgtaccaaaaaggagatgtccatgcggatactttggtggaatagatgaacaaggaaatcctatttgtaaatcgtgttgtgttggtgaatattgcgactacctacgtaattatagacttgatccatttcctccatgcaaactatctaaatgtaattaattatgattttgatgataatgttaccatacattatatcgctacttggttagtgtattattcagtatgaagacctattaataattacttatcttttgacgatcttgttataattataatataaaaatacttatggcatagtaactcataattgctgacgcgataaattcgtaataatctgttttgttcaaatttttataaggaatctacaggcataaaaataaaaatataatttataatatactcttacagcgcgccatcatgaataacagcagtgaattgattgctgttattaatggatttagaaatagtggacgattttgtgatattagtatagttattaatgatgaaaggataaacgctcataaactcatcctatctggagcctccgaatatttttccattctgttttccaataattttatcgattctaatgaatacgaagttaatctaagtcatttagattatcaaagcgttaacgatttgatcgattacatttatgggatacctttgagcctaactaacgataacgtgaaatatattctttcaaccgctgattttttacaaattggatctgctattacggagtgtgaaaattacatacttaaaaatctttgttctaaaaactgtatcgatttctacatatacgctgataaatataataacaagaaaatagaatcagcgtcgtttaacacaatattacaaaatattttgagactcatcaacgatgaaaactttaaatacttaacagaggaatcaatgataaaaattttaagcgatgatatgttaaatataaaaaatgaggattttgcaccactaattctcattaaatggttagagagtactcaacaatcatgcaccgtcgagttacttagatgcctcagaatatcattgctttccccacaagttataaaatcactttatagtcatcaactggttagttcaatctacgaatgtataacattcttaaacaatatagcattcttggatgaatcatttcctagataccatagcatcgagttgatatctatcggtataagtaattcgcatgataagatttccataaactgctacaatcataaaaaaaatacatgggaaatgatatcttcacgtagatataggtgtagtttcgcagtggccgtcctggataatattatctatatgatgggtggatatgatcagtccccgtatagaagttcaaaggttatagcgtacaatacatgtacaaattcttggatatatgatataccagagctaaaatatcctcgttctaattgtgggggactggctgatgacgaatacatttattgtataggcggcatacgcgatcaggattcatcgttgacatctagtattgataaatggaagccatcaaaaccatattggcagaagtatgctaaaatgcgcgaaccaaaatgtgatatgggggttgcgatgttaaacggattaatatatgtcatgggtggaatcgttaaaggtgacacgtgtaccgacgcactagagagtttatcagaagatggatggatgaagcatcaacgtcttccaataaaaatgtccaatatgtcgacgattgttcatgatggcaagatttatatatctggaggttacaacaatagtagtgtagttaatgtaatatcgaatctagtccttagctataatccgatatatgatgaatggaccaaattatcatcattaaacattcctagaattaatcccgctctatggtcagcgcataataaattatatgtaggaggaggaatatctgatgatgttcgaactaatacatctgaaacatacgataaagaaaaagattgttggacattggataatggtcacgtgttaccacgcaattatataatgtataaatgcgaaccgattaaacataaatatccattggaaaaaacacagtacacgaatgattttctaaagtatttggaaagttttataggtagttgatagaacaaaatacataattttgtaaaaataaatcactttttatactaatatgacacgattaccaatacttttgttactaatatcattagtatacgctacaccttttcctcagacatctaaaaaaataggtgatgatgcaactctatcatgtaatcgaaataatacaaatgactacgttgttatgagtgcttggtataaggagcccaattccattattcttttagctgctaaaagcgacgtcttgtattttgataattataccaaggataaaatatcttacgactctccatacgatgatctagttacaactatcacaattaaatcattgactgctagagatgccggtacttatgtatgtgcattctttatgacatcaactacaaatgacactgataaagtagattatgaagaatactccacagagttgattgtaaatacagatagtgaatcgactatagacataatactatctggatctacacattcaccggaaactagttctaagaaacctgattatatagataattctaattgctcgtcggtattcgaaatcgcgactccggaaccaattactgataatgtagaagatcatacagacaccgtcacatacactagtgatagcattaatacagtaagtgcatcatctggagaatccacaacagacgagactccggaaccaattactgataaagaagatcatacagttacagacactgtctcatacactacagtaagtacatcatctggaattgtcactactaaatcaaccaccgatgatgcggatctttatgatacgtacaatgataatgatacagtaccaccaactactgtaggcggtagtacaacctctattagcaattataaaaccaaggactttgtagaaatatttggtattaccgcattaattatattgtcggccgtggcaattttctgtattacatattatatatataataaacgttcacgtaaatacaaaacagagaacaaagtctagatttttgacttacataaatgtctgggatagtaaaatctatcatattgagcggaccatctggtttaggaaagacagccatagccaaaagactatgggaatatatttggatttgtggtgtcccataccactagatttcctcgtcctatggaacgagaaggtgttgattaccattacgttaacagagaggccatctggaagggaatagccgccggaaactttctagaacatactgagtttttaggaaatatttacggaacttctaaaacagctgtgaatacagcggctattaataatcgtatttgtgtgatggatctaaacatcgacggtgttagaagtcttaaaaatacgtacctaatgccttactcggtgtatataagacctacctctcttaaaatggttgagaccaagcttcgttgtagaaacactgaagctaacgatgagattcatcgtcgcgtgatattggcaaaaacggatatggatgaggccaacgaagcaggtctattcgacactattatcattgaagatgatgtgaatttagcatatagtaagttaattcagatactacaggaccgtattagaatgtattttaacactaattagagacttaagacttaaaacttgataattaataatataactcgtttttatatgtggctatttcaacgtctaatgtattagttaaatattaaaacttaccacgtaaaacttaaaatttaaaatgatatttcattgacagatagatcacacattatgaactttcaaggacttgtgttaactgacaattgcaaaaatcaatgggtcgttggaccattaataggaaaaggtggattcggtagtatttatactactaatgacaataattatgtagtaaaaatagagcccaaagctaacggatcattatttaccgaacaggcattttatactagagtacttaaaccatccgttatcgaagaatggaaaaaatctcacaatataaagcacgtaggtcttatcacgtgcaaggcatttggtctatacaaatccattaatgtggaatatcgattcttggtaattaatagattaggtgcagatctagatgcggtgatcagagccaataataatagattaccaaaaaggtcggtgatgttgatcggaatcgaaatcttaaataccatacaatttatgcacgagcaaggatattctcacggagatattaaagcgagtaatatagtcttggatcaaatagataagaataaattatatctagtggattacggattggtttctaaattcatgtctaatggagaacatgttccatttataagaaatccaaataaaatggataacggtactctagaatttacacctatagattcgcataaaggatacgttgtatctagacgtggagatctagaaacacttggatattgtatgattagatggttgggaggtatcttgccatggactaagatatctgaaacaaagaattgtgcattagtaagtgccacaaaacagaaatatgttaacaatactgcgactttgttaatgaccagtttgcaatatgcacctagagaattgctgcaatatattaccatggtaaactctttgacatattttgaggaacccaattatgacgagtttcggcacatattaatgcagggtgtatattattaagtgtggtgtttggtcgatgtaaaatttttgtcgataaaaattaaaaaataacttaatttattattgatctcgtgtgtacaaccgaaatcatggcgatgttttacgcacacgctctcggtgggtacgacgagaatcttcatgcctttcctggaatatcatcgactgttgccaatgatgtcaggaaatattctgttgtgtcagtttataataacaagtatgacattgtaaaagacaaatatatgtggtgttacagtcaggtgaacaagagatatattggagcactgctgcctatgtttgagtgcaatgaatatctacaaattggagatccgatccatgatcaagaaggaaatcaaatctctatcatcacatatcgccacaaaaactactatgctctaagcggaatcgggtacgagagtctagacttgtgtttggaaggagtagggattcatcatcacgtacttgaaacaggaaacgctgtatatggaaaagttcaacatgattattctactatcaaagagaaggccaaagaaatgaatgcacttagtccaggacctatcattgattaccacgtctggataggagattgtatctgtcaagttactgctgtggacgtacatggaaaggaaattatgagaatgagattcaaaaagggtgcggtgcttccgatcccaaatctggtaaaagttaaacttggggagaatgatacagaaaatctttcttctactatatcggcggcaccatcgaggtaaccacctctctggaagacagcgtgaataatgtactcatgaaacgtttggaaactatacgccatatgtggtctgtcgtatatgatcattttgatattgtgaatggtaaagaatgctgttatgtgcatacgcatttgtctaatcaaaatcttataccgagtactgtaaaaacaaatttgtacatgaagactatgggatcatgcattcaaatggattccatggaagctctagagtatcttagcgaactgaaggaatcaggtggatggagtcccagaccagaaatgcaggaatttgaatatccagatggagtggaagacactgaatcaattgagagattggtagaggagttcttcaatagatcagaacttcaggctggtgaatcagtcaaatttggtaattctattaatgttaaacatacatctgtttcagctaagcaactaagaacacgtatacggcagcagcttcctttatactctcatcttttaccaacacaaagggtggatatttgttcattggagttgataataatacacacaaagtaattggattcacggtgggtcatgactacctcagactggtagagaatgatatagaaaagcatatcaaaagacttcgtgttgtgcatttctgtgagaagaaagaggacatcaagtacacgtgtcgattcatcaaggtatataaacctggggatgaggctacctcgacatacgtgtgcgctatcaaagtggaaagatgctgttgtgctgtgtttgcagattggccagaatcatggtatatggatactaatggtatcaagaagtattctccagatgaatgggtgtcacatataaaattttaattaatgtaatagagaacaaataataaggttgtaatatcatatagacaataactaacaattaattagtaactgttatctcttttttaactaaccaactaactatatacctattaatacatcgtaattatagttcttaacatctattaatcattaattcgcttctttaattttttataaactaacattgttaattgaaaagggataacatgttacagaatataaattatatatggatttttttaaaaaggaaatacttgactggagtatatatttatctcttcattatatagcacgcgtgttttccaatttttccacatcccatataatacaggattataatctcgttcgaacatacgagaaagtggataaaacaatagttgattttttatctaggttgccaaatttattccatattttagaatatggggaaaatattctacatatttattctatggatgatgctaatacgaatattataattttttttctagatagagtattaaatattaataagaacgggtcatttatacacaatctcaggttatcatcatccattaatataaaagaatatgtatatcaattagttaataatgatcatccagataataggataagactaatgcttgaaaatggacgtagaacaagacattttttgtcctatatatcagatacagttaatatctatatatgtattttaataaatcatggattttatatagatgccgaagacagttacggttgtacattattacatagatgtatatatcactataagaaatcagaatcagaatcatacaatgaattaattaagatattgttaaataatggatcagatgtagataaaaaagatacgtacggaaacacaccttttatcctattatgtaaacacgatatcaacaacgtggaattgtttgagatatgtttagagaatgctaatatagactctgtagactttaatagatatacacctcttcattatgtctcatgtcgtaataaatatgattttgtaaagttattaatttctaaaggagcaaatgttaatgcgcgtaatagattcggaactactccattttattgtggaattatacacggtatctcgcttataaaactatatttggaatcagacacagagttagaaatagataatgaacatatagttcgtcatttaataatttttgatgctgttgaatctttagattatctattatccagaggagttattgatattaactatcgtactatatacaacgaaacatctatttacgacgctgtcagttataatgcgtataatacgttggtctatctattaaacagaaatggtgattttgagacgattactactagtggatgtacatgtatttcggaagcagtcgcaaacaacaacaaaataataatggaagtactattgtctaaacgaccatctttgaaaattatgatacagtctatgatagcaattactaaacataaacagcataatgcagatttattgaaaatgtgtataaaatatactgcgtgtatgaccgattatgatactcttatagatgtacagtcgctacagcaatataaatggtatattttaaaatgtttcgatgaaatagatatcatgaagagatgttatataaaaaataaaactgtattccaattagttttttgtatcaaagacattaatactttaatgagatacggtaaacatccttctttcgtgaaatgcactagtctcgacgtatacggaagtcgtgtacgtaatatcatagcatctattagatatcgtcagagattaattagtctattatccaagaagctggatcctggagataaatggtcgtgttttcctaacgaaataaaatataaaatattggaaaactttaacgataacgaactatccacatatctaaaaatcttataaacactattaaaatataaaatctaagtaggataaaatcacactacatcattgtttccttttagtgctcgacagtgtatactatttttaacactcataaataaaaatgaaaacgatttccgttgttacgttgttatgcgtactacctgctgttgtttattcaacatgtactgtacccactatgaataacgctaaattaacgtctaccgaaacatcgtttaatgataaacagaaagttacgtttacatgtgatcagggatatcattcttcggatccaaatgctgtctgcgaaacagataaatggaaatacgaaaatccatgcaaaaaaatgtgcacagtttctgattacatctctgaattatataataaaccgctatacgaagtgaattccaccatgacactaagttgcaacggcgaaacaaaatattttcgttgcgaagaaaaaaatggaaatacttcttggaatgatactgttacgtgtcctaatgcggaatgtcaacctcttcaattagaacacggatcgtgtcaaccagttaaagaaaaatactcatttggggaatatatgactatcaactgtgatgttggatatgaggttattggtgcttcgtacataagttgtacagctaattcttggaatgttattccatcatgtcaacaaaaatgtgatatgccgtctctatctaatggattaatttccggatctacattttctatcggtggcgttatacatcttagttgtaaaagtggttttacactaacggggtctccatcatccacatgtatcgacggtaaatggaatcccgtactcccaatatgtgtacgaactaacgaagaatttgatccagtggatgatggtcccgacgatgagacagatttgagcaaactctcgaaagacgttgtacaatatgaacaagaaatagaatcgttagaagcaacttatcatataatcatagtggcgttaacaattatgggcgtcatatttttaatctccgttatagtattagtttgttcctgtgacaaaaataatgaccaatataagttccataaattgctaccgtaaatataaatccgttaaaataatgaataattaataacgaacaagtatcaaaagattaaagaattatagctagaatcaattgagatgtcttcttcagtggatgttgatatctacgatgccgttagagcatttttactcaggcactattataacaagagatttattgtgtatggaagaagtaacgccatattacataatatatacaggctatttacaagatgcgccgttataccgttcgatgatatagtacgtactatgccaaatgaatcacgtgttaaacaatgggtgatggatacacttaatggtataatgatgaatgaacgcgatgtttctgtaagcgttggcaccggaatactattcatggaaatgtttttcgattacaataaaaatagtatcaacaatcaactaatgtatgatataattaatagcgtatctataattctagctaatgagagatatagaagcgcttttaacgacgatggtatatacatccgtagaaatatgattaacaagttgtacggatacgcatctctaactactattggcacgatcgctggaggtgtttgttattatctgttgatgcatctagttagtttgtataaataattatttcaatatactagttaaaattttaagattttaaatgtataaaaaactaataacgtttttatttgtaataggtgcattagcatcctattcgaataatgagtacactccgtttaataaactgagtgtaaaactctatatagatggagtagataatatagaaaattcatatactgatgataataatgaattggtgttaaattttaaagagtacacaatttctattattacagagtcatgcgacgtcggatttgattccatagatatagatgttataaacgactataaaattattgatatgtataccattgactcgtctactattcaacgcagaggtcacacgtgtagaatatctaccaaattatcatgccattatgataagtacccttatattcacaaatatgatggtgatgagcgacaatattctattactgcagagggaaaatgctataaaggaataaaatatgaaataagtatgatcaacgatgatactctattgagaaaacatactcttaaaattggatctacttatatatttgatcgtcatggacatagtaatacatattattcaaaatatgatttttaaaaatttaaaatatattatcacttcagtgacagtagtcaaataacaaacaacaccatgagatatattataattctcgcagttttgttcattaatagtatacacgctaaaataactagttataagtttgaatccgtcaattttgattccaaaattgaatggactggggatggtctatacaatatatcccttaaaaattatggcatcaagacgtggcaaacaatgtatacaaatgtaccagaaggaacatacgacatatccgcatttccaaagaatgatttcgtatctttctgggttaaatttgaacaaggcgattataaagtggaagagtattgtacgggactatgcgtcgaagtaaaaattggaccaccgactgtaacattgactgaatacgacgaccatatcaatttgtacatcgagcatccgtatgctactagaggtagcaaaaagattcctatttacaaacgcggtgacatgtgtgatatctacttgttgtatacggctaacttcacattcggagattctaaagaaccagtaccatatgatatcgatgactacgattgcacgtctacaggttgcagcatagactttgtcacaacagaaaaagtgtgcgtgacagcacagggagccacagaagggtttctcgaaaaaattactccatggagttcgaaagtatgtctgacacctaaaaagagtgtatatacatgcgcaattagatccaaagaagatgttcccaatttcaaggacaaaatggccagagttatcaagagaaaatttaataaacagtctcaatcttatttaactaaatttctcggtagcacatcaaatgatgttaccacttttcttagcatgcttaacttgactaaatattcataactaatttttattaatgatacaaaaacgaaataaaactgcatattatacactggttaacgcccttataggctctaaccattttcaagatgaggtccctgattatagtccttctgttcccctctatcatctactccatgtctattagacaatgtgagaagactgaagaggaaacatggggattgaaaatagggttgtgtataattgccaaagatttctatcccgaaagaactgattgcagtgttcatctcccaactgcaagtgaaggattgataactgaaggcaatggattcagggatatacgaaacaccgataaattataaaaaaagcaatgtgtccgctgtttccgttaataatactattttcgtaactggcggattattcataaataactctaatagcacgatcgtggttaacaatatggaaaaacttgacatttataaagacaaacaatggtcgattatagaaatgcctatggctagggtatatcacggcatcgactcgacatttggaatgttatattttgccggaggtctatccgttaccgaacaatatggtaatttagagaaaaacaacgagatatcttgttacaatcctagaacgaataagtggtttgatatttcatatactatttataagatatccatatcatcattgtgtaaactaaataacgtcttctatgtatttagtaaggacattggatatgtggaaaagtatgatggtgcatggaagttagtacatgatcgtctccccgctataaaggcattatcaacttctccttattgattgaaaatgaaaatataaatagtttttatgtatagcagtattaccctatagttttattgcttactactaacatggatacagatgttacaaatgtagaagatatcataaatgaaatagatagagagaaagaagaaatactaaaaaatgtagaaattgaaaataataaaaacattaacaagaatcatccaagtggatatattagagaagcactcgttattaataccagtagtaatagtgattccattgataaagaagttatagaatgtatctgtcacgatgtaggaatatagatcatatctactaatttttataatcgatacaaaacataaaaaacaactcgttattacatagcaggcatggaatccttcaagtattgttttgataacgatggcaagaaatggattatcggaaatactttatattctggtaattcaatactatataaggtcagaaaaaatttcactagttcgttctacaattacgtaatgaagatagatcacaaatcacacaagccattgttgtctgaaatacgattctatatatctgtattggatcctttgactatcgacaactggacacgggaacgtggtataaagtatttggctattccagatctgtatggaattggagaaaccgatgattatatgttcttcgttataaagaatttgggaagagtattcgccccaaaggatactgaatcagtcttcgaagcatgcgtcactatgataaacacgttagagtttatacactctcaaggatttacccatggaaaaatagaaccgaggaatatactgattagaaataaacgtctttcactaattgactattctagaactaacaaactatacaagagtggaaactcacatatagattacaacgaggacatgataacttcaggaaatatcaattatatgtgtgtagacaatcatcttggagcaacagtttcaagacgaggagatttagaaatgttgggatattgcatgatagaatggttcggtggcaaacttccatggaaaaacgaaagtagtataaaagtaataaaacaaaaaaaagaatataaaaaatttatagctactttctttgaggactgttttcctgaaggaaatgaacctctggaattagttagatatatagaattagtatacacgttagattattctcaaactcctaattatgacagactacgtaaactgtttatacaagattgaaattatattcttttttttatagagtgtggtagtgttacggatatttaatattagactatctctatcgcgctacacgaccaatatcgattactatggatatcttcagggaaatcgcatcttctatgaaaggagagaatgtattcatttctccagcgtcaatctcgtcagtattgacaatactgtattatggagctaatggatccactgctgaacagctatcaaaatatgtagaaaaggaggagaacatggataaggttagcgctcaaaatatctcattcaaatccataaataaagtatatgggcgatattctgccgtgtttaaagattcctttttgagaaaaattggcgataagtttcaaactgttgacttcactgattgtcgcactatagatgcaatcaacaagtgtgtagatatctttactgaggggaaaatcaatccactattggatgaaccattgtctcctgatacctgtctcctagcaattagtgccgtatactttaaagcaaaatggttgacgccattcgaaaaggaatttaccagtgattatcccttttacgtatctccgacggaaatggtagatgtaagtatgatgtctatgtacggcaaggcatttaatcacgcatctgtaaaggaatcattcggcaacttttcaatcatagaactgccatatgttggagatactagtatgatggtcattcttccagacaagattgatggattagaatccatagaacaaaatctaacagatacaaattttaagaaatggtgtaactctctggaagctacgtttatcgatgttcacattcccaagtttaaggtaacaggctcgtataatctggtggatactctagtaaagtcaggactgacagaggtgttcggttcaactggagattatagcaatatgtgtaattcagatgtgagtgtcgacgctatgatccacaaaacgtatatagatgtcaatgaagagtatacagaagcagctgcagcaacttgtgcactggtgtcagactgtgcatcaacaattacaaatgagttctgtgtagatcatccgttcatctatgtgattaggcatgttgatggaaaaattcttttcgttggtagatattgctctccgacaactaattgttaaccattttttttaaaaaatagaaaaaacatgtggtattagtgcaggtcgttattcttccaattgcaattggtaagatgacggccaactttagtacccacgtcttttcaccacagcactgtggatgtgacagactgaccagtattgatgacgtcagacaatgtttgactgaatatatttattggtcgtcctatgcataccgcaacaggcaatgcgctggacaattgtattccacactcctctcttttagagatgatgcggaattagtgttcatcgacattcgcgagctggtaaaaaatatgccgtgggatgatgtcaaagattgtgcagaaatcatccgttgttatataccggatgagcaaaaaaccatcagagagatttcggccatcatcggactttgtgcatatgctgctacttactggggaggtgaagaccatcccactagtaacagtctgaacgcattgtttgtgatgcttgagatgctcaattacgtggattataacatcatattccggcgtatgaattgatgagttgtacatcttgacattttcttctttcttctcttctccctttcccagaaacaaactttttttacccactataaaataaaatgagtatactacctgttatatttctttctatatttttttattcttcattcgttcagacttttaacgcgcctgaatgtatcgacaaagggcaatattttgcatcattcatggagttagaaaacgagccagtaatcttaccatgtcctcaaataaatacgctatcatccggatataatatattagatattttatgggaaaaacgaggagcggataatgatagaattataccgatagataatggtagcaatatgctaattctgaacccgacacaatcagactctggtatttatatatgcattaccacgaacgaaacctactgtgacatgatgtcgttaaatttgacaatcgtgtctgtctcagaatcaaatatagatcttatctcgtatccacaaatagtaaatgagagatctactggcgaaatggtatgtcccaatattaatgcatttattgctagtaacgtaaacgcagatattatatggagcgggcatcgacgccttagaaataagagacttaaacaacggacacctggaattattaccatagaagatgttagaaaaaatgatgctggttattatacatgtgttttagaatatatatacggtggcaaaacatataacgtaaccagaattgtaaaattagaggtacgggataaaataataccttctactatgcaattaccagatggcattgtaacttcaataggtagtaatttgactattgcatgcagagtatcgttgagacctcccacaacggatgcagacgtcttttggataagtaatggtatgtattacgaagaagatgatggggacggaaacggtagaataagtgtagcaaataaaatctatatgaccgataagagacgtgttattacatcccggttaaacattaatcctgtcaaggaagaagatgctacaacgtttacgtgtatggcgtttactattcctagcatcagtaaaacagttactgttagtataacgtgaatgtatgttgttacatttccatgtcaattgagtttataagaatttttatacattatcttccaacaagcaattgacgaacgtattgctatgattaactcccacgatactatgcatattattaatcattaacttgcagactatacctagagctattttgacatactcgtgttcttgtgtaattgcagtatctatattattaaagtacgtaaatctagctatagttttattatttaattttagataatataccgtctccttatttttaaaaattgccacatcctttattaaatcatgaatgggaatttctatgtcatagttaatatattgtgaacaacaagagcagatatctataggaaagggtggaatgcgatacattgatctatgtagttttaaaacacacgcaaactttgaagaatttatataaatcattccatcgatacatccttctatgttgagatgtatatatccaggaattcgtttattaatatcgggaaatgtataaactaaaacattgcccggaagcggagcttctaccggagttatatcagtttttaacttacaaaatgtaaccaatacctttgcatgacttgttttgttcggcaacgttagtttaaacttgacgaatggattaattacaatagcatgatccgcgcatctattaagtttttttactttaacgcccttgtatgtttttacagagactttatctaaatttctagtgcttgtatgtgttataaatataacgggatatagaactgaatcacctaccttagatacccaattacattttatcagatccagataataaacaaattttgtcgccctaactaattctatattgttatatattttacaattggttatgatatcatgtaataacttggaatctaacgcacatcgtcgtacgtttatacaattgtgatttagtgtagtatatctacacatgtatttttccgcgctatagtattctggactagtgataaaactatcgttatatctgtcttcaatgaactcatcgagatattgctctctgtcatattcatacacctgcataaactttctagacatcttacaatccgtgttattttaggatcatatttacatatttacgggtatatcaaagatgttagattagttaatgggaatcgtctataataatgaatattaaacaattatatgaggacttttaccacaaagcatcataaaaatgagtcgtcgtctgatttatgttttaaatatcaaccgcgaatcaactcataaaatacaagagaatgaaatatatacatattttagtcattgcaatatagaccatacttctacagaacttgattttgtagttaaaaactatgatctaaacagacgacaacctgtaactgggtatactgcactacactgctatttgtataataattactttacaaacgatgtactgaagatattattaaatcatggagtggatgtaacgatgaaaaccagtagcggacgtatgcctgtttatatattgcttactagatgttgcaatatttcacatgatgtagtgatagatatgatagacaaagataaaaaccacttattacatagagactattccaacctattactagagtatataaaatctcgttacatgttattaaaggaagaggatatcgatgagaacatagtatccactttattagataagggaatcgatcctaactttaaacaagacggatatacagcgttacattattattatttgtgtctcgcacacgtttataaaccaggtgagtgtagaaaaccgataacgataaaaaaggccaagcgaattatttctttgtttatacaacatggagctaatctaaacgcgttagataattgtggtaatacaccattccatttgtatcttagtattgaaatgtgtaataatattcatatgactaaaatgctgttgacttttaatccgaatttcgaaatatgtaataatcatggattaacgcctatactatgttatataacttccgactacatacaacacgatattcttgttatgttaatacatcactatgaaacaaatgttggagaaatgccgatagatgagcgtcgtataatcgtattcgagtttatcaaaacatattctacacgtcctgcagattcgataacttatttgatgaataggtttaaaaatatagatatttatacccgctatgaaggaaagacattattacacgtagcatgtgaatataataatacacacgtaatagattatcttatacgtatcaacggagatataaatgcgttaaccgacaataacaaacacgctacacaactcattatagataacaaagaaaattccccatataccattaattgtttactgtatatacttagatatattgtagataagaatgtgataagatcgttggtggatcaacttccatctctacctatcttcgatataaaatcatttgagaaattcatatcctactgtatacttttagatgacacattttacaatagacacgttaggaatcgcgattctaaaacgtatcgatacgcattttcaaaatacatgtcgtttgataaatacgatggtataataactaaatgtcataaagaaacaatattgctcaaactatccactgttctagacactacactatatgcagttttaagatgccataattcgaaaaagttaagaagatacctcaccgagttaaaaaaatataataacgataagtcctttaaaatatattctaatattatgaatgagagataccttaatgtatattataaagatatgtacgtgtcaaaggtatatgataaactatttcctgttttcacagataaaaattgtctactaacattactaccttcagaaattatatacgaaatattatacatgctgacaattaacgatctttataatatatcgtatccacctaccaaagtatagttgtatttttctcatgcgatgtgtgtaaaaaaactgatattatataaatattttagtgccgtataataaagatgacgatgaaaatgatggtacatatatatttcgtatcattattgttattgctattccacagttacgccatagacatcgaaaatgaaatcacagaattcttcaataaaatgagagatactctaccagctaaagactctaaatggttgaatccagcatgtatgttcggaggcacaatgaatgatatagccgctctaggagagccattcagcgcaaagtgtcctcctattgaagacagtcttttatcgcacagatataaagactatgtggttaaatgggaaaggctagaaaaaaatagacggcgacaggtttctaataaacgtgttaaacatggtgatttatggatagccaactatacatctaaattcagtaaccgtaggtatttgtgcaccgtaactacaaagaatggtgactgtgttcagggtatagttagatctcatattagaaaacctccttcatgcattccaaaaacatatgaactaggtactcatgataagtatggcatagacttatactgtggaattctttacgcaaaacattataataatataacttggtataaagataataaggaaattaatatcgacgacattaagtattcacaaacgggaaaggaattaattattcataatccagagttagaagatagcggaagatacgactgttacgttcattacgacgacgttagaatcaagaatgatatcgtagtatcaagatgtaaaatacttacggttataccgtcacaagaccacaggtttaaactaatactagatccaaaaatcaacgtaacgataggagaacctgccaatataacatgcactgctgtgtcaacgtcattattgattgacgatgtactgattgaatgggaaaatccatccggatggcttataggattcgattttgatgtatactctgttttaactagtagaggcggtattaccgaggcgaccttgtactttgaaaatgttactgaagaatatataggtaatacatataaatgtcgtggacacaactattattttgaaaaaacccttacaactacagtagtattggagtaaatatacaatgcatttttatatacattactgaataattattattattatttatatcgtatttgtgctataacgcgactatctaggtatttgtatctcaccgatagagaacatataaatgtagactctattaaacagttgtgtaaaatatcagatcctaatgcatgttatagatgtggatgtacggctttacatgagtacttttataattatagatcagtcaacggaaaatacaagtatagatacaacggttactatcaatattatttatctagcgattatgaaaattataatgaatattattatgatgattatgatagaactggtatgaacagtgagagtgataatatatcaatcaaaacagaatatgaattctatgatgaaacacaagatcaaagtacacaactagtaggttacgacattaaactcaaaaccaatgaggatgattttatggctatgatagatcagtgggtgtccatgattatatagatgaatcaattaataaagtagtatatggaagagagtctcacgtaagatggcgggatatatggcaagaacataatgatggcgtatacagtataggaaaggagtgcatagataatatatacgaagacaaccataccgtagacgaattctacaagatagacagcgtatcagatgtagatgacgcggaacacatatctccgataactaatgatgtatctacacaaacatgggaaaagaaatcagagttagatagatacatggaaatgtatcctcgtcatagatatagtaagcattctgtctttaagggattttctgacaaagttagaaaaaatgatttagacatgaatgtggtaaaagaattactttctaacggtgcatctctaacaattaaggatagcagtaataaggatccaataaccgtttattttcgaagaacgataatgaatttagaaatgattgatgaacgaaagtatatagtacactcctatctaaaaaattataaaaatttcgattatccatttttcaggaagttagttttgactaataaacattgtctcaacaattattataatataagcgacagcaaatatggaacaccgctacatatattggcgtctaataaaaaattaataactcctaattacatgaagttattagtgtataacggaaatgatataaacgcacgaggtgaagatacacaaatgcgaactccattacacaaatatttgtgtaaatttgtatatcataatattgaatatggtatccgatactataatgaaaagattatagacgcatttatagagttaggagccgatctaactattccaaatgacgatggaatgataccagtagtttactgtatacactcaaatgccgaatatggttataacaatattactaacataaagataatacgtaaactacttaatcttagtagacgtgcgtcacataatctatttagagatcgagtcatgcacgattatataagtaatacatatattgatcttgagtgtttagatattattagatcgttggatggattcgatatcaatggttactttgaaggacgtacaccacttcattgcgctatacaacataacttcactcagattgctaagtacttattagatcgaggagctgatatagtcgtacccaacacattgattatacatcagtacatacagtaaatagcatagatatggaggaggatacaaatatttcaaataaagttataaggtacaacactgtcaataatatatgggaaacattacctaacttctggactggaactataaatccaggcgtggtctcgcataaagatgatatatatgttgtatgcgacatcaaagatgaaaaaaatgttaaaacttgtatatttagatataacacgaatacgtataacggatgggaattggtcacgacgacagaaagcagattatcagctctgcatactattctttataacaataccataatgatgttacattgttatgaatcgtatatgttacaagatacatttaatgtgtacactcgcgaatggaatcatatgtgtcatcaacattcgaatagttatatcatgtacaatatactacccatctactaaatataatagaataaaataaatgagtatgatcattttagataacgattgattttatcattaccgcttcattcttatattctttgcttacggaacctatatttagaaacatctactaacgattttttatgcttgcattattaatggtatgtaatatgattgattgtgtacgcaataccaatttgttaagtatgaatacggggtacaaacataaactgaagtttaacattatttatttatgatatatatcgttattgtttggtctataccatggatatctttaaagaactaatcttaaaacacacggatgaaaatgttttgatttctccagtttctattttatctactttatctattctaaatcatggagcagctggttctacagctgaacaactatcaaaatatatagagaatatgaatgagaatacacccgatgacaataatgacatggacgtagatattccgtattgtgcgacactagctaccgcaaataaaatatacggtagcgatagtatcgagttccacgcctccttcctacaaaaaataaaagacgattttcaaactgtaaactttaataatgctaaccaaacaaaggaactaatcaacgaatgggttaagacaatgacaaatggtaaaattaattccttattgactagtccgctatccattaatactcgtatgacagttgttagcgccgtccattttaaagcaatgtggaaatatccattttctaaacatcttacatatacagacaagttttatatttctaagaatatagttaccagtgttgatatgatggtgagcactgagaataacttgcaatatgtacatattaatgaattattcggaggattctctattatcgatattccatacgagggaaactctagtatggtaattatactaccggacgacatagaaggtatatataacatagaaaaaaatataacagatgaaaaatttaaaaaatggtgtggtatgttatctactaaaagtatagacttgtatatgccaaagtttaaagtggaaatgacagaaccgtataatctggtaccgattttagaaaatttaggacttactaatatattcggatattatgcagattttagcaagatgtgtaatgaaactatcactgtagaaaaatttctacatacgacgtttatagatgttaatgaggagtatacagaagcatcggccgttacaggagtatttatgactaacttttcgatggtatatcgtacgaaggtctacataaaccatccattcatgtacatgattaaagacaacacaggacgtatactttttatagggaaatactgctatccgcaataaatataaacaaatagacttttatcacgtttatctatgtctaaatattacaaatagtaatagtataaactaaagctgataatacttaaaaaaataataatatcatttacaattaatagtataaactaaaaattaaacaaatcgttattataagtaatatcaaaatgatgatatacggattaatagcgtgtcttatattcgtgacttcatccatcgctagtccactttatattcccgttattccacccatttcggaagataaatcgttcaatagtgtagaggtattagtttccttgtttagagatgaccaaaaagactatacggtaacttctcagttcaataactacactatcgataccaaagactggactatcggcgtactatccacacctgatggtttggatataccattgactaatataacttattggtcacggtttactataggtcgtgcattgttcaaatcagagtctgaggatattttccaaaagaaaatgagtattctaggtgtttctatagaatgtaagaagtcgtcgacattacttacttttttgaccgtgcgtaaaatgactcgagtatttaataaatttccagatatggcttattatcgaggagactgtttaaaagccgtttatgtaacaatgacttataaaaatactaaaactggagagactgattacacgtacctctctaatggggggttgcctgcatactatcgtaatggggtcgatggttgattattgattagtatattccttattctttttattcacacaaaaagaacatttttataaacatgaaaccactgtctaaatgtaattatgatcttgatttatagatgaagatcagcctttagaggattttaaccagtatgtttaatatgaaaaaaataaacataacatattttgagattaagcgctattgtgcaagattatattagaatcaaattaatctttcatacgagaaaaataacgacatacgtcgtcaacaaattaaactttttatttattagttaactagcttatagaacttgctcattgttatgtttctaaaacgggtacgacatataggacaattatccgacgcaccggtttctcttcgtgttttatgccatatattgatgcatgttatgcaaaatatatgagtacacgaatccaataaaccaaagtatctatcgttttgagtaaacaacttcatagcaaattccacattctttttctttacttactctatacacgtcctcgtatttatccagtattttgatgatatccaactcagaaatggttgttgtattattgggtgtattgggagtataggtattattagctatgtaccaatttaccaaccctcttaatattgattgaacaatcacatcggttatccaatcaataaccacattaataactaaattgtagtgtatatatagaccatatatgtttctatttttttgacagttacgtatagtttcagtaagttttgattgttgtattcctgtatctctagataagttagtcatatagtcccttccggcgatacgttttttccaagcccgaaattgattagccaaatgtgtatttatttttgtgatattgatataatatgtaatgttattaatatttcggataatgcatactgttagtcttatatcatttggttcatctatgtattgtaatattgttacatgatctatagatgatgtattgattttggcaggatcgaattccatatccgcgactaaacagtgaaaaaaatgtaaatactttttaaattttaaattagtaaaacttttttttattttttatgattccaaaaatactgaatacaaagtcctaaattataaatatggagatcatactaccacaacttattattatgcatactcagccggtgtaatagatagatatatataattctattacaccggcagacaattaccgatcggtatttgtcgttaccaacataccgtataatatgtaatatacaattccataacccattgacagttgttatacatcaaaattgcaattcttttgattacgatgttataagaatgtagttaattgatgtatgatgttaatgtgtcctctttcctcttataacatcgtaatcaaaaacttttttataatatatacctaataatgtgtcttaatagttctcgtgattcgtcaaacaatcattcttataaaatataataaagcaacgtaaaacacataaaaataagcgtaactaataagacaatggatatttacgacgataaaggtctacagactattaaactgtttaataatgaatttgattgtataaggaatgacatcagagaattatttaaacatgtaactgattccgatagtatacaacttccgatggaagacaattctgatattatagaaaatatcagaaaaatactatatagacgattaaaaaatgtagaatgtgttgacatcgatagtacaataacttttatgaaatacgatccaaatgatgataataagcgtacgtgttctaattgggtacccttaactaataactatatggaatattgtctagtaatatatttggaaacaccgatatgtggaggcaaaataaaattataccaccctacaggaaatataaagtcggataaggatattatgtttgcaaagactctagactttaaatcaaagaaagtgttaactggacgtaaaacaattgccgttctagacatatccgtttcatataatagatcaatgactactattcactacaacgacgacgttgatatagatatacatactgataaaaatggaaaagagttatgttattgttatataacaatagatgatcattacttggttgatgtggaaactataggagttatagtcaatagatctggaaaatgtctgttagtaaataaccatctaggtataggtatcgttaaagataaacgtataagcgatagttttggagatgtatgtatggatacaatatttgacttttctgaagcacgagagttattttcattaactaatgatgataacaggaatatagcatgggacactgataaactagacgatgatacagatatatggactcccgtcacagaagatgattacaaatttctttctagactagtattgtatgcaaaatctcaatcggatactgtattcgactattatgttcttactggtgatacggaaccacccactgtattcattttcaaggtaactagattttactttaatatgccgaaataaaaaatttttgtataatatctagaggtagaggtattgtttagataaatacaaataacatagatacatcgcatacttagcatttttataaatatacataagacatacactttatacattttttttgtaaaaatactcataaaaaaatttataaaaattatggcacaaccatatcttgtataggtagtttagttcgtcgagtgaacctataaacagataatagacaacacgtaataataataatgcctactaatacaagcataataccgggagatgggatatatgacgttgtagtgtttgggttttctgaacgttgatagtctactaatactacatgctgacatctaatgcctgtataaccatgagagcatctacaatacataccgtcaatatctctagcgtggatacagtcaccgtgtaaacaatatccatctccctctggaccgcataatctgatagctggaatatctgttgtagcgtttgtaatttctggcgatgtcgtttcgatagcgttaccactatcggcgaatgatctgattatcatagcagcgaacaacaacatcagatatttcatcgacatttttgatggattttgtgtttatgctgtttctcagtgtgtgtttatgacaagattgggaattttatattattaattcagtaatataaactaataatatattgttaattgtgtaaataatataaaaataacaatacaatattgaatgtgttgctgttaaaaatgatcataaacacggagtttattttatatgtctcgcataaacattactaaaaaaatatattgttctgtttttctttcacatctttaattatgaaaaagtaaatcattatgagatggacgagattgtacgcatcgttcgcgacagtatgtggtacatacctaacgtatttatggacgacggtaagaatgaaggtcacgtttctgtcaacaatgtctgtcatatgtatttcacgttctttgatgtggatacatcgtctcatctgtttaagctagttattaaacactgcgatctgaataaacgaggtaactctccattacattgctatacgatgaatacacgatttaatccatctgtattaaagatattgttacaccacggcatgcgtaactttgatagcaaggatgaaaaaggacaccactatcaatcgataacaagatctttgatatactaacggacaccattgatgactttagtaaatcatccgatctattgctgtgttatcttagatataaattcaatgggagcttaaactattacgttctgtacaaaggatccgacgaggatgaactcacttctcttcattactactgtaaacacatatccacgttctacaaaagcaattattacaagttaagtcacactaagatgcgagccgagaagcgattcatctacgcgataatagattatggagcaaacattaacgcggttacacacttaccttcaacagtataccaaacatagtcctcgtgtggtgtatgctcttttatctcgaggagccgatacgaggatacgtaataatcttgattgtacacccatcatggaacgattgtgcaacaggtcatattctcataatgttactcaattggcacgaacaaaaggaagaaggacaacatctactttatctattcataaaacataatcaaggatacactctcaatatactacggtatctactagataggttcgacattcagaaagacgaatactataataccgcctttcaaaattgtaacaacaatgttgcctcatacatcggatacgacatcaaccttccgactaaagacggtattcgacttggtgtttgaaaacagaaacatcatatacaaggcggatgttgtgaatgacatcatccaccacagactgaaagtatctctacctatgattaaatcgttgttctacaagatgtctctccctacgacgattactacgtaaagaagataatagcctactgcctattaagggacgagtcattcgcggaactacatagtaaattctgtttaaacgaggactataaaagtgtatttatgaaaaatatatcattcgataagatagattccatcatcgtgacataagtcgccttaaagagattcgaatctccgacaccgacctgtatacggtatcacagctatcttaaagccatacattcagacagtcacatttcatttcccatgtacgacgatctcatagaacagtgccatctatcgatggagcgtaaaagtaaactcgtcgacaaagcactcaataaattagagtctaccatcggtcaatctagactatcgtatttgcctccggaaattatgcgcaatatcatctaaacagtatgttgtacgaaaagaaccattacaaatattatccatgatagaaagaaaatatctatatgattggagaagtaggaaacaggaacaagacgacgattactacattattaaatcatgaagtccgtattatactcgtatatattgtttctctcatgtataataataaacggaagagatatagcaccgcatgcaccatccgatggaaagtgtaaagacaacgaatacaaacgccataatttgtgtccgggaacatacgcttccagattatgcgatagcaagactaacacacaatgtacgccgtgtggttcgggtaccttcacatctcgcaataatcatttacccgcttgtctaagttgtaacggaagacgcgaccgtgtaacacgactcacaatagaatctgtgaatgctctcccggatattattgtcttctcaaaggatcatccggatgcaaggcatgtgtttcccaaacaaaatgtggaataggatacggagtatccggagacgtcatctgttctccgtgtggtctcggaacatattctcacaccgtctcttccgcagataaatgcgaacccgtacccagtaatacctttaactatatcgatgtggaaattaatctgtatccagttaacgaccactaccggtctcagcgaatccatctcaacgtcggaactaactattactatgaatcataaagactgtaatcccgtatttcgtgaggaatacttctccgtccttaataaggtagcaacttcaggtttctttacaggagaaaggtgtgcactctgaatttcgagattaaatgcaataacaaaaatttttcctccaaacagttaacgaaagcaaagaatgatgacggtatcatgccgcattcggagactgtctatctagcgtcgacatctatatactatatagtaataccaatactcaagactacgaaactgatacaatctcttatcatgtgggtaatgttctcgatgtcgatagccatatgcccggtagttgcgatatacataaactgatcactaattccaaacccacccgctttttatagtaagtttttcacccataaataataaatacaataattaatttctcgtaaaagtagaaaatatattctaatttattgcacggtaaggaagtagaatcataaagaacagtactcaatcaatagcaatcatgaaacaatatatcgtcctggcatgcatgtgcctgccagtcttcagcaatcatcctcatcctcctcctcgtgtacggaagaagaaaacaaacatcatatgggaatcgatgttattatcaaagtcacaaagcaagaccaaacaccgaccaatgataagatttgccaatccgtaacggaaattacagagtccgagtcagatccagatcccgaggtggaatcagaagatgattccacatcagtcgaggatgtagatcctcctaccacttattactccatcatcggtggaggtctgagaatgaactttggattcaccaaatgtcctcagattaaatccatctcagaatccgctgatggaaacacagtgaatgctagattgtccagcgtgtccccaggacaaggtaaggactctcccgcgatcactcatgaagaagctctggctatgatcaaagactgtgaggtgtctatcgacatcagatgtagcgaagaagagaaagacagcgacatcaagacccatccagtactcgggtctaacatctctcataagaaagtgagttacgaagatatcatcggttcaacgatcgtcgatacaaaatgtgtcaagaatctagagtttagcgttcgtatcggagacatgtgcaaggaatcatctgaacttgaggtcaaggatggatttaagtatgtcgacggatcggcatctgaaggtgcaaccgatgatacttcactcatcgattcaacaaaactcaaagcgtgtgtctgaatcgataactctattcatctgaaattggatgagtagggttaatcgaacgattcaggcacaccacgaattaaaaaagtgtaccggacactatattccggtttgcaaaacaaaaatgttcttaactacattcacaaaaagttacctctcgcgacttcttctttttctgtctcaatagtgtgatacgattatgacactattcctattcctattcctatttcctttcagggtatcacaaaaatattaaacctctttctgatggtctcataaaaaaagttttacaaaaatatttttattctctttctctctttgatggtctcataaaaaaagttttacaaaaatatttttattctctttctctctttgatggtctcataaaaaaagttttacaaaaatatttttattctctttctctctttgatggtctcataaaaaaagttttacaaaaatatttttattctctttctctctttgatggtctcataaaaaaagttttacaaaaatatttttattctctttctctctttgatggtctcataaaaaaagttttacaaaaatatttttattctctttctctctttgatggtctcataaaaaaagttttacaaaaatatttttattctctttctctctttgatggtctcataaaaaaagttttacaaaaatatttttattctctttctctctttgatggtctcataaaaaatattaaacctctttctgatggtgtcactaaaatatttttattctcattctcattttctctttctctcttcaatggagtcataaaatatttttattctctttctctcttcgatggtctcacaaaaatattaaacctctttctgatggtgtcactaaaatatttttattctcattctcattttctctttctctcttcaatggagtcataaaatatttttattctctttctctcttcgatggtctcacaaaaatattaaacctctttctgatggagtcgtaaaaaagttttatctctttctctcttcgatggtctcacaaaaatattaaacctctttctgatggagtcgtaaaaaagttttatctctttctctcttcgatggtctcacaaaaatattaaacctctttctgatggagtcgtaaaaaagttttatctctttctctcttcgatggtctcacaaaaatattaaacctctttctgatggagtcgtaaaaaagttttatctctttctctcttcgatggtctcacaaaaatattaaacctctttctgatggagtcgtaaaaaagttttatctctttctctcttcgatggtctcacaaaaatattaaacctctttctgatggagtcgtaaaaaagttttatctctttctctcttcgatggtctcacaaaaatattaaacctctttctgatggagtcgtaaaaaagttttatctctttctctcttcgatggtctcacaaaaatattaaacctctttctgatggagtcgtaaaaaagttttatctctttctctcttcgatggtctcacaaaaatattaaacctctttctgatggagtcgtaaaaaagttttatctctttctctcttcgatggtctcacaaaaatattaaacctctttctgatggagtcgtaaaaaagttttatctctttctctcttcgatggtctcacaaaaatattaaacctctttctgatggagtcgtaaaaaagttttatctctttctctcttcgatggtctcacaaaaatattaaacctctttctgatggagtcgtaaaaaagttttatctctttctctcttcgatggtctcacaaaaatattaaacctctttctgatggagtcgtaaaaaagttttatctctttctctcttcgatggtctcacaaaaatattaaacctctttctgatggagtcgtaaaaaagttttatctctttctctcttcgatggtctcacaaaaatattaaacctctttctgatggagtcgtaaaaaagttttatctctttctctcttcgatggtctcacaaaaatattaaacctctttctgatggagtcgtaaaaaagttttatctctttctctcttcgatggtctcacaaaaatattaaacctctttctgatggagtcgtaaaaaagttttatctctttctctcttcgatggtctcacaaaaatattaaacctctttctgatggagtcgtaaaaaagttttatctctttctctcttcgatggtctcactaaaatattttttattctctttctgatgcatcaactatttcttaaacaataacgtccaacaacatatactcgtcgagcttatcaacatcccctatgcccatctaggttaccagacaattgtatatcataaaataatgtttataatttacacgttaaaatcatataataaaacgtagatcgtataatattttttggtatataaatgatctagtaaaatccatgtaggggatactgctcacattttttctttggtacaaaatttcacacaagtttttatacagacaaattcttgtccatatattttaaaacattgacttttgtactaagaaaaatatctagatcaactatctctttctctttctctcttcgatggtctcacaaaaatattaaacctctttctgatggagtcgtaaaaaagttttatctctttctctcttcgatggtctcacaaaaatattaaacctctttctgatggagtcgtaaaaaagttttatctctttctctcttcgatggtctcacaaaaatattaaacctctttctgatggagtcgtaaaaaagttttatctctttctctcttcgatggtctcacaaaaatattaaacctctttctgatggagtcgtaaaaaagttttatctctttctctcttcgatggtctcacaaaaatattaaacctctttctgatggagtcgtaaaaaagttttatctctttctctcttcgatggtctcacaaaaatattaaacctctttctgatggagtcgtaaaaaagttttatctctttctccttcgatggtctcacaaaaatattaaacctctttctgatggagtcgtaaaaaagttttatctctttctctcttcgatggtctcacaaaaatattaaacctctttctgatggagtcgtaaaaaagttttatctctttctctcttcgatggtctcacaaaaatattaaacctctttctgatggagtcgtaaaaaagttttatctctttctccttcgatggtctcacaaaaatattaaacctctttctgatggagtcgtaaaaaagttttatctctttctccttcgatggtctcacaaaaatattaaacctctttctgatggagtcgtaaaaaagttttatctctttctctcttcgatggtctcacaaaaatattaaacctctttctgatggagtcgtaaaaaagttttatctctttctctcttcgatggtctcacaaaaatattaaacctctttctgatggtctctataaagcgatcgatctttcttacactctagagtttcctacagtcatgggtcacacatttttttctagacactaaataaaattagtaaaattaaattaattataaaattatatatataatttactaactttagttagataaattaataatatataagttttagtacattaatattatattttaaat

SEQ ID NO: 19 - DNA, 191737 bp, Vaccinia virus
  misc_feature: Vaccinia virus Copenhagen
gtaaaattaaattaattataaaattatgtatatgatttactaactttagttagataagttagtaatacataaattttagtatattaatattatattttaaatatttatttagtgtctagaaaaaaatgtgtgaccaacgaccgtaggaaactctagagggtaagaaaaatcaatcgctttatagagaccatcagaaagaggtttaatatttttgtgagaccatcgaaggagaaagagataaaacttttttacgactccatcagaaagaggtttaatatttttgtgagaccatcgaaggagaaagagataaaacttttttacgactccatcagaaagaggtttaatatttttgtgagaccatcgaaggagaaagagataaaacttttttacgactccatcagaaagaggtttaatatttttgtgagaaaggagaaagagataaaacttttttacgactccatcagaaagaggtttaatatttttgtgagaccatcgaaggagaaagagataaaacttttttacgactccatcagaaagaggtttaatatttttgtgagaccatcgaaggagaaagagataaaacttttttacgactccatcagaaagaggtttaatatttttgtgagaccatcgaaggagaaagagataaaacttttttacgactccatcagaaagaggtttaatatttttgtgagaccatcgaaggagactccatcagaaagaggtttaatatttttgtgagaaaggagaaagagataaaacttttttacgactccatcagaaagaggtttaatatttttgtgagaaaggagaaagagataaaacttttttacgactccatcagaaagaggtttaatatttttgtgagaccatcgaaggagaaagagataaaacttttttacgactccatcagaaagaggtttaatatttttgtgagaccatcgaaggagaaagagataaaacttttttacgactccatcagaaagaggtttaatatttttgtgagaccatcgaagagagaaagagataaaacttttttacgactccatcagaaagaggtttaatatttttgtgagaccatcgaagagagaaagagataaaacttttttacgactccatcagaaagaggtttaatatttttgtgagaccatcgaagagagaaagagataaaacttttttacgactccatcagaaagaggtttaatatttttgtgagaccatcgaagagagaaagagataaaacttttttacgactactccatcagaaagaggtttaatatttttgtgagaccatcgaagagagaaagagataaaacttttttacgactccatcagaaagaggtttaatatttttgtgagaccatcgaagagagaaagagataaaacttttttacgactccatcagaaagaggtttaatatttttgtgagaccatcgaagagagaaagagataaaacttttttacgactccatcagaaagaggtttaatatttttgtgagaccatcgaagagagaaagagataaaacttttttacgactccatcagaaagaggtttaatatttttgtgagaccatcgaagagagaaagagataaaacttttttacgactccatcagaaagaggtttaatatttttgtgagaccatcgaagagagaaagagataaaacttttttacgactccatcagaaagaggtttaatatttttgtgagaccatcgaagagagaaagagataaaacttttttacgactccatcagaaagaggtttaatatttttgtgagaccatcgaagagagaaagagataaaacttttttacgactccatcagaaagaggtttaatatttttgtgagaccatcgaagagagaaagagataaaacttttttacgactccatcagaaagaggtttaatatttttgtgagaccatcgaagagagaaagagataaaacttttttacgactccatcagaaagaggtttaatatttttgtgagaccatcgaagagagaaagagataaaacttttttacgactccatcagaaagaggtttaatatttttgtgagaccatcgaagagagaaagagataaaacttttttacgactccatcagaaagaggtttaatatttttgtgagaccatcgaagagagaaagagataaaacttttttacgactccatcagaaagaggtttaatatttttgtgagaccatcgaagagagaaagagataaaacttttttacgactccatcagaaagaggtttaatatttttgtgagaccatcgaagagagaaagagataaaacttttttacgactccatcagaaagaggtttaatatttttgtgagaccatcgaagagagaaagagataaaacttttttacgactccatcagaaagaggtttaatatttttgtgagaccatcgaagagagaaagagataaaacttttttacgactccatcagaaagaggtttaatatttttgtgagaccatcgaagagagaaagagataaaacttttttacgactccatcagaaagaggtttaatatttttgtgagaccatcgaagagagaaagagataaaacttttttacgactccatcagaaagaggtttaatatttttgtgagaccatcgaagagagaaagataaaacttttttacgactccatcagaaagaggtttaatatttttgtgagaccatcgaagagagaaagagataaaacttttttacgactccatcagaaagaggtttaatatttttgtgagaccatcgaagagagaaagagataaaacttttttacgactccatcagaaagaggtttaatatttttgtgagaccatcgaagagagaaagagaaagagatagttagtctagatatttttcttagtacaaaagtcaatgttttaaaatatatggacaagaatttgtctgtataaaaacttgtgtgaaattttgtaccaaagaaaaaatgtgagcagtatcccctacatggattttactagatcatttatataccaaaaaatattatacgatctacgttttattatatgattttaacgtgtaaattataaacattattttatgatatacaattgtctggtaacctagatgggcataggggatgttgataagctcgacgagtatatgttgttggacgttattgtttaagaaatagttgatgcatcagaaagagaataaaaaatattttagtgagaccatcgaagagagaaagagataaaacttttttacgactccatcagaaagaggtttaatatttttgtgagaccatcgaagagagaaagagaataaaaatattttatgactccattgaagagagaaagagaaaatgagaatgagaataaaaatattttagtgacaccatcagaaagaggtttaatatttttgtgagaccatcgaagagagaaagagaataaaaatattttatgactccattgaagagagaaagagaaaatgagaatgagaataaaaatattttagtgacaccatcagaaagaggtttaatattttttatgagaccatcaaagagagaaagagaataaaaatatttttgtaaaactttttttatgagaccatcaaagagagaaagagaataaaaatatttttgtaaaactttttttgtgagaccatcgaagagagaaagagaataaaaatatttttgtaaaactttttttatgagaccatcaaagagagaaagagaataaaaatatttttgtaaaactttttttatgagaccatcaaagagagaaagagaataaaaatatttttgtaaaactttttttatgagaccatcaaagagagaaagagaataaaaatatttttgtaaaactttttttatgagaccatcaaagagagaaagagaataaaaatatttttgtaaaactttttttatgagaccatcaaagagagaaagagaataaaaatatttttgtaaaactttttttatgagaccatcaaagagagaaagagaataaaaatatttttgtaaaactttttttatgagaccatcagaaagaggtttaatatttttgtgataccctgaaaggaaataggaataggaataggaatagtgtcataatcgtatcacactattgagacagaaaaagaagaagtaacgagaggtaactttttgtgaatgtagttaagaacatttttgttttgcaaaccggaatatagtgtccggtacacttttttaattcgtggtgtgcctgaatcgttcgattaaccctactcatccaatttcagatgaatagagttatcgattcagacacacgctttgagttttgttgaatcgatgagtgaagtatcatcggttgcaccttcagatgccgatccgtcgacatacttgaatccatccttgacctcaagttcagatgattccttgcacatgtctccgatacgaacgctaaactctagattcttgacacattttgtatcgacgatcgttgaaccgatgatatcttcgtaactcactttcttatgagagatgttagacccgagtactggatgggtcttgatgtcgctgtctttctcttcttcgctacatctgatgtcgatagacacctcacagtctttgatcatagccagagcttcttcacgagtgatcgcgggagagtccttaccttgtcctggggacacgctggacaatctagcattcactgtgtttccatcagcggattctgagatggatttaatctgaggacatttggtgaatccaaagttcattctcagacctccaccgatgatggagtaataagtggtaggaggatctacatcctcgactgatgtggaatcatcttctgattccacctcgggatctggatctgactcggactctgtaatttccgttacggattggcaaatcttatcattggtcggtgtttggtcttgctttgtgactttgataataacatcgattcccatatgatgtttgttttcttcttccgtacacgaggaggaggatgaggatgattgctgaagactggcaggcacatgcatgccaggacgatatattgtttcataattgctattgattgagtactgttctttatgattctacttccttaccatgcaataaattagaatatattttctacttttacgagaaattaattattgtatttattatttatgggtgaaaaacttactataaaaagcgggtgggtttggaattagtgatcagtttatgtatatcgcaactaccgggcatatggctatcgacatcgagaacattacccacatgataagagattgtatcagtttcgtagtcttgagtattggtattactatatagtatatagatgtcgacgctagatatacagtctccgaatgcggcatgataccgtcatcattctttgctttcgttaactgtttggaggaagaatctttgttattgcatttaatctcgaaattcagagtgcacacctttctcctgtaaagaatcctgaagtcgctaccttattaagaacggagaagtatccatcacgaaatacgggattacagtctttatgattcatagtaatagttagttccgacgttgagatggattcactgagaccggtagtggtcgtccgagtacacgacgtgtcgttgacgggatacagattaatttccacatcgatatagttaaaggtatttctgggtacgggttcgcatttatctgcggaagagacggtgtgagaatatgttccgagaccacacggagaacagatgacgtctccggatactccgtatcctattccacattttgtttgggaaacacatgccttgcatccggatgatcctttgagaagacaataatatccgggagagcattcacagattctattgtgagtagtgttacacgatcgcgtcttccgttacaacttagacaagcgggtaaatgattattgcgagatgtgaaggtacccgaaccacacggcgtacattgtgtgttagtcttgctatcgcataatctggaagcgtatgttcccggacacaaattatggcgtttgtattcgttgtctttacactttccatcggatggtgcatgcggtgctatatctcttccgtttattattatacatgagagaaacaatatatacgagtataatacggacttcataatttaataatgtagtaatcgttgtcgtgttcctgtttcctacttctccaatcatatagatattttctttctatcatggataatatttgtaatggttctttccgtacaacatactgtttagatgatattgcgcataatttccggaggcaaatacgatagtctagattgaccgatggtagactctaatttattgagtgctttgtcgacgagtttacttttacgctccatcgatagatggcactgttctatgagatcgtcgtacatgggaaatgaaatgtgtctgtccgaatgtatggcttcaagatagctgtgataccgtatacaggtcggtgtcggagattcgaatctctttgaggcgacttatgtcacgatgatggaatctatcttatcgaatgatatatttttcataaatacacttttatagtcctcgtttaaacagaatttactatgtagttccgcgaatgactcgtcccttaataggcagtaggctagtatcttttttacgtagtaatcgtcgtagggagagaattctgacatcttgtagaacaacgatttaatcataggtagagatactttcagtctgtggtggatgatgtcattcacaacatccgccttgtatatgatgtttctgttttcaaacaccaagtcgaataccgtctttagtcggaaggttgatgtcgtatccgatgtatgaggcaacattgttgttacaattttgaaaggcggtatatgtattcgtctttctgaatgtcgaacctatctagtagataccgtagtatattgagagtgtatccttgattatgttttatgaatagataaagtagatgttgtccttcttccttttgttcgtgccaattgagtaacattatgagaatatgacctgttgcacaatcgttccatgatgggtgtacaatcaagattattacgtatcctcgagataaaagagcatacaccacacgaggactatgtttggtatactgttgaaggtaagtgtgtaaccgcgttaatgtttgctccataatctattatcgcgtagatgaatcgcttctcggctcgcatcttagtgtgacttaacttgtaataattgcttttgtagaacgtggatatgtgtttacagtagtaatgaagagaagtgagttcatcctcgtcggcgcaattagggtcggatcctttgtacagaacgtagtagtttaagctcccattgaatttatatctaagataacacagcaatagatcggatgatttactaaagtcatcaatggtgtccgttagtatatcaaagatcttgttatcgattgatagtgaatgaatcagatagtggtgtcctttttcatccttgctatcaaagttacgcatgccgtggtgtaacaatatctttaatacagatggattaaatcgtgtattcatcgtatagcaatgtaatggagagttacctcgtttattcagatcgcagtgtttaataactagcttaaacagatgagacgatgtatccacatcaaagaacgtaaaatacatatgacaaacattgttgacagaaacgtgaccttcattcttaccgtcgtccataaatacgttaggtatgtaccacatactgtcgcgaacgatgctcacaatctcgtccatctcgcccatctcatacatttcatcatttactttttcataattagagatgtacgaaagaaaaagaaaaagaaaaagaaaaacagaacaatatatttttttagtaatgtttatgcgagacatataaaataaactccgtgtttatgatgccggtaaatgtttttatcatcttggacggaatcgattttgtaatatgtcatggaaacaaatgaaacaggacattatcactccatgataaattatttaatggagtaataaagtatctccatgggtaatttcgaaatcaagttatcgtctgtattaatgttgtccactatggagtcgatcctctcactgttctttacagtttctgtaatgatggacgttagttcttttttgtaccatttgatgtcggattctttgcgtatctcagtctgtggcgtttgcttcgtttaaataatatatcaaacatggagacgcctgatatgtaggcattcttcattctattaatgtctactctatagcgctttagttccttatgatgaccggcgatatcatacttactttagaaggaaaatcatcatctaggattaaggcgtatctgatacaggcgaataatggttcaggatatagatagcgtatatctctattaaatgcgtcaatcatagtctctagagtgggatggtagctaagtaataaatcaactatcctcgttttgttttctctttggtaactgcttttctggatggccgtattgattatcgagcgtgatgttgtaacactcgctccatattccaataaccgctttgcaaattgtatattattgacatcgaccgcgtaatatagtagagttttattctcattatcgatcatatctatatcatccatgtacttgcttagtatatcaaatacatctattagtatggtttcataacagtgatacccgcaattattaaatctcgataatatcagaccgtacatacatagacggccattgttagatatgtgatttacagccgcgtgtccatattttccacgataaaccttacgacgtttacatcgacgagattattattaacaaagtagtcgtgcagaggatagttgttgtccgttatctaacatgcatcgaacgaccatatcgccgtaatgtaagtagtttatcaacatggcttgtacgatggattcatcctgttgtctaaatctctttagaatgttatcgatgatgtagtggttatattctctggaatcgtacgaagtaatactacgcattacgtcgacaagagtatgacgtctctcaataagaagattaacgatttccatgtctacattatatggggttactctaaatcgcttgtttagataatacgcctctaatatagggctgacgtcgtatactctacacgtgtccacatcctttattaataataatttaacaatctctatatctatggttgagaaagaccagtagtattggatgggtaaagatcctccttcgtctctgccatggatggaaacattgttattgatcaaacatttaattacatccttggatagagattgagattctctatgagacgatatatagtaatgaagagagttcttacacatatcactgttgtacatacaggtacgaaatacgtaaccggtgctgtaacattctgatttaagaagccatagcaatacttctggtctcggattaggcgtcgttacgtatatatccaccaatccgagaccattgattgcataattcgtattcttggacggacgtatccgtttatccacaattaggtattttagcagacgtaagtcgatattatccgaagacagatcgaaatcatttatattcgacttgagttcgttagaggaattcgaatagctggatatcagtagatgcacaatctgagattttacgtatctatgcttactgtatgctcctagcggagttaatccttcgttgtttctacaaagtctctcgactccgcgagagagtaacagtcgaacaatcttaatgtctgtatcgcatttattggagacgtaacaatgtagcgcattgtttcctcgtctatctatatgttttgataagttgtgacacgtttcaatctctagttttatttttttgtacgtcacatcttcatccagtagacgacatagaatagtgcactctctaccacaataatccatagctattctggtgctaattattcctatttcacgaaaaatgatgaaggcaatcattcctcataagatgataaaaagtgtagtgagagagcatgaaggagatttagtatttagcagtgcggatatgatccaagagggtgagatagtcgttctcgttcagaatctttcgcagcataagtagtatgtcgatatacttatcgttgaagactcttccagagacgatagctgattgagtacaaagtccaatgattgcacgaagttcttcggcggttttcatggagtcatttctgatgaaacatttaatgatctccacgcaattgtcgatattgtcccacggaagtgaatccttcaactcaccaccaaagagctccgttgcatcagttctgaaagagatgagaagcctgtagagagaccctgcgctttctctatgggtccatctatgagaaacccacaggatgtattcagtcagacaatgtctgacgtcggccacggtattcagggagtccttagtagcgtggcaatgacagggtctgaactgggcacaaggaaaggccattgtaaaggtagacctgtagccgtttatgctaatagagggctttaatttccatttttttaatgggttgtggatgaggaatgagagtgatatcatattgagatacgtagttatgtagaggtgtatttcctatattatttactttcggtttcatattttaccaactctttaataaatttcttttcacgatgcatcttattgaatgacgttttctcataagtggacatatagatgcagaagtaatgaagaaaagtattacctctatcatctacataattagggtctgctcctttttttaacaacttatacagtacgtagtagtagtttatcggttttaaatcaagtctagaatatatagtggattaatatatttttatattagctaaagctatctatactatcagaaagcatatcattctcaacttcatcatgagttaaatatttgtgtaatggatgtcatgaacattaaacgtattcatgacatactcctttaataggttttttaaaacagatgattcaaatccttcattcattagataacagtgtaacggagtcgtaccttctactagtttgtttatatcacagcattctacaaacagtctaaacaatagagaagacggacagactttaacgtataaatgacacatgttatcgatattcgttgatgaattattattaaacgtagttatgataaatgattctaacgacatctctcgctagagataaaatctagtatcgtatcattaaacatctttgcatcatactcgcatagcatagtttttcataattaatacaatatttaaaagacttattcggaaagtattttaatacatgtatcatcgatggagatccatatgaggagtcacttgtagttcttcagtagtaataacagtgctatcatcgatagtataattatatgtagaaggttcatatgttgttgtaattggagtaactgttggtagttcttccgtggaatcaataattatactaacagcaatagtataattatataaatatgttccgttgatatcacatattttaatgaactcatttctaacaccctcagctatatctgtccaattaaatgtagccaacaatctactacgttctctttgattgactacttgtacggtagcgacgctacactatctttattgtcttctacatgctccaattgaatgtcatgatacaacgcagtttttcttatgcatgtttcataacaccacgaacatgtcgcagtaagatatatagccagagataatttctgtaaattcatgattgccggtcataaacaagcccgtcaataattgtggctatatattcagtttatagagcaaaataattaagcacaatagcgcttaatctcaaaatatgttatgtttatttttttcatattaaacatactggttaaaatcctctaaaggctgatcttcatctataaatcaagatcataattacatttagacagtggtttcatgtttataaaaatgttctttttgtgtgaataaggaatatactaatcaataatcaaccatcgaccccattacgatagtatgcaggcaacccccattagagaggtacgtgtaatcagtctctccagttttagtatttttataagtcattgttacataaacggcttttaaacagtctcctcgataataagccatatctggaaatttattaaatactcgagtcattttacgcacggtcaaaaaagtaagtaatgtcgacgacttcttacattctatagaaacacctagaatactcattttcttttggaaaatatcctcagactctgatttgaacaatgcacgacctatagtaaaccgtgaccaataagttatattagtcaatggtatatccaaaccatcaggtgtggatagtccagtctttggtatcgatagtgtagttattgaactgagaagttaccgtatagtctttttggtcatctctaaacaaggaaactaatacctctacactattgaacgatttatcttccgtaatgggtggactagcgatggatgaagtcacgaatataagacacgctattaatccgtatatcatcattttgatattacttataataacgatttgtttaatttttagtttatactattaattgtaaatgatattattatttttttaagtattatcagctttagtttatactattactatttgtaatatttagacatagataaacgtgataaaagtctatttgtttatatttattgcggatagcagtatttccctataaaaagtatacgtcctgtggtgtctttaatcatgtacatgaatggatggtttatgtagaccttcgtacgatataccatcgaaaagttaatcgtaaatactcctgtaacggccgatgcttctgtatactcctcattaacatctataaacgtcgtatgtagaaatttttctacagtgatagtttcattacacatcttgctaaaatctgcataatatccgaatatattagtaagtcctaaattttctaaaatcggtaccagattatacggttctgtcatttccactttaaactttggcatatacaagtctatacttttagtagataacataccacaccattttttaaatttttcatctgttatatttttttctatgttatatataccttctatgtcgtccggtagtataatcaccatactagagtttccctcgtatggaatatcgataatagagaatcctccgaataattcattaatatgtacatattgcaagttattctcggtacccaccatcatatcaacactggtaactatattcttagaaatataaaacttgtctgtatatgtaagatgtttagaaaatggatatttccacattgctttaaaatggacggcgctaacaactgtcatacgagtattaatggatagcggactagtcaataaggaattaattttaccatttgtcattgtcttaacccattcgttgattagttcctttgtttggttagcattattaaagtttacagtttgaaaatcgtcttttattttttgtaggaaggaggcgtggaactcgatactatcgctaccgtatattttatttgcggtagctagtgtcgcacaatacggaatatctacgtccatgtcattattgtcatcgggtgtattctcattcatattctctatatattttgatagttgttcagctgtagaaccagctgctccatgatttagaatagataaagtagataaaatagaaactggagaaatcaaaacattttcatcagggtgttttacgattagttctttaaagatatccatggtatagaccaaacaataacgataacgatatatatcataaataaataatgttaaatttcagtttatgtttgtaccccgtattcatacttaacaaattggtattgcgtacacaatcaatcatattacataccattaataatgcaagcataaaaaatcgttagtagatgtttctaaatataggttccgtaagcaaagaatataagaatgaagcggtaatgataaaatcaatcgttatctaaaatgatcatactcatttattttattctattatattaacacatacatttttaacagcaacacattcaatattgtattgttatttttatattatttacacaattaacaatatattattagtttatattactgaattaataatataaaattcccaatcttgttataaacacacactgagaaacagcataaacacagaatccatcaaaaatgtcgatgaaatatctgatgttgttgttcgctgctatgataatcagatcattcgccgatagtggtaacgctatcgaaacgacattgccagaaattacaaacgctacaacagatattccagctatcagattatgcggtccagagggagatggatattgtttacacggtgactgtatccacgctagagatatcgacggtatgtattgtagatgctctcatggttatacaggcattagatgtcagcatgtagtattagtagactatcaacgttcagaaaacccaaacactacaacgtcatatatcccatctcccggtattatgcttgtattagtaggcattattattattattacgtgttgtctattatctgtttataggttcactcgaagaactaataaactacctctacaagatatggttgtgccataatttttataaattttttttatgagtatttttacaaaaatgtataaagtgtatgtcttatgtatatttataaaaatgctaaatatgcgatgtatctatgttatttgtatttatctaaacaatacctctacctctagatattatacaaaaattttttatttcagcatattaaagtaaaatctagttaccttgaaaatgaatacagtgggtggttccgtatcaccagtaagaacataatagtcgaatacagtatccgattgagattttgcatacaatactagtctagaaagaaatttgtaatcatcttctgtgacgggagtccatatatctgtatcatcgtctagtttatcagtgtcccatgctatattcctgttatcatcattagttaatgaaaataactctcgtgcttcagaaaagtcaaatattgtatccatacatacatctccaaaactatcgcttatacgtttatctttaacgatacctatacctagatggttatttactaacagacattttccagatctattgactataactcctatagtttccacatcaaccaagtaatgatcatctattgttatataacaataacataactcttttccgtttttatcagtatgtatatctatattaacgtcgtcgttgtagtgaatagtagttattgatctattatatgaaacggatatgtctagaacggcaattgttttacgtccagttaacactttctttgatttaaagtctagagtctttgcaaacataatatccttatccgactttatatttcctgtagggtggtataattttattttgcctccacatatcggtgtttccaaatatattactagacaatattccatatagttattagttaagggtacccaattagaacacgtacgcttattatcatcatttggatcgtatttcataaaagttattgtactatcgatgtcaacacattctacattttttaatcgtctatatagtatttttctgatattttctataatatcagaattgtcttccatcggaagttgtatactatcagaatcagttacatgtttaaataattctctgatgtcattccttatacaatcaaattcattattaaacagtttaatagtctgtagacctttatcgtcgtaaatatccattgtcttattagttacgcttatttttatgtgtttttacgttgctttattatattttataagaatgattgtttgacgaatcacgagaactattaagacatatattattagaggtatatattataaaaaagtttttgattacgatgttataagaggaaagaggacacattaacatcatacatcaattaactacattcttataacatcgtaatcaaaagaattgcaattttgatgtataacaactgtcaatgggttatggaattgtatattacatattatacagtatgttggtaacgacaaataccgatcggtaattgtctgccggtgtaatagaattatatatatctatctattacaccggctgagtacctacactattatatgattatagtttctatttttacagtaccttaactaaagtctctagtcacaagagcaatactaccaacctacactattatatgattatagtttctatttttataggaacgcgtacgagaaaatcaaatgtctaatttctaacggtagtgttgataaacgattatcgtcaatggatacctcctctatcatgtcgtctattttcttactttgttctattaacttattagcattatatattatttgattataaaacttatattgcttattagcccaatctgtaaatatcggattattaacatatcgtttctttgtaggtttatttaacatgtacatcactgtaagcatgtccgtaccatttattttaatttgacgcatatccgcaatttctttttcgcagtcggttataaattctatatatgatggatacatgctacatgtgtacttataatcgactaatatgaagtacttgatacatattttcagtaacgatttattattaccacctatgaataagtacctgtgatcgtctaggtaatcaactgttttcttaatacattcgatggttggtaatttactcagaataatttccaatatcttaatatataattctgctatttctggaatatatttatctgccagtataacacaaatagtaatacatgtaaacccatattttgttattatattaatgtctgcgccattatctattaaccattctactaggctgacactatgcgacttaatacaatgataaagtatactacatccatgtttatctattttgtttatatcatcaatatacggcttacaaagttttagtatcgataacacatccaactcacgcatagagaaggtagggaataatggcataatatttattaggttatcatcattgtcattatctacaactaagtttccattttttaaaatatactcgacaactttaggatctctattgccaaatttttgaaaatatttatttatatgcttaaatctatataatgtagctccttcatcaatcatacatttaataacattgatgtatactgtatgataagatacatattctaacaatagatcttgtatagaaactgtatatcttttaagaattgtggatattaggatattattacgtaaactattacacaattctaaaatataaaacgtatcacggtcgaataatagttgatcaactatataattatcgattttgtgatttttcttcctaaactgtttacgtaaatagttagatagaatattcattagttcatgaccactatagttactatcgaataacgcgtcaaatatttcccgtttaatatcgcatttgtcaagataataatagagtgtggtatgttcacgataagtataataacgcatctcttttttgtgtgaaattaaatagtttattacgtccaaagatgtagcataaccatcttgtgacctagtaataatataataatagagaactgttttacccattctatcatcataatcagtggtgtagtcgtaatcgtaatcgtctaattcatcatcccaattataatattcaccagcacgtctaatctgttctattttgatcttgtatccatactgtatgttgctacatgtaggtattcctttatccaataatagtttaaacacatctacattgggatttgatgttgtagcgtatttctctacaatattaataccatttttgatactatttatttctatacctttcgaaattagtaatttcaataagtctatatcgatgttatcagaacatagatattcgaatatatcaaaatcattgatatttttatagtcgactgacgacaataacaaaatcacaacatcgtttttgatattattatttttcttggtaacgtatgcctttaatggagtttcaccatcatactcatataatggatttgcaccactttctatcaatgattgtgcactgctggcatcgatgttaaatgttttacaactatcatagagtatcttatcgttaaccatgattggttgttgatgctatcgcattttttggtttctttcatttcagttatgtatggatttagcacgtttgggaagcatgagctcatatgatttcagtactgtagtgtcagtactattagtttcgatcagatcaatgtctagatctatagaatcaaaacacgataggtcagaagataatgaatatctgtacgcttctttttgtactgtaacttctcgttttgttagatgtttgcatcgtgctttaacatcaatggtacaaattttatcctcgctttgtgtatcatattcgtccctactataaaattgtatattcagattatcatgagatgtgtatacgctaacggtatcaataaacggagcacaccatttagtcataaccgtaatccaaaaatttttaaagtatatcttaacgaaagaagttgtatcatcgttaggatttggtaaatcattatctacagtgtatggtactagatcctcataagtgtatatatctagagtaatgtttaatttatcaaatggttgataatatggatcctcatgacaatttccgaagatggaaatgagatatagacatgcaataaatctaatcgaagacatggttactccttaaaaaaatacgaataatcaccttggctatttagtaagtgtcatttaacactatactcatattaatccatggactcataatctctatacgggattaacggatgttctatatacggggatgagtagttctcttctttaactttatactttttactaatcatatttagactgatgtatgggtaatagtgtttgaagagctcgttctcatcatcagaataaatcaatatctctgtttttttgttatacagatgtattacagcctcatatattacgtaatagaacgtgtcatctaccttattaactttcaccgcatagttgtttgcaaatacggttaatcctttgacctcgtcgatttccgaccaatctgggcgtataatgaatctaaactttaatttcttgtaatcattcgaaataatttttagtttgcatccgtagttatcccctttatgtaactgtaaatttctcaacgcgatatctccattaataatgatgtcgaattcgtgctgtatacccatactgaatggatgaacgaataccgacggcgttaatagtaatttactttttcatctttacatattgggtactagttttactatcataagtttataaattccacaagctactatggaataagccaaccatcttagtataacacacatgtcttaaagtttattaattaattacatgttgttttatatatcgctacgaatttaaacagagaaatcagtttaggaaaaaaaattatctatctacatcatcacgtctctgtattctacgatagagtgctactttaagatgagacatatccgtgtcatcaaaaatatactccattaaaatgattattccggcagcgaacttgatattggatatatcacaacctttgttaatatctacgacaatagacagcagtcccatggttccataaacagtgagtttatctttctttgaagagatattttgtagagatcttataaaactgtcgaatgacatcgcatttatatctttagctaaatcgtatatgttaccatcgtaatatctaaccgcgtctatcttaaacgtttccatcgctttaaagacgtttccgatagatggtctcatttcatcagtcatactgagccaacaaatataatcgtgtataacatctttgatagaatcagactctaaagaaaacgaatcggctttattatacgcattcatgataaacttaatgaaaaatgtttttcgttgtttaagttggatgaatagtatgtcttaataattgttattatttcattaattaatatttagtaacgagtacactctataaaaacgagaatgacataactagttatcaaagtgtctaggacgcgtaattttcatatggtatagatcctgtaagcattgtctgtattctggagctattttctctatcgcattagtgagttcagaatatgttataaatttaaatcgaataacgaacataactttagtaaagtcgtctatattaactcttttattttctagccatcgtaataccatgtttaagatagtatattctctagttactacgatctcatcgttgtctagaatatcacatactgaatctacatccaattttagaaattggtctgtgttacatatctcttctatattattgttgatgtattgtcgtagaaaactattacgtagaccattttctttataaaacgaatatatagtactccaattatctttaccgatatatttgcacacataatccattctctcaatcactacatctttaagattttcgttgttaagatatttggctaaactatataattctattagatcatcaacagaatcagtatatatttttctagatccaaagacgaactctttggcgtcctctataatattcccagaaaagatattttcgtgttttagtttatcgagatctgatctgttcatatacgccatgattgtacggtacgttatgataaccgcataaaataaaaatccattttcatttttaaccaatactattcataattgagattgatgtaatactttgttactttgaacgtaaagacagtacacggatccgtatctccaacaagcacgtagtaatcaaatttggtgttgttaaacttcgcaatattcatcaatttagatagaaacttatactcatcatctgttttaggaatccatgtattattaccactttccaacttatcattatcccaggctatgtttcgtccatcatcgttgcgcagagtgaataattcttttgtattcggtagttcaaatatatgatccatgcatagatcggcaaagctattgtagatgtgatttttcctaaatctaatataaaactcgtttactagcaaacactttcctgatttatcgaccaagacacatatggtttctaaatctatcaagtggtggggatccatagttatgacgcagtaacatatattattacattcttgactgtcgctaatatctaaatatttattgttatcgtattggattctgcatatagatggcttgtatgtcaaagatatagaacacataaccaatttatagtcgcgctttacattctcgaatctaaagttaagagatttagaaaacattatatcctcggatgatgttatcactgtttctggagtaggatatattaaagtctttacagatttcgtccgattcaaataaatcactaaataatatcccacattatcatctgttagagtagtatcattaaatctattatattttatgaaagatatatcactgctcacctctatatttcgtacatttttaaactgtttgtataatatctctctgatacaatcagatatatctattgtgtcggtagacgataccgttacatttgaattaatggtgttccattttacaacttttaacaagttgaccaattcatttctaatagtatcaaactctccatgattaaatattttaatagtatccattttatatcactacggacacaaagtagctgacataaaccattgtataatttttatgttttatgtttattagcgtacacattttggaagttccggcttccatgtatttcctggagagcaagtagatgatgaggaaccagatagtttatatccgtacttgcacttaaagtctacattgtcgttgtatgagtatgatcttttaaacccgctagacaagtatccgtttgatattgtaggatgtggacatttaacaatctgacacgtgggtggatcggaccattctcctcctgaacacaggacaccagagttaccaatcaacgaatatccactattgcaactataagttacaacgcttccatcggtataaaaatcctcgtatccgttatgtcttccgttggatatagatggaggggattggcatttaacagattcacaaataggtgcctcgggattccataccatagatccagtagatcctaattcacaatacgatttagattcaccgatcaaatgatatccgctattacaagagtacgttatactagagccaaagtctactccaccaatatcaagttggccattatcgatatctcgaggcgatgggcatctccgtttaatacattgattaaagagtgtccatccagtacctgtacatttagcatatataggtcccattttttgctttctgtatccaggtagacatagatattctatagtgtctcctatgttgtaattagcattagcatcagtctccacactattcttaaatttcatattaatgggtcgtgacggaatagtacagcatgatagaacgcatcctattcccaacaatgtcaggaacgtcacgctctccaccttcatatttatttatccgtaaaaatgttatcctggacatcgtacaaataataaaaagcccatatatgttcgctattgtagaaattgtttttcacagttgctcaaaaacgatggcagtgacttatgagttacgttacactttggagtctcatctttagtaaacatatcataatattcgatattacgagttgacatatcgaacaaattccaagtatttgattttggataatattcgtattttgcatctgctataattaagatataatcaccgcaagaacacacgaacatctttcctacatggttaaagtacatgtacaattctatccatttgtcttccttaactatatatttgtatagataattacgagtctcgtgagtaattccagtaattacatagatgtcgccgtcgtactctacagcataaactatactatgatgtctaggcatgggagacttttttatccaacgatttttagtgaaacattccacatcgtttaatactacatatttttcatacgtggtataaactccacccattacatatatatcatcgtttacgaataccgacgcgcctgaatatctaggagtaattaagtttggaagtcttatccatttcgaagtgccgtgtttcaaatattctgccacacccgttgaaatagaaaattctaatcctcctattacatataactttccatcgttaacacaagtactaacttctgattttaacgacgacatattagtaaccgttttccattttttcgtttcaagatctacccgcgatacggaataaacatgtctattgttaatcatgccgccaataatgtatagacaattatgtaaaacatttgcattatagaattgtctatctgtattaccgactatcgtccaatattctgtcctaggagagtaatgggttattgtggatatataatcagagtttttaatgactactatattatgttttataccatttcgtgtcactggctttgtagatttggatatagttaatcccaacaatgatatagcattgcgcatagtattagtcataaacttgggatgtaaaatgttgatgatatctacatcgtttggatttttatgtatccactttaataatatcatagctgtaacatcctcatgatttacgttaacgtcttcgtgggataagatagttgtcagttcatcctttgataattttccaaattctggatcggatgtcaccgcagtaatattgttgattatttctgacatcgacgcattatatagttttttaattccatatcttttagaaaagttaaacatccttatacaatttgtggaattaatattatgaatcatagtttttacacatagatctactacaggcggaacatcaattattacggcagcaactagtatcatttctacattgtttatggtgatgtttatcttcttccagcgcatatagtctaatagcgattcaaacgcgtgatagtttataccattcaatataatcgcttcatcctttagatggtgatcctgaatgcgtttaaaaaaattatacggagacgccgtaataatttccttattcacttgtataatttccccattgatagaaaatatcacgctttccattcttgaagtactataagtaattatagtataatgtaaaggtttatatattcaatattttttataaaaaaatcatttcgacattaattcctttttaaatttgcgtctatcatctatagaaacatattctatgaatttataaaatgcttttacgtgtcctatcgtaggcgatagaaccgctaaaaagcctatcgaatttctacaaaagaatctgttatatggtatagggagagtataaaacattaaatgtccgtacttattaaagtattcagtagccaatcctaactctttcgaatacttattaatggctcttgttctgtacgaatctatttttttgaacaacggacctagtggtatatcttgttctatgtatctaaaataatgtctgactagatccgttagtttaatatcctcagtcatcttgtctagaatggcaaatctaactgcgggtttaggctttagtttagtttctatatctacatctatgtctttatctaacaccaaaaatataatagctaatattttattacaatcatccggatattcttctacgatctcactaactaatgtttctttggttatactagtatagtcactatcggacaaataaagaaaatcagatgatcgatgaataatacatttaaattcatcatctgtaagatttttgagatgtctcattagaatattattagggttagtactcattatcattcggcagctattacttattttattatttttcaccatatagatcaatcattagatcatcaaaatatgtttcaatcatcctaaagagtatggtgaatgactcttcccatctaatttctgaacgttcaccaatgtctctagccactttggcactaatagcgatcattcgcttagcgtcttctatattattaactggttgattcaatctatctagcaatggaccgtcggacagcgtcattctcatgttcttaatcaatgtacatacatcgccgtcatctaccaattcatccaacaacataagctttttaaaatcatcattataataggtttgatcgttgtcatttctccaaagaatatatctaataagtagagtcctcatgattagttaacaactattttttatgttaaatcaattagtacaccgctatgtttaatacttattcatattttagtttttaggattgagaatcaatacaaaaattaatgcatcattaattttagaaatacttagtttccacgtagttaatgaaacatttgaactcatcgtacaggacgttctcgtacaggacgtaactataaaccggtttatatttgttcaagatagatacaaatccgataactttttttacgaattctacgggatccactttaaaagtgtcatacggggttctttttatttttttaaacagatcaatggtgtgatgttgattaggtcttttacgaatttgatatagaatagcgtttacatattctccataatggtcaatcgccatttgttcgtatgtcataaattctttaattatatgacactgtgtattgtttagttcatccttgttcattgttaggaatctattcaaaatggcaattatactagaactataggtgcgttgtatacacatattgatgtgtctgtttatacaatccatgatatttggatccatgctactaccttcgggtaaaattgtagcatcatataccatttctagtactttaggttcattgttatccattgcagaggacgtcatgatcgaatcataaaaaaatatattatttttatgttattttgttaaaaataatcatcgaatacttcgtaagatactccttcatgaacataatcagttacaaaacgtttatatgaagtaaagtatctacgatttttacaaaagtccggatgcataagtacaaagtacgcgataaacggaataataatagatttatctagtttatctttttctatagctttcatagttagatacatggtctcagaagtaggattatgtaacatcagcttcgataaaatgactgggttatttagtcttacacattcgctcatacatgtatgaccgttaactacagagtctacactaaaatgattgaacaatagatagtctaccattgtttcgtattcagatagtacagcgtagtacatagcatcttcacaaattatatcattgtctaatagatatttgacgcatcttatggatcccacttcaacagccatcttaaaatcggtagaatcatattgctttcctttatcattaataatttctagaacatcatctctatcataaaagatacaaatattaactgtttgatccgtaataacattgctagtcgatagcaatttgttaataagatgcgctgggctcaatgtcttaataagaagtgtaagaggactatctccgaatttgttttgtttattaacatccgttgatggaagtaaaagatctataatgtctacattcttgactgttttagagcatacaatatggagaggtgtatttccatcatgatctggttttgagggactaattcctagtttcatcatccatgagattgtagaagcttttggattgtctgacataagatgtctatgaatatgatttttgccaaatttatccactatcctggcttcgaatccgatggacattatttttttaaacactctttctgaaggatctgtacacgccaacaacggaccacatccttcttcatcaaccgagttgttaatcttggctccatactgtaccaataaatttattctctctatgacttcatcatctgttcccgagagataatatagaggtgttttattatgtttatcacacgcgtttggatctgcgccgtgcgtcagcagcatcgcgactattctattattattaattttagaagctatatgcaatggataatttccatcatcatccgtctcatttggagagtatcctctatgaagaagttcttcgacaaatcgttcatctagtcctttaattccacaatacgcatgtagaatgtgataattatttccagaaggttcgatagcttgtagcatattcctaaatacatctaaatttttactattatatttggcataaagagatagataatactcggccgacataatgttgtccattgtagtataaaaattaatatttctatttctatttctgtatatttgcaacaatttactctctataacaaatatcataacttagttcttttatgtcaagaaggcactggtttagttcatctataaatgtcacgccataactaccacgcatgccatactcagaattatgataaagatatttatccttggggtgtaggtaatggggattaatctttgttggatcagtctctaagttaacacatgtcacacatgatccatttatagttatatcacacgatgatgatttatgaattgattccggaagatcgctatcgtattttgtggttccacaattcatttccatacatgttattgtcacactaatattatgatgaactttatctagccgctgagtggtaaacaacagaacagatagtttattatctttaccaacaccctcagccgctgccacaaatctctgatccgtatccatgatggtcatgtttatttctagtccgtatccagtcaacactatgttagcatttctgtcgatatagctttcactcatatgacactcaccaataatagtagaattaatgtcgtaatttacaccaatagtgagttcggcggcaaagtaccaataccggtaatcttgtcgaggaggacatatagtattcttgtattctaccgaatacccgagagatgcgatacaaaagagcaagactaatttgtaaaccatcttactcaaaatatgtaacaatagtacgatgcaatgagtaagacaataggaaatctatcttatatacacataattattctatcaattttaccaattagttagtgtaatgttaacaaaaatgtgggagaatctaattagtttttctttacacaattgacgtacatgagtctgagttccttgtttttgctaattatttcatccaatttattattcttgacgatatcgagatcttttgtataggagtcagacttgtattcaacatgcttttctataatcatcttagttatttcggcatcatccaatagtacattttccagattaacagagtagatattaatgtcgtatttgaacagagcctgtaacatctcaatgtctttattatctatagccaatttaatgtccggaatgaagagaagggaattattggtgtttgtcgacgtcatatagtcgagcaagagaatcatcatatccacgtgtccattttttatagtggtgtgaatacaactaaggagaatagccagatcaaaagtagatggtatttctgaaagaaagtatgatacaatacttacatcattaagcatgacggcatgataaaatgaagttttccatccagttttcccatagaacatcagtctccaatttttcttaacaaacagtttcaccgtttgcatgttaccactatcaaccgcataatacaatgcggtgtttcctttgtcatcaaattgtgaatcatccattccactgaatagcaaaatctttactattttggtatcttctaatgtggctgcctgatgtaatggaaattcattctctagaagatttttcaatgctccagcgttcaacaacgtacatactagacgcacgttattatcagctattgcataatacaaggcactatgtccatggacatccgccttaaatgtatctttactagagagaaagcttttcagctgcttagacttccaagtattaattcgtgacagatccatgtctgaaacgagacgctaattagtgtatattttttcattttttataattttgtcatattgcaccagaattaataatatctctaatagatctgattagtagatacatggctatcgcaaaacaacatatacacatttaataaaaataatatttattaagaaaattcagatttcacgtacccatcaatataaataaaataatgattccttccaccgtatccataaacaatattaaggagattctaccttacccataaacaatataaatccagtaatatcatgtctaatgatgaacacaaatggtgtattaaattccagtttttcaggagatgatctcgccgtagctaccatgatagtagatgcctctgctacagttccttgttcgtcgacatctatctttgcattctgaaacattttataaatatataatgggtccctagtcatatgtttaaacgacgcattatctggattaaacatactaggagccatcatttcggctatcgacttaatatccctcttattttcgatagaaaatttagggagtttaagattgtacactttattccctaattgaaacgaccaatagtctaattttgcagccgtaatagaatctgtgaaatgggtcatattatcacctattgccaggtacatactaatattagcatccttatacggaaggcgcaccatatcatattcttcgtcatcgattgtgattgtatttccttgcaatttagtaactacgttcatcatgggaaccgttttcgtaccgtacttattagtaaaactagcattgcgtgttttagtgatatcaaacggatattgccatgtacctttaaaatatatagtattaatgattgcccatagagtattattgtcgagcatattagaatctactacattagacataccggatctacgttctactatagaattaattttattaaccgcatctcgtctaaagtttaatctatataggccgaatctatgatattgttgataatacaacggtttaatgcacacagtattatctacgaaactttgataagttagatcagtgtacgtatatttagatgttttcagcttagctaatcctgatattaattctgtaaatgctggacccagatctctttttctcaaatccatagtcttcaataattctattctagtattacctgatgcaggcaatagcgacataaacatagaaaacgaataaccaaacggtgagaagacaatattatcatcttgaatatttttatacgctactataccggcattggtaaatccttgcagacgataggtagacactgaacacgttaacgatagtatcaataacgcaatcatgattttatggtattaataattaaccttatttttatgttcggtataaaaattattgatgtctacacatccttttgtaattgacatctatatatccttttgtataatcaactctaatcactttaacttttacagttttccctaccagtttatccctatattcaacatatctatccatatgcatcttaacactctctgccaagatagcttcagagtgaggatagtcaaaaagataaatgtatagagcataatccttctcgtatactctgccctttattacatcgcccgcattgggcaacgaataacaaaatgcaagcatcttgttaacgggctcgtaaattgggataaaaattatgtttttatatctattttattcaagagaatattcaggaatttctttttccggttgtatctcatcgcagtatatatcatttgtacattgtttcatattttttaatagtttacaccttttagtaggactagtatcgtacaattcatagctgtattttgaattccaatcacgcataaaaatatcttccaattgttgacgaagacctaatccatcatccggtgtaatattaatagatgctccacatgtatccgtaaagtaatttcctgtccaatttgaggtacctatataggccgttttatcggttaccatatatttggcatggtttaccctagaatacggaatgggaggatcagcatctggtacaataaatagctttacttctatatctatgtttttagattttagcatagcgatagatcttaaaaagtttctcatgataaacgaagatcgttgccagcaactaatcaatagcttaacggatacttgtctgtctatagcggatcttcttaattcatcttctatataaggccaaaacaaaattttacccgccttcgaataaataatagggataaagttcataacagatacataaacgaatttactcgcatttctaatacatgacaataaagcggttaaatcattggttctttccatagtacatagttgttgcggtgcagaagcaataaatacagagtgtggaacaccacttacgttaatactaagaggatgatctgtattataatacgacggataaaagtttttccaattatatggtagattgttaactccaagataccagtatacctcaaaaatttgagtgagatccgctgccaagttcctattattgaagatcgcaatacccaattctttgacctgagttagtgatctccaatccatgttagcgcttcctaaataaatatgtgtattatcagatatccaaaattttgtatgaagaactcctcctaggatatttgtaatatctatgtatcgtacttcaactccggccatttgtagtctttcaacatcctttaatggtttgttagatttattgacggctactctaactcgtactcctcttttgggtaattgtacaatctcgtttaatattatcgtgccgaaattcgtacccacttcatccgataaactccaataaaaagatgatatatctagtgtttttgtggtattggatagaatttccctccacatgttaaatgtagacaaatatactttatcaaattgcatacctataggaatagtctctgtaatcactgcgattgtattatccggattcattttatttgttaaaagaataatcctatatcacttcactctattaaaaatccaagtttctatttctttcatgactgattttttaacttcatccgtttccttatgaagatgatgtttggcaccttcataaatttttatttctctattacaatttgcatgttgcatgaaataatatgcacctgaaacatcactaatctcattgtttgttccctggagtatgagagtcggggggtgttaatcttggaaattatttttctaaccttgttggtagccttcaagacctgactagcaaatccagccttaattttttcatgattgattaatgggtcgtattggtatttataaactttatccatatctctagatactgattctggacatagctttccgactggcgcatttggtgtgatggttcccataagtttggcagctagcagattcagtcttgaaacagcatctgcattaactagaggagacattagaatcattgctgtaaacaagtttggattatcgtaagaggctagtatagaaattgttgctcccatggaatgacccaataagtagatttaatagttaccacgtgctgtaccaaagtcatcaatcatcattttttcaccattacttcttccatgtccaatatgatcatgtgagaatactaaaattcctaacgatgatatgttttcagctagttcgtcataacgtccagaatgtttaccagctccatgacttatgaatactaatgccttaggatatgtaataggtttccaatatatgtaatcattgtccagattgaacatacagtttgcactcatgattcacgttatataactatcaatattaacagttcgtttgatgatcatattatttttatgttttattgataattgtaaaaacatacaattaaatcaatatagaggaaggagacggatactgtcttttgtgagatagtcatggcgactaaattagattatgaggatgctgttttttactttgtggatgatgataaaatatgtagtcgcgactccatcatcgatctaatagatgaatatattacgtggagaaatcatgttatagtgtttaacaaagatattaccagttgtggaagactgtacaaggaattgatgaagttcgatgatgtcgctatacggtactatggtattgataaaattaatgagattgtcgaagctatgagcgaaggagaccactacatcaattttacaaaagtccatgatcaggaaagtttattcgctaccataggaatatgtgctaaaatcactgaacattggggatacaaaaagatttcagaatctagattccaatcattgggaaacattacagatctgatgaccgacgataatataaacatcttgatactttttctagaaaaaaaattgaattgatgatataggggtcttcataacgcataattattacgttagcattctatatccgtgttaaaaaaaattatcctatcatgtatttgagagttttatatgtagcaaacatgatagctgtgatgccaataagctttagatattcacgcgtgctagtgttagggatggtattatctggtggtgaaatgtccgttatataatctacaaaacaatcatcgcatatagtatgcgatagtagagtaaacatttttatagtttttactggattcatacatcgtctacccaattcggttataaatgaaattgtcgccaatcttacacccaaccccttgttatccattagtatagtattaacttcgttatttatgtcataaactgtaaatgattttgtagatgccatatcatacatgatattcatgtccctattataatcattactaactttatcacaatatatgttgataatatctatatatgatctagtctttgtgggcaactgtctatacaagtcgtctaaacgttgtttactcatatagtatcgaacagccatcattacatggtcccgttccgttgatagataatcgagtatgttagtggacttgtcaaatctatataccatattttctggaagtggatatacatagtcgtgatcaacattattgctagcctcatcttctatatcctgtactataccattatctatatcatctacataatctacgatattattacacataaacatcgacaacatactattgtttattatctaagtcctgttgatccaaacccttgatctcctctatttgtactatctagagattgtacttcttccagttctggataatatatacgttgatagattagctgagctattctatctccagtatttacattaaacgtacattttccattattaataagaatgactcctatgtttcccctataatcttcgtctattacaccacctcctatatcaatgccttttagtgacagaccagacctaggagctattctaccatagcaaatcttaggcatggacatactaatatctgtcttaattaactgtctttctcctggagggatagtataatcgtaagcgctatacaaatcatatccggcagcacccggcgattgcctagtaggagatttagctctgttagtttccttaacaaatctaactggtgagttaatattcatgttgaacataaaactaatattttatttcaaaattatttaccatcccatatattccatgaataagtgtgatgattgtacacttctatagtatctatatacgatccacgataaaatcctcctatcaatagcagtttattatccactatgatcaattctggattatccctcggataaataggatcatctatcagagtccatgtattgctggattcacaataaaattccgcatttctaccaaccaagaataaccttctaccgaacactaacgcgcatgatttataatgaggataataagtggatggtccaaactgccactgatcatgattgggtagcaaatattctgtagttgtatcagtttcagaatgtcctcccattacgtatataacattgtttatggatgccactgctggattacatctaggtttcagaagactcggcatattaacccaagcagcatccccgtggaaccaacgctcaacagatgtgggatttggtagacctcctactacgtataatttattgttagcgggtatccccgtagcatacagtctggggctattcatcggaggaattggaatccaattgtttgatatataatttacagctatagcattgttatgtatttcattgttcatccatccaccgatgagatatactacttctccaacatgagtacttgtacacatatggaatatatctataatttgatccatgttcataggatactctatgaatggatacttgtatgatttgcgtggttgtttatcacaatgaaatattttggtacagtctagtatccattttacattatttatacctctgggagaaagataatttgacctgattacatttttgataaggagtagcagatttcctaatttatttcttcgctttatataccacttaatgacaaaatcaactacataatcctcatctggaacatttagttcatcgctttctagaataagtttcatagatagataatcaaaattgtctatgatgtcatcttccagttccaaaaagtgtttggcaataaagtttttagtatgacataagagattggatagtccgtattctatacccatcatgtaacactcgacacaatattcctttctaaaatctcgtaagataaagtttatacaagtgtagatgataaattctacagaggttaatatagaagcacgtaataaattgacgacgttatgactatctatatatacctttccagtatacgagtaaataactatagaagttaaactgtgaatgtcaaggtctagacaaacccttgtaactggatctttatttttcgtgtatttttgacgtaaatgtgtgcgaaagtaaggagataactttttcaatatcgtagaattgactattatattgccacctatagcatcaataattgttttgaatttcttagtcatagacaatgctaatatattcttacagtacacagtattgacaaatatcggcatttatgtttctttaaaagtcaacatctaaagaaaaatgattatcttcttgagacataactcccattttttggtattcacccacacgtttttcgaaaaaattagtttttccttccaatgatatattttccatgaaatcaaacggattggtaacattataaatttttttaaatcccaattcagaaatcaatctatccgcgacaaattctatatatgttttcatcatttcacaattcattcctataagtttaactggaagagccgcagtaagaaattcttgttcaatggatactgcatctgttataatagatctaacggtttcttcactcggtggatacaataaatgtttaaacatcaaacatgcgaagtcgcagtgcagaccctcgtctctactaattagttcgttggaaaacgtgagtccgggcattaggccacgctttttaagccaaaatatggaagcgaatgatccggaaaagaagattccttctactgcagcaaaggcaataagtctctctccataaccggcgctgtcatgtatccacttttgagcccaatcggccttcttttttacacaaggcattgtttctatggcattaaagagatagtttttttcattactatctttaacataagtatcgatcaaaagactatacatttccgaatgaatgttttcaatggccatctgaaatccgtagaaacatctagcctcggtaatctgtacttctgtacaaaatcgttccgccaaattttcattcactattccgtcactggctgcaaaaaacgccaatacatgttttataaaatatttttcgtctggtgttagtttattccaatcattgatatctttagatatatctacttcttccactgtccaaaatgatgcctctgcctttttatacatgttccagatgtcataatattggattgggaaaataacaaatctatttggatttggtgcaaggatgggttccataactaaattaacaatatcaataaattttttttcagttatctatatgcctgtacttggattttttgtacatcgatatcgccgcaatcactacaataattacaagtattattgatagcattgttattagtactatcataattaaattatcgacattcatgggtgctgaataatcgttattatcatcattatcattttgtaattgtgacatcatactagataaatcgtttgcgagattgttgtgggaagcgggcatggaggatgcattatcattattatttaacgccttccattcggattcacaaatatggcgcgcgttcaacattttatggaaactataattttgtgaaaacagataacaagaaaactcgtcatcgttcaaatttttaacgatagtaaaccgattaaacgtcgagctaatttctaacgctagcgactctgttggatatgggtttccagatatatatcttttcagttcccctacgtatctataatcatctgtaggaaatggaagatatttccatttatctactgttcctaatatcatatgtggtggtgtagtagaaccattaagcgcgaaagatgttatttcgcatcgtattttaacttcgcaataatttctggttagataacgcactctaccagtcaagtcaatgatattagcctttacagatatattcatagtagtcgtaacgatgactccatcttttagatgcgatactcctttgtatgtaccagaatcttcgtacctcaaactcgatatatttaaacaagttaatgagatattaacgcgttttatgaatgatgatatataaccagaagttttatcctcggtggctagcgctataaccttatcattataataccaactagtgtgattaatatgtgacacgtcagtgtgggtacaaatatgtacattatcgtctacgtcgtattcgatacatccgcatacagccaacaaatataaaatgacaaatactctaacgacgttcgtacccatcttgatgcggtttaataaatgttttgatttcaatttattgtaaaaaaagattcggttttatactgttcgatattctcattgcttatattttcatctatcatctccacacagtcaaatccgtggttagcatgcacctcatcaaccggtaaaagactatcggactcttctatcattataactctagaatatttaatttggtcattattaatcaagtcaattatcttatttttaacaaacgtgagtattttactcattttttataaaaacttttagaaatatacagactctatcgtgtgtctatatcttctttttatatccaatgtatttatgtctgatttttcttcatttatcatatataatggtccaaattctacacgtgcttcggattcatccagatcattaaggttcttataattgtaacatccttctcttccctcttctacatcttccttcttattcttattcttattcttattcttattcttattcttattcttattcttagcgtcacagaatctaccacagcagaatcccatgacgagcgtcatattaaactaattcattttcaattataatatacgattagtaatgaccattaaaataaaaaatattcttcataaccggcaagaaagtgaaaagttcacattgaaactatgtcagtagtatacatcatgaaatgatgatatatatattctctattttggtggaggattatatgatataattcgtggataatcattcttaagacacatttcttcattcgtaaatcttttcacgttaaatgagtgtccatattttgcaatttcttcatatgatggcggtgtacgtggacgaggctgctcctgttcttgttgtggtcgccgactatcgtgtttgcgtttagatccctccattatcgcgattgcgtagatggagtactattttataccttgtaattaaatttttttattaattaaacgtataaaaacgttccgtatctgtatttaagagccagatttcgtctaatagaacaaatagctacagtaaaaataactagaataattgctacacccactagaaaccacggatcgtaatacggcaatcggttttcgataataggtggaacgtatattttatttaaggacttaacaattgtctgtaaaccacaatttgcttcagcggatcctgtattaactatctgtaaaagcatatgttgaccgggcggagccgaacattctccgatatctaatttctgtatatctataatattattaacctccgcatacgcattacagttcttttctagcttggataccgcactaggtacatcgtctagatctattcctatttcctcagcgatagctcttctatccttttccggaagcaatgaaatcacttcaataaatgattcaaccatgagtgtgaaactaagtctagaattactcatgcatttgttagttattcggagcgcgcaatttttaaactgtcctataacctctcctatatgaatagcacaagtgacattagtagggatagaatgttgagctaatttttgtaaataactatctataaaaagattatacaaagttttaaactctttagtttccgccatttatccagtctgagaaaatgtctctcataataaatttttccaagaaactaattgggtgaagaatggaaacctttaatctatatttatcacagtctgttttggtacacatgatgaattcttccaatgccgtactaaattcgatatctttttcgatttctggatatgtttttaataaagtatgaacaaagaaatggaaatcgtaataccagttatgtttaactttgaaattgttttttattttcttgttaatgattccagccacttgggaaaagtcaaagtcgtttaatgccgatttaatacgttcattaaaaacaaactttttatcctttagatgaattattattggttcattggaatcaaaaagtaagatattatcgggtttaagatctgcgtgtaaaaagttgtcgcagcatggtagttcgtagattttaatgtataacagagccatctgtaaaaagataaactttatgtattgtaccaaagatttaaatcctaatttgatagctaactcggtatctactttatctgccgaatacagtgctaggggaaaaattataatgtttcctctttcatattcgtagttagttctcttttcatgttcgaaaaagtgaaacatgcggttaaaatagtttataacattaatattactgttaataactgccgggtaaaagtgggatagtaatttcacgaatttgatactgtcctttctctcgttaaacgcctttagaaaaactttagaagaatatctcaatgagagttcctgaccatccatagtttgtatcaataatagcaacatatgaagaacacgtttatacagagtatgtaaaaatgttaatttatagtttaatcccatggcccacgcacacacgattaattttttttcatctccctttagattgttgtatagaaatttgggtactgtgaactccgccgtagtttccatgggactatataattttgtggcctcgaatacaaattttactacatagttatctatcttaaaaactataccatatcctcctgtagatatgtgataaaaatcgtcgtttataggataaaatcgtttatccttttgttggaaaaatgatgaattaatgtaatcattctcttctatctttagtagtgtttccctattaaaattcttaaaataatttaacaatctaactgacggagcccaattttggtgtaaatctaattgggacattatgttgttaaaatataaacagtctcctaatataacagtatctgataatctatggggagacatccattgatattcaggggatgaatcattggcaacacccatttattgtacaaaaagccccaatttacaaacgaaagtccaggtttgatagagacaaactattaactattttgtctctgtttttaacacctccacagtttttaatttctttggtaatgaaattattcacaatatcagtatcttctttatctaccagagattttactaacttgataaccttggctgtctcattcaatagggtagtaatatttgtatgtgtgatattgatatctttttgaattgtttcttttagaagtgattctttgatggtgtcagcatacgaattacaataatgcagaaactcggttaacatgcaggaattatagtaagccaattccaattgttgcctgtgttgtattagagtgtcaatatgagcaatggtgtccttgcgtttctctgatagaatgcgagcagcgattttggcgttatcatttgacgatatttctggaatgacgaatcctgtttctactaactttttggtaggacaaagtgaaacaatcaagaagatagcttctcctcctatttgtggaagaaattgaactcctctagatgatctactgacgatagtatctccttgacagatattggaccgaattacagaagtacctggaatgtaaagccctgaaaccccctcattttttaagcagattgttgccgtaaatcctgcactgtgaccaagatagagagctcctttggtgaatccatctctatgtttcagtttaaccaagaaacagtcagctggtctaaaatttccatctctatctaatacagcatctaacttgatgtcaggaactatgaccggtttaatgttatatgtaacattgagtaaatccttaagttcataatcatcactgtcatcagttatgtacgatccaaacaatgtttctaccggcatagtggatacgaagatgctatccatcagaatgtttccctgattagtattttctatatagctattcttctttaaacgattttccaaatcagtaactatgttcatttttttaggagtaggacgcctagccagtatggaagaggattttctagatcctctcttcaacatctttgatctcaatggaatgcaaaaccccatagtgaaacaaccaacgataaaaataatattgtttttcactttttataattttaccatctgactcatggattcattaatatctttataagagctactaacgtataattctttataactgaactgagatatatacaccggatctatggtttccataattgagtaaatgaatgctcggcaataactaatggcaaatgtatagaacaacgaaattatactagagttgttaaagttaatattttctatgagctgttccaataaattatttgttgtgactgcgttcaagtcataaatcatcttgatactatccagtaaaccgtttttaagttctggaatattattatcccattgtaaagcccctaattcgactatcgaatatcctgctctgatagcagtttcaatatcgacggacgtcaatactgtaataaaggtggtagtattgtcatcatcgtgataaactactggaatatggtcgttagtaggtacggtaactttacacaacgcgatatataactttccttttgtaccatttttaacgtagttgggacgtcctgcagggtattgttttgaagaaatgatatcgagaacagatttgatacgatatttgttggattcctgattatttactataatataatctagacagatagatgattcgataaatagagaaggtatatcgttggtaggataatacatccccattccagtattctcggatactctattaatgacactagttaagaacatgtcttctattctagaaaacgaaaacatcctacatggactcattaaaacttctaacgctcctgattgtgtctcgaatgcctcgtacaaggatttcaaggatgccatagattctttgaccaacgatttagaattgcgtttagcatctgatttttttattaaatcgaatggtcggctctctggtttgctaccccaatgataacaatagtcttgtaaagataaaccgcaagaaaatttatacgcatccatccaaataaccctagcaccatcggatgatattaatgtattattatagattttccatccacaattattgggccagtatactgttagcaacggtatatcgaatagattactcatgtaacctactagaatgatagttcgtgtactagtcataatatctttaatccaatctaagaaatttaaaattagattttttacactgttaaagttaacaaaggtattacccgggtacgtggatatcatatatggtattggtccattatcagtaatagctccataaactgatacggcgatggtttttatatgtgtttgatctaacgaggaagaaattcgcacccacaattcatctctagatatgtatttaatatcaaacggtaacacatcaatttcgggacgcgtatatgtttctaaatttttaatccaaatataatgatgacctatatgccctattatcatactgtcaactatagtacacctagagaacttacgatacatctgtttcctataatcgttaaattttacaaatctataacatgctaaaccttttgacgacaaccattcattaatttctgatatggaatctgtattctcgataccgtattgttctaaagccagtgctatatctccctgttcgtgggaacgctttcgtataatatcgatcaacggataatctgaagtttttggagaataatatgactcatgatctatttcgtccataaacaatctagacataggaattggaggcgatgatcttaattttgtgcaatgagtcgtcaatcctataacttctaatcttgtaatattcatcatcgacataatactatctatgttatcatcgtatattagtataccatgaccttcttcatttcgtgccaaaatgatatacagtcttaaatagttacgcaatatctcaatagtttcataattgttagctgttttcatcaagatttgtaccctgtttaacatgatggcgttctatacgtttctattttctattttttaaatttttaaatttttaacgatttactgtggctagatacccaatctctctcaaatatttttttagcctcgcttacaagctgtttatctatactattaaaactgacgaatccgtgattttggtaatgggttccgtcgaaatttgccgaagtgatatgaacatattcgtcgtcgactatcaacaattttgtattattctgaatagtgaaaaccttcacagatagatcattttgaacacacaacgcgtctagacttctggcggttgccatagaatatacgtcgttcttatcccaattaccaactagaagtctgatcttaactcctctattaatggctgcttctataatggagttgtaaatatcgggccaatagtagctattaccgtcgacacgtgtagtgggaactatggccaaatgttcaatatctatactagtcttagctgacctgagtttatcaataactacatcggtatctagatctctagaatatcccaataggtgttccggagaatcagtaaagaacactccacctataggattcttaatatgatacgcagtgctaactggcagacaacaagccgcagagcataaattcaaccatgaattttttgcgctattaaaggctttaaaagtatcaaatcttctacgaagatctgtggccagcgggggataatcagaatatacacctaacgttttaatcgtatgtatagatcctccagtaaatgacgcgtttcctacataacatctttcatcatctgacacccaaaaacaaccgagtagtagtcccacattattttttttatctatattaacggttataaaatttatatccgggcagtgactttgtagctctcccagatttcttttccctcgttcatctagcaaaactattattttaatccctttttcagatgcctcttttagtttatcaaaaataagcgctcccctagtcgtactcagaggattacaacaaaaagatgctatgtatatatatttcttagctagagtgataatttcgttaaaacattcaaatgttgttaaatgatcggatctaaaatccatattttctggtagtgtttctaccagcctacattttgctcccgcaggtaccgatgcaaatggccacatttagttaacataaaaacttatacatcctgttctatcaacgattctagaatatcatcggctatatcgctaaaattttcatcaaagtcgacatcacaacctaactcagtcaatatattaagaagttccatgatgtcatcttcgtctatttctatatccgtatccattgtagattgttgaccgattatcgagtttaaatcattactaatactcaatccttcagaatacaatctgtatttcattgtaaatttataggcggtgtatttaagttggtagattttcaattatgtatcaatatagcaacagtagttcttgctcctccttgattctagcatcctcttcattattttcttctacgtacataaacatgtccaatacgttagacaacacaccgacgatggcggccgccacagacacgaatatgactagaccgatgaccatttaaaaacccctctctagctttcacttaaactgtatcgatcattcttttagcacatgtataatataaaaaaacattattctatttcgaatttaggcttccaaaaatttttcatccgtaaaccgataataatatatatagacttgttaatagtcggaataaatagattaatgcttaaactatcatcatctccacgattagagatacaatatttacattctttttgctgtttcgaaactttatcaatacacgttaatacaaacccaggaaggagatattgaaactgaggctgttgaaaatgaaacggtgaatacaataattcagataatgtaaaatcatgattccgtattctgatgatattagaactgctaatggatgtcgatggtatgtatctaggagtatctattttaacaaagcatcgatttgctaatatacaattatcattttgattaattgttattttattcatattcttaaaaggtttcatatttatcaattcttctacattaaaaatttccatttttaatttatgtagccccgcaatactcctcattacgtttcattttttgtctataatatccattttgttcatctcggtacatagattatccaattgagaagcgcatttagtagttttgtacattttaagtttattgacgaatcgtcgaaaactagttatagttaacattttattatttgataccctgatattaatacccctgccgttactattatttataactgatgtaacccacgtaacattggaattaactatcgatagtaatgcatcgacgcttccaaaattgtctattataaactcaccgataatttttttattacatgttttcatattcattaggattatcaaatctttaatcttactacgattgtatgcgttgatattacaagacgtcattctaaaagacggaggatttccatcaaatgccagacaatcacgtacaaagtacatggaaataggttttgttctattgcgcatcatagattcatatagaacacccgtagaaatactaatttgttttactctataaaatactaatgcatctatttcatcgttttgtataacgtctttccaagtgtcaaattccaaatttttttcattgatagtaccaaattcttctatctctttaactacttgcatagataggtaattacagtgatgcctacatgccgttttttgaaactgaatagatgcgtctagaagcgatcgtacgctagtcacaatcaccactttcatatttagaatatatgtatgtaaaaatatagtagaatttcattttgtttttttctatgctataaatgaattctcattttgcatctgctcatactccgttttatatcaataccaaagaaggaagatatctggttctaaaagccgttaaagtatgcgatgttagaactgtagaatgcgaaggaagtaaagcttcctgcgtactcaaagtagataaaccctcatcacccgcgtgtgagagaagaccttcgtccccgtccagatgcgagagaatgaataaccctggaaaacaagtcccgtttatgaggacggacatgctacaaaatatgttcgcggctaatcgcgataatgtagcttctagacttttgaactaaaatacaattatatctttttcgatattaataaatccgtgtcgtccaggttttttatctctttcagtatgtgaatagataggtattttatctctattcatcatcgaatttaagagatccgataaacattgtttgtattctccagatgtcagcatctgatacaacaatatatgtgcacataaacctctggcacttatttcatgtaccttccccttatcactaaggagaatagtatttgagaaatatgtatacatgatattatcatgaattagatatacagaatttgtaacactctcgaaatcacacgatgtgtcggcgttaagatctaatatatcactcgataacacattttcatctagatacactagacattttttaaagctaaaatagtctttagtagtgacagtaactatgcgattattttcatcgatgatacatttcatcggcatattattacgcttaccatcaaagactataccatgtgtatatctaacgtattctagcatagttgccatacgtgcattaaacttttcaggatctttggatagatcttccaatctatctatttgagaaaacatttttatcatgttcaatagttgaaacgtcggatccactatatagatattatctataaagattttaggaactacgttcatggtatcctggcgaatattaaaactatcaatgatatgattatcgttttcatcttttatcaccatatagtttctaagatatgggattttacttaatataatattatttcccgtaataaattttattagaaatgccaaatctataagaaaagtcctcgaattagtttgaagaatatctatatcgccgtaccgtatatttggattaattagatatagagaatatgatccgtaacatatacaacttttattatggcgtctaagatattcttccatcaacttattaacatttttgactagggaagatacattatgacgtcccattacttttgccttgtctattattgcgacgttcatagaatttagcatatctcttgccaattcttccattgatgttacattataagaaattttagatgaaattacatttggagctttaatagtaagaactcctaatatgtccgtgtatgtggtcactaatacagattgtagttctataatcgtaaataatttacctatattatatgtttgagtctgtttagaaaagtagctaagtatacgatcttttatttctgatgcagatgtatcaacatcggaaaaaaatctttttttattcttttttactaaagatacaaatatgtctttgttaaaaacagttattttttgaatatttctagcttgtaattttaacatatgatattcattcacactaggtactctgcctaaataggtttctataatctttaatgtaatattaggaaaagtattctgatcaggattcctattcattttgaggatttaaaactctgattattgtctaatatggtctctacgcaaactttttcacagagcgatagagtttttgataactcgtttttcttaagaaatataaaactactgtctccagagctcgctctatcttttattttatttaattcgatacaaactcctgatactggttcagaaagtaattcattaattttcagtcctttatagaagatatttaatatagataatacaaaatcttcagtttttgatatcgatctgattgatcctagaactagatatattaataacgtgctcattaggcagtttatggcagcttgataattagatatagtatattccagttcatatttattagataccgcattgcccagattttgatattctatgaattcctctgaaaataaatccaaaataactaaacattctattttttgtggattagtgtactctcttccctctatcatgttcactactggtgtccacgatgataaatatctagagggaatataatatagtccataggatgccaatctagcaatgtcgaataactgtaatttgattcttcgttcttcattatgaattgattcttgaggtataaacctaacacaaattatattattagacttttcgtatgtaatgtctttcatgttataagtttttaatcctggaatagaatctattttaatgaggcttttaaacgcagagttctccaacgagtcaaagcataatactctgttgtttttcttatatacgatgttacgattttcttctttgaatggaataggtttttgaattagtttataattacaacataatagataaggaagtgtgcaaatagtacgcggaaaaaacataatagctcccctgttttcatccatggttttaagtaaatgatcactggcttctttagttaatggatattcgaacattaaccgtttcatcatcattggacagaatccatatttcttaatgtaaagagtgatcaaatcattgtgtttattgtaccatcttgttgtaaatgtgtattcggttatcggatctgctcctttttctattaaagtatcgatgtcgatctcgtctaagaattcaactatatcgacatatttcatttgtatacacataaccattactaacgtagaatgtataggaagagatgtaacgggaacagggtttgttgattcgcaaactattctaatacataattcttctgttaatacgtcttgcacgtaatctattatagatgccaagatatctatataattattttgtaagatgatgttaactatgtgatctatataagtagtgtaataattcatgtatttcgatatatgttccaactctgtctttgtgatgtctagtttcgtaatatctatagcatcctcaaaaaatatattcgcatatattcccaagtcttcagttctatcttctaaaaaatcttcaacgtatggaatataataatctattttacctcttctgatatcattaatgatatagtttttgacactatcttctgtcaattgattcttattcactatatctaagaaacggatagcgtccctaggacgaactactgccattaatatctctattatagcttctggacataattcatctattataccagaattaatgggaactattccgtatctatctaacatagttttaagaaagtcagaatctaagacctgatgttcatatattggttcatacatgaaatgatctctattgatgatagtgactatttcattctctgaaaattggtaactcattctatatatgctttccttgttgatgaaggatagaatatactcaatagaatttgtaccaacaaactgttctcttatgaatcgtatatcatcatctgaaataatcatgtaaggcatacatttaacaattagagacttgtctcctgttatcaatatactattcttgtgataatttatgtgtgaggcaaatttgtccacgttctttaattttgttatagtagatatcaaatccaatggagctacagttcttggcttaaacagatatagtttttctggaacaaattctacaacattattataaaggactttgggtagataagtgggatgaaatcctattttaattaatgctatcgcattgtcctcgtgcaaatatccaaacgcttttgtgatagtatggcattcattgtctagaaacgctctacgaatatctgtgacagatatcatctttagagaatatactagtcgcgttaatagtactacaatttgtattttttaatctatctcaataaaaaaattaatatgtatgattcaatgtataactaaactactaactgttattgataactagaatcagaatctaatgatgacgtaaccaagaagtttatctactgccaatttagctgcattatttttagcatctcgtttagattttccatctgccttatcgaatactcttccgtcgatgtctacacaggcataaaatgtaggagagttactaggcccaactgattcaatacgaaaagaccaatctctcttagttatttggcagtactcattaataatggtgacagggttagcatctttccaatcaataatttttttagccggaataacatcatcaaaagacttatgatcctctctcattgatttttcgcgggatacatcatctattatgacgtcagccatagcatcagcatccggcttatccgcctccgttgtcataaaccaacgaggaggaatatcgtcggagctgtacaccatagcactacgttgaagatcgtacagagctttattaacttctcgcttctccatattaagttgtctagttagttgtgcagcagtagctccttcgattccaatgtttttaatagccgcacacacaatctctgcgtcagaacgctcgtcaatatagatcttagacatttttagagagaactaacacaaccagcaataaaactgaacctactttatcatttttttattcatcatcctctggtggttcgtcgtttctatcgaatgtagctctgattaacccgtcatctataggtgatgctggttctggagattctggaggagatggattattatctggaagaatctctgttatttccttgttttcatgtatcgattgcgttgtaacattaagattgcgaaatgctctaaatttgggaggcttaaagtgttgtttgcaatctctacacgcgtgtctaactagtggaggttcgtcagctgctctagtttgaatcatcatcggcgtagtattcctacttttacagttaggacacggtgtattgtatttctcgtcgagaacgttaaaataatcgttgtaactcacatcctttattttatctatattgtattctactcctttcttaatgcattttataccgaataagagatagcgaaggaattctttttcggtgccgctagtacccttaatcatatcacatagtgttttatattccaaatttgtggcaatagacggtttatttctatacgatagtttgtttctggaatcctttgagtattctataccaatattattctttgattcgaatttagtttcttcgatattagattttgtattacctatattcttgatgtagtactttgatgatttttccatggcccattctattaagtcttccaagttggcatcatccacatattgtgatagtaattctcggatatcagtagcggctaccgccattgatgtttgttcattggatgagtaactactaatgtatacattttccatttataacacttatgtattaactttgttcatttatattttttcattattatgttgatattaacaaaagtgaatatatatgttaataattgtattgtggttatacggctacaatttcataatgagtggaagtcagtgtccgatgatcaatgacgatagctttactctgaaaagaaagtatcaaatcgatagtgcggagtcaacaatgaaaatggataagaagaggacaaagtttcagaatagagccaaaatggtaaaagaaataaatcagacaataagagcagcacaaactcattacgagacattgaaactaggatacataaaatttaagagaatgattaggactactactctagaagatatagcaccatctattccaaataatcagaaaacttataaactattctcggacatttcagccatcggcaaagcatcacagaatccgagtaagatggtatatgctctgctgctttacatgtttcccaatttgtttggagatgatcatagattcattcgttatagaatgcatccaatgagtaaaatcaaacacaagatcttctctcctttcaaacttaatcttattagaatattagtggaagaaagattctataataatgaatgcagatctaataaatggagaataattggaacacaagttgataaaatgttgatagctgaatctgataaatatacaatagatgcaaggtataacctaaaacccatgtatagaatcaagggaaaatctgaagaagataccctcttcatcaaacagatggtagaacaatgtgtgacatcccaggaattggtggaaaaagtgttgaagatactgtttagagatttgttcaagagtggagaatacaaagcgtacagatacgatgatgatgtagaaaatggatttattggattggatacactaaaattaaacattgttcatgatatagttgaaccatgtatgcctgttcgtaggccagtggctaagatactgtgtaaagaaatggtaaataaatactttgagaatccgctacatattattggtaaaaatcttcaagagtgcattgactttgttagtgaataggcatttcatctttctccaatactaattcaaattgttaaattaataatggatagtataaatagttattagtgataaaatagtaaaaataattattagaataagagtgtagtatcatagataactctcttctataaaaatggattttattcgtagaaagtatcttatatacacagtagaaaataatatagattttttaaaggatgatacattaagtaaagtaaacaattttaccctcaatcatgtactagctctcaagtatctagttagcaattttcctcaacacgttattactaaggatgtattagctaataccaatttttttgttttcatacatatggtacgatgttgtaaagtgtacgaagcggttttacgacacgcatttgatgcacccacgttgtacgttaaagcattgactaagaattatttatcgtttagtaacgcaatacaatcgtacaaggaaaccgtgcataaactaacacaagatgaaaaatttttagaggttgccgaatacatggacgaattaggagaacttataggcgtaaattatgacttagttcttaatccattatttcacggaggggaacccatcaaagatatggaaatcatttttttaaaactgtttaagaaaacagacttcaaagttgttaaaaaattaagtgttataagattacttatttgggcttacctaagcaagaaagatacaggcatagagtttgcggataatgatagacaagatatatacactctatttcaacaaactggtagaatcgtccatagcaatctaacagaaacgtttagagattatatctttcccggagataagactagctattgggtgtggttaaacgaaagtatagctaatgatgcggatattgttcttaatagacacgccattaccatgtatgataaaattcttagttatatatactctgagataaaacaaggacgcgttaataaaaacatgcttaagttagtttatatctttgagcctgaaaaagatatcagagaacttctgctagaaatcatatatgatattcctggagatatcctatctattattgatgcaaaaaacgacgattggaaaaaatattttattagtttttataaagctaattttattaacggtaatacatttattagtgatagaacgtttaacgaggacttattcagagttgttgttcaaatagatcccgaatatttcgataatgaacgaattatgtctttattctctacgagtgctgcggacattaaacgatttgatgagttagatattaataacagttatatatctaatataatttatgaggtgaacgatatcacattagatacaatggatgatatgaagaagtgtcaaatctttaacgaggatacgtcgtattatgttaaggaatacaatacatacctgtttttgcacgagtcggatcccatggtcatagagaacggaatactaaagaaactgtcatctataaaatccaagagtaaacggctgaacttgtttagcaaaaacattttaaaatattatttagacggacaattggctcgtctaggtcttgtgttagatgattataaaggagacttgttagttaaaatgataaaccatcttaagtctgtggaggatgtatccgcattcgttcgattttctacagataaaaaccctagtattcttccatcgctaatcaaaactattttagctagttataatatttccatcatcgtcttatttcaaaggtttttgagagataatctatatcatgtagaagaattcttggataaaagcatccatctaaccaagacggataagaaatatatacttcaattgataagacacggtagatcatagaacagaccaaatatattattaataatttggtatatacatagatattaattatcacatattaaaaattcacacatttttgataaatgggaactgctgcaacaattcagactcccaccaaattaatgaataaagaaaatgcagaaatgattttggaaaaaattgttgatcatatagttatgtatattagtgacgaatcaagtgattcagaaaataatcctgaatatattgattttcgtaacagatacgaagactatagatctctcattataaaaagtgatcacgagtttgtaaagctatgtaaaaatcatgcagagaaaagttctccagaaacgcaacaaatgattatcaaacacatatacgaacaatatcttattccagtatctgaagtactattaaaacctataatgtccatgggtgacataattacatataacggatgtaaagacaatgaatggatgctagaacaactctctaccctaaactttaacaatctccgcacatggaactcatgtagcataggcaatgtaacgcgtctgttttatacattttttagttatctgatgaaagataaactaaatatataagtataatcccattctaatactttaacctgatgtattagcatcttattagaatattaacctaactaaaagacataacataaaaactcattacatagttgataaaaagcggtaggatataaatattatggctgccaccgttccgcgttttgacgacgtgtacaaaaatgcacaaagaagaattctagatcaagaaacattttttagtagaggtctaagtagaccgttaatgaaaaacacatatctatttgataattacgcgtatggatggataccagaaactgcaatttggagtagtagatacgcaaacttagatgcaagtgactattatcccatttcgttgggattacttaaaaagttcgagtttctcatgtctctatataaaggtcctattccagtatacgaagaaaaagtaaatactgaattcatagccaatggatcgttctctggtagatacgtatcatatcttcgaaagttttctgctcttccaacaaacgagtttattagttttttattattgacctccatccctatctataatatcttattctggtttaaaaacacacagtttgatattactaaacacacattattcagatacgtctatacagataatgccaaacacctggcgttggctaggtatatgcatcaaacaggagactataagcctttgtttagtcgtctcaaagagaattatatatttaccggtcccgttccaatatgtatcaaagatatagatcaccctaatcttagtagagcaagaagtccatccgattatgagacattagctaatattagtactatattgtactttaccaagtatgatccggtattaatgtttttattgttttacgtacctgggtattcaattactacaaaaattactccagccgtagaatatctaatggataaactgaatctaacaaagagcgacgtacaactgttgtaaattattttatgcttcgtaaaatgtaggttttgaaccaaacattctttcaaagaatgagatgcataaaactttattatccaatagattgactatttcggacgtcaatcgtttaaagtaaacttcgtaaaatattctttgatcactgccgagtttaaaacttctatcgataattgtctcatatgttttaatatttacaagttttttggtccatggtacattagccggacaaatatatgcaaaataatatcgttctccaagttctatagtttctggattatttttattatattcagtaaccaaatacatattagggttatctgcggatttataatttgagtgatgcattcgactcaacataaataattctagaggagacgatctactatcaaattcggatcgtaaatctgtttctaaagaacggagaatatctatacatacctgattagaattcatccgtccttcagacaacatctcagacagtctggtcttgtatgtcttaatcatattcttatgaaacttggaaacatctcttctagtttcactagtacctttattaattctctcaggtacagattttgaattcgacgatgctgagtatttcatcgttgtatatttcttcttcgattgcataatcagattcttatataccgcctcaaactctattttaaaattattaaacaatactctattattaatcagtcgttctaactctttcgctatttctatagacttatcgacatcttgactgtctatctctgtaaacacggagtcggtatctccatacacgctacgaaaacgaaatctgtaatctataggcaacgatgttttcacaatcggattaatatctctatcgtccatataaaatggattacttaatggattggcaaaccgtaacataccgttagataactctgctccatttagtaccgattctagatacaagatcattctacgtcctatggatgtgcaactcttagccgaagcgtatgagtatagagcactatttctaaatcccatcagaccatatactgagttggctactatcttgtacgtatattgcatggaatcatagatggccttttcagttgaactggtagcctgttttaacatctttttatatctggctctctctgccaaaaatgttcttaatagtctaggaatggttccttctatcgatctatcgaaaattgctatttcagagatgaggttcggtagtctaggttcacaatgaaccgtaatatatctaggaggtggatatttctgaagcaatagctgattatttatttcttcttccaatctattggtactaacaacgacaccgactaatgtttccggagatagatttccaaagatacacacattaggatacagactgttataatcaaagattaatacattattactaaacattttttgttttggagcaaataccttaccgccttcataaggaaacttttgttttgtttctgatctaactaagatagttttagtttccaacaatagctttaacagtggacccttgatgactgtactcgctctatattcgaataccatggattgaggaagcacatatgttgacgcacccgcgtctgtttttgtttctactccataatactcccacaaatactgacacaaacaagcatcatgaatacagtatctagccatatctaaagctatgtttagattataatccttatacatctgagctaaatcaacgtcatcctttccgaaagataatttatatgtatcattaggtaaagtaggacataatagtacgactttaaatccattttcccaaatatctttacgaattactttacatataatatcctcatcaacagtcacataattacctgtggttaaaacctttgcaaatgcagcggctttgcctttcgcgtctgtagtatcgtcaccgataaacgtcatttctctaactcctctatttaatactttacccatgcaactgaacgcgttcttggatatagaatccaatttgtacgaatccaatttttcagatttttgaatgaatgaatatagatcgaaaaatatagttccattattgttattaacgtgaaacgtagtattggccatgccgcctactcccttatgactagactgatttctctcataaatacagagatgtacagcttcctttttgtccggagatctaaagataatcttctctcctgttaataactctagacgattagtaatatatctcagatcaaagttatgtccgttaaaggtaacgacgtagtcgaacgttagttccaacaattgtttagctattcgtaacaaaactatttcagaacatagaactagttctcgttcgtaatccatttccattagtgactgtatcctcaaacatcctctatcgacggcttcttgtatttcctgttccgttaacatctcttcattaatgagcgtaaacaataatcgtttaccacttaaatcgatataacagtaacttgtatgcgagattgggttaataaatacagaaggaaacttcttatcgaagtgacactctatatctagaaataagtacgatcttgggatatcgaatctaggtatttttttagcgaaacagttacgtggatcgtcacaatgataacatccattgttaatctttgtcaaatattgctcgtccaacgagtaacatccgtctggagatatcccgttagaaatataaaaccaactaatattgagaaattcatccatggtggcattttgtatgctgcgtttctttggctcttctatcaaccacatatctgcgacggagcattttctatctttaatatctagattataacttattgtctcgtcaatgtctatagttctcatctttcccaacggcctcgcattaaatggaggaggagacaatgactgatatatttcgtccgtcactacgtaataaaagtaatgaggaaatcgtataaatacggtctcaccatttcgacatctggatttcagatataaaaatctgttttcaccgtgactttcaaaccaattaatgcaccgaacatccatttatagaatttagaaatatattttcatttaaatgaatcccaaacattggggaagagccgtatggaccattatttttatagtactttcgcaagcgggtttagacggcaacatagaagcgtgtaaacgaaaactatatactatagttagcactcttccatgtcctgcatgtagacggcacgcgactattgctatagaggacaataatgtcatgtctagcgatgatctgaattatatttattattttttcatcagattatttaacaatttggcatctgatcccaaatacgcaatcgatgtgtcaaaggttaaacctttataaacttaacccattataaaacttatgattagtcacgactgaaataaccgcgtgattattttttggtataattctacacggcatggtttctgtgactatgaattcaacccccgttacattagtgaaatctttaacaaacagcaagggttcgtcaaagacataaaactcattgtttacaatcgaaatagaccccctatcacacttaaaataaaaaatatccttatcctttaccaccaaataaaattctgattggtcaatgtgaatgtattcacttaacagttccacaaatttatttattaactccgaggcacatacatcgtcggtattttttatggcaaactttactcttccagcatccgtttctaaaaaaatattaacgagttccatttatatcatccaatattattgaaatgacgttgatggacagatgatacaaataagaaggtacggtacctttgtccaccatctcctccaattcatgctctattttgtcattaactttaatgtatgaaaacagtacgccacatgcttccatgacagtgtgtaacactttggatacaaaatgtttgacattagtataattgtttaagactgtcaatctataatagatagtagctataatatattctatgatggtattgaagaagatgacaatcttggcatattgatcatttaacacagacatggtatcaacagatagcttgaatgaaagagaatcagtaattggaataagcgtcttctcgatggagtgtccgtataccaacatgtctgatattttgatgtattccattaaattatttagttttttctttttattctcgttaaacagcatttctgtcaacggaccccaacatcgttgaccgattaagttttgattgatttttccgtgtaaggcgtatctagtcagatcgtatagcctatccaataatccatcatctgtgcgtagatcacatcgtacactttttaattctctatagaagagcgacagacatctggaacaattacagacagcaatttctttattctctacagatgtaagatacttgaagacattcctatgatgatgcagaattttggataacacggtattgatggtatctgttaccataattcctttgatggctgatagtgtcagagcacaagatttccaatctttgacaatttttagcaccattatctttgttttgatatctatatcagacagcatggtgcgtctgacaacacagggattaagacggaaagatgaaatgattctctcaacatcttcaatggataccttgctattttttctggcattatctatatgtgcgagaatatcctctagagaatcagtatcctttttgatgatagtggatctcaatgacatgggacgtctaaaccttcttattctatcaccagattgcatggtgatttgtcttctttcttttatcataatgtaatctctaaattcatcggcaaattgtctatatctaaaatcataatatgagatgtttacctctacaaatatctgttcgtccaatgttagagtatctacatcagttttgtattccaaattaaacatggcaacggatttaattttatattcctctattaagtcctcgtcgataataacagaatgtagataatcatttaatccatcgtacatggttggaagatgcttgttgacaaaatctttaattgtcttgatgaaggtgggactatatctaacatcttgattaataaaatttataacattgtccataggatactttgtaactagttttatacacatctcttcatcggtaagtttagacagaatatcgtgaacaggtggtatattatattcatcagatatacgaagaacaatgtccaaatctatattgtttaatatattatatagatgtagtgtagctcctacaggaatatctttaactaagtcaatgatttcatcaaccgttagatctattttaaagttaatcatataggcattgatttttaaaaggtatgtagccttgactacattctcattaattaaccattccaagtcactgtgtgtaagaagattatattctatcataagcttgactacatttggtcccgataccattaaagaattcttatgatataaggaaacagcttttaggtactcatctactctacaagaattttggagagccttaacgatatcagtgacgtttattatttcaggaggaaaaaacctaacattgagaatgtcggagttaatagcttccagatacagtgattttggcaatagtccgtgtaatccataatccagtaacacgagctggtgcttgctagacaccttttcaatgtttaatttttttgaaataagctttgataaagccttcctcgcaaattccggatacatgaacatgtcggcgacatgattaagtattgttttttcattatttttatattttctcaacaagttctcaataccccaatagatgatagaatatcacccaatgcgtccatgttgtctatttccaacaggtcgctatatccaccaatagaagttttcccaaaaaagattctaggaacagttctaccaccagtaatttgttcaaaataatcccgcaattcattttcgggtttaaattctttaatatcgacaatttcatacgctcctcttttgaaactaaacttatttagaatatccagtgcatttctacaaaaaggacatgtatacttgacaaaaattgtcactttgttattggccaacctttgttgtacaaattcctcggccattttaatatttaagtgatataaaactatctcgacttatttaactctttagtcgagatatatggacgcagatagctatatgatagccaactacagaaggcaaacgctataaaaaacataattacgacgagcatatttataaatatttttattcagcattacttgatatagtaatattaggcacagtcaaacattcaaccactctcgatacattaactctctcattttctttaacaaattctgcaatatcttcgtaaaaagattcttgaaactttttagaatatctatcgactctagatgaaatagcgttcgtcaacatactatgttttgtatacataaaggcgcccattttaacagtttctagtgacaaaatgctagcgatcctaggatcctttagaatcacatagattgacgattcgtctctcttagtaactctagtaaaataatcatacaatctagtacgcgaaataatattatccttgacttgaggagatctaaacaatctagttttgagaacatcgataagttcatcgggaatgacatacatactatctttaatagaactcttttcatccagttgaatggattcgtccttaaccaactgattaatgagatcttctattttatcattttccagatgatatgtatgtccattaaagttaaattgtgtagcgcttctttttagtctagcagccaatactttaacatcactaatatcgatatacaaaggagatgatttatctatggtattaagaattcgtttttcgacatccgtcaaaaccaattcctttttgcctgtatcatccagttttccatcctttgtaaagaaattattttctactagactattaataagactgataaggattcctccataattgcacaatccaaactttttcacaaaactagactttacgagatctacaggaatgcgtacttcaggtttcttagcttgtgattttttcttttgcggacattttcttgtgaccaactcatctaccatttcattgattttagcagtgaaataagctttcaatgcacgggcactgatactattgaaaacgagttgatcttcaaattccgccatttaagttcaccaaacaacttttaaatacaaatatatcaatagtagtagaataagaactataaaaaaaataataattaaccaataccaaccccaacaaccggtattattagttgatgtgactgttttctcatcacttagaacagatttaacaatttctataaagtctgtcaaatcatcttccggagaccccataaatacaccaaatatagcggcgtacaacttatccatttatacattgaatattggcttttctttatcgctatcttcatcatattcatcatcaatatcaacaagtcccagattacgagccagatcttcttctacattttcagtcattgatacacgttcactatctccagagagtccgataacgttagccaccacttctctatcaatgattagtttcttgagtgcgaatgtaatttttgtttccgttccggatctatagaagacgataggtgtgataattgccttggccaattgtctttctcttttactgagtgattctagttcaccttctatagatctgagaatggatgattctccagccgaaacatattctaccatggctccgtttaatttgttgatgaagatggattcatccttaaatgttttctctgtaatagtttccaccgaaagactatgcaaagaatttggaatgcgttccttgtgcttaatgtttccatagacggcttctagaagttgatacaacataggactagccgcggtaacttttatttttagaaagtatccatcgcttctatcttgtttagatttatttttataaagtttagtctctccttccaacataataaaagtggaagtcatttgactagataaactatcagtaagttttatagagatagacgaacaattagcgtattgagaagcatttagtgtaacgtattcgatacattttgcattagatttactaatcgattttgcatactctataacacccgcacaagtctgtagagaatcgctagatgcagtaggtcttggtgaagtttcaactctcttcttgattaccttactcatgattaaacctaaataattgtactttgtaatataatgatatatattttcactttatctcatttgagaataaaaatgtttttgtttaaccactgcatgatgtacagatttcggaatcgcaaaccaccagtggttttattttatccttgtccaatgtgaattgaatgggagcggatgcgggtttcgtacgtagatagtacattcccgtttttagaccgagactccatccgtaaaaatgcatactcgttagtttggaataactcggatctgctatatggatattcatagattgactttgatcgatgaaggctcccctgtctgcagccatttttatgatcgtcttttgtggaatttcccaaatagttttataaactcgcttaatatcttctggaaggtttgtattctgaatggatccaccatctgccataatcctattcttgatctcatcattccataattttctctcggttaaaactctaaggagatgcggattaactacttgaaattctccagacaatactctccgagtgtaaatattactggtatacggttccaccgactcattatttcccaaaatttgagcagttgatgcagtcggcataggtgccaccaataaactatttctaagaccgtatgttctgattttatcttttagaggttcccaattccaaagatccgacggtacaacattccaaagatcatattgtagaataccgttactggcgtacgatcctacatatgtatcgtatggtccttccttctcagctagttcacaactcgcctctaatgcaccgtaataaatggtttcgaagatcttcttatttagatcttgtgcttccaggctatcaaatggataatttaagagaataaacgcgtccgctaatccttgaacaccaataccgataggtctatgtctcttattagagatttcagcttctggaataggataataattaatatctataattttattgagatttctgacaattactttgaccacatccttcagtttgagaaaatcaaatcgcccatctattacaaacatgttcaaggcaacagatgccagattacaaacggctacctcattagcatccgcatattgtattatctcagtgcaaagattactacacttgatagttcctaaattttgttgattactctttttgttacacgcatccttataaagaatgaatggagtaccagtttcaatctgagattctataatcgctttccagacgactcgagcctttattatagatttgtatctcctttctctttcgtatagtgtatacaatcgttcgaactcgtctccccaaacattgtccaatccaggacattcatccggacacatcaacgaccactctccgtcatccttcactcgtttcataaagagatcaggaatccaaagagctataaatagatctctggttctatgttcctcgtttcctgtattctttttaagatcgaggaacgccataatatcagaatgccacggttccaagtatatggccataactccaggccgtttgtttcctccctgatctatgtatctagcggtgttattataaactctcaacattggaataataccgtttgatataccattggtaccggagatatagcttccactggcacgaatattactaattgatagacctattccccctgccattttagagattaatgcgcatcgttttaacgtgtcatagataccctctatgctatcatcgatcatgttaagtaaaaaacagctagacatttggtgacgactagttcccgcattaaataaggtaggagaagcgtgcgtaaaccatttttcagaaagtagattgtacgtctcaatagctgagtctatatcccattgatgaattcctactgcgacacgcattaacatgtgctgaggtctttcaacgatcttgttgtttattttcaacaagtaggatttttccaaagttttaaaaccaaaatagttgtatgaaaagtctcgttcgtaaataataaccgagttgagtttatccttatatttgttaactatatccatggtgatacttgaaataatcggagaatgtttcccatttttaggattaacatagttgaataaatcctccatcacttcactaaatagtttttttgtttccttgtgtagatttgatacggctattctggcggctagaatggcataatccggatgttgtgtagtacaagtggctgctatttcggctgccagagtgtccaattctaccgttgttactccattatatattccttgaataaccttcatagctattttaataggatctatatgatccgtgtttaagccataacataattttctaatacgagacgtgattttatcaaacatgacattttccttgtatccatttcgtttaatgacaaacatttttgttggtgtaataaaaaaattatttaacttttcattaatagggatttgacgtatgtagcgtacaaaattatcgttcctggtatatagataaagagtcctatatatttgaaaatcgttacggctcgattaaactttaatgattgcatagtgaatatatcattaggatttaactccttgactatcatggcggcgccagaaattaccatcaaaagcattaatacagttatgccgatcgcagttagaacggttatagcatccaccatttatatctaaaaattagatcaaagaatatgtgacaaagtcctagttgtatactgagaattgacgaaacaatgtttcttacatatttttttcttattagtaactgacttaatagtaggaactggaaagctagacttgattattctataagtatagatacccttccagataatgttctctttgataaaagttccagaaaatgtagaattttttaaaaagttatcttttgctattaccaagattgtgtttagacgcttattattaatatgagtaatgaaatccacaccgcctctagatatcgcctttatttccacattagatggtaaatccaatagtgaaactatctttttaggaatgtatggactcgcgtttagaggagtgaacgtcttgggcgtcggaaaggatgattcgtcaaacgaataaacaatttcacaaatggatgttaatgtattagtaggaaatttcttgacgctagtggagttgaagattctaatggatgatgttctacctatttcatccgataacatgttaatttccgacaccaacggttttaatatttcgatgatatacggtagtctctctttcggacttatatagcttattccacaatacgagtcattatatactccaaaaaacaaaataactagtataaaatctgtatcgaatgggaaaaacgaaattatcgacataggtatagaatccggaacattgaacgtattaatacttaattctttttctgtggtaagtaccgataggttattgacattgtatggttttaaatattctataacttgagacttgatagatattagtgatgaattgaaaattatttttatcaccacgtgtgtttcaggatcatcgtcgacgcccgtcaaccaaccgaatggagtaaaataaatatcattaatatatgctctagatattagtatttttatcaatcctttgattatcatcttctcgtaggcgaatgattccatgatcaagagtgatttaagaacatcctccggagtattaatgggcttagtaaacagtccatcgttgcaataataaaagttatccaagttaaaggatattatgcattcgtttaaagatatcacctcatctgacggagacaattttttggtaggttttagagactttgaagctacttgtttaacaaagttattcatcgtcgtctactattctatttaattttgtagttaatttatcacatatcacattaattgactttttggtccatttttccatacgtttatattcttttaatcctgcgttatccgtttccgttatatccagtgatagatcgtgcaggttaaatagaatgctcttaaataatgtcatttttttatccgctaaaaatttaaagaatgtataaacctttttcagagatttgaaactcttaggtggtgtcctagtacacaatatcataaacaaactaataaacattccacattcagattccaacagctgattaacttccacattaatacagcctattttcgctccaaatgtacattcgaaaaatctgaataaaacatcgatgtcacaatttgtattatccaatacagaatgtctgtgattcgtgttaaaaccatcggagaaggaatagaaataaaaattattatagtggtggaattcagttggaatattgcctccggagtcataaaaggatactaaacattgttttttatcataaattacacatttccaatgagacaaataacaaaatccaaacattacaaatctagaggtagaacttttaattttgtctttaagtatatacgataagatatgtttattcataaacgcgtcaaatttttcatgaatcgctaaggagtttaagaatctcatgtcaaattgtcctatataatccacttcggatccataagcaaactgagagactaagttcttaatacttcgattgctcatccaggctcctctctcaggctctattttcatcttgacgacctttggattttcaccagtatgtattcctttacgtgataaatcatcgattttcaaatccatttgtgagaagtctatcgccttagatactttttcccgtagtcgaggtttaaaaaaatacgctaacggtatactagtaggtaactcaaagacatcatatatagaatggtaacgcgtctttaactcgtcggttaactctttcttttgatcgagttcgtcgctactattgggtctgctcaggtgccccgactctactagttccaacatcataccgataggaatacaagacactttgccggcggttgtagatttatcatatttctccactacatatccgttacaatttgttaaaaatttagatacatctatattgctacataatccagctagtgaatatatatgacataataaattggtaaatcctagttctggtattttactaattactaaatctgtatatctttccatttatcatggaaaagaatttaccagatatcttcttttttccaaactgcgttaatgtattctcttacaaatattcacaagatgaattcagtaatatgagtaaaacggaacgtgatagtttctcattggccgtgtttccagttataaaacatagatggcataacgcacacgttgtaaaacataaaggaatatacaaagttagtacagaagcacgtggaaaaaaagtatctcctccatcactaggaaaacccgcacacataaacctaaccacgaaacaatatatatacagtgaacacacaataagctttgaatgttatagttttctaaaatgtataacaaatacagaaatcaattcgttcgatgagtatatattaagaggactattagaagctggtaatagtttacagatattttccaattccgtaggtaaacgaacagatactataggtgtactagggaataagtatccatttagcaaaattccattggcctcattaactcctaaagcacaacgagagatattttcagcgtggatttctcatagacctgtagttttaactggaggaactggagtgggtaagacgtcacaggtacccaagttattgctttggtttaattatttatttggtggattctctactctagataaaatcactgactttcacgaaagaccagtcattctatctcttcctaggatagctttagttagattgcatagcaataccattttaaaatcattgggatttaaggtactagatggatctcctatttctttacggtacggatctataccggaagaattaataaacaaacaaccaaaaaaatatggaattgtattttctacccataagttatctctaacaaaactatttagttatggcactcttattatagacgaagttcatgagcatgatcaaataggagatattattatagcagtagcgagaaagcatcatacgaaaatagattctatgtttttaatgactgccacgttagaggatgacagggaacggctaaaagtatttttacctaatcccgcatttatacatattcctggagatacactgtttaaaattagcgaggtatttattcataataagataaatccatcttccagaatggcatacatagaagaagaaaagagaaatttagttactgctatacagatgtatactcctcctgatggatcatccggtatagtctttgtggcatccgttgcacagtgtcacgaatataaatcatatttagaaaaaagattaccgtatgatatgtatattattcatggtaaggtcttagatatagacgaaatattagaaaaagtgtattcatcacctaatgtatcgataattatttctactccttatttggaatccagcgttactatacgcaatgttacacacatttatgatatgggtagagtttttgtccccgctccttttggaggatcgcaagaatttatttctaaatctatgagagatcaacgaaaaggaagagtaggaagagttaatcctgggacatacgtatatttctatgatctgtcttatatgaagtctatacagcgaatagattcagaatttctacataattatatattgtacgctaataagtttaatctaacactccccgaagatttgtttataatccctacaaatttggatattctatggcgtacaaaggaatatatagactcgttcgatattagtacagaaacatggaataaattattatccaattattatatgaagatgatagagtatgctaaactttatgtactaagtcctattctcgctgaggagttggataactttgagaggacgggagaattaactagtattgtacgagaagccattttatctctaaatttacgaattaagattttaaattttaaacataaagatgatgatacgtatatacacttttgtaaaatattattcggtgtctataacggaacaaacgctactatatattatcatagacctctaacgggatatatgaatatgatttcagatactatatttgttcctgtagataataactaaaaatcaaactctaatgaccacatctttttttagagatgaaaaattttccacatctccttttgtagacacgactaaacattttgcagaaaaaagtttattagtgtttagataatcgtatacttcatcagtgtagatagtaaatgtgaacagataaaaggtattcttgctcaatagattggtaaattccatagaatatattaatcctttcttcttgagatcccacatcatttcaaccagagacgttttatccaatgatttacctcgtactataccacatacaaaactagattttgcagtgacgtcgtacctggtattcctaccaaacaaaattttacttttagttcttttagaaaattctaaggtagaatctctatttgccaatatgtcatctatggaattaccactagcaaaaaatgatagaaatatatattgatacatcgcagctggttttgatctactatactttaaaaacgaatcagattccataattgcctgtatatcatcagctgaaaaactatgttttacacgtattccttcggcatttctttttaatgatatatcttgtttagacaatgataaagttatcatgtccatgagagacgcgtctccgtatcgtataaatatttcattagatgttagacgcttcattaggggtatacttctataaggtttcttaatcagtccatcattggttgcgtcaagaactactatcggatgttgttgggtatctctagtgttacacatggccttactaaagtttgggtaaataactatgatatctctattaattatagatgcatatatttcattcgtcaaggatattagtatcgacttgctatcgtcattaatacgtgtaatgtaatcatataaatcatgcgatagccaaggaaaattcaaatagatgttcatcatataatcgtcgctataattcatattaatactttgacattgactaatttgtaatatagcctcgccacgaagaaagctctcgtattcagtttcatcgataaaggataccgttaaatataactggttgccgatagtctcatagtctattaagtggtaagtttcgtacaaatacagaatccctaaaatattatctaatgttggattaatctttaccataactgtataaaatggagacggagtcataactattttaccgtttgtacttactggaatagatgaaggaataatctccggacatgctggtaaagacccaaatgtctgtttgaagaaatccaatgttccaggtcctaatctcttaacaaaaattacgatattcgatcccgatatcctttgcattctatttaccagcatatcacgaactatattaagattatctatcatgtctattctcccaccgttatataaatcgcctccgctaagaaacgttagtatatccatacaatggaatacttcatttctaaaatagtattcgttttctaattctttaatgtgaaatcgtatactagaaagggaaaaattatctttgagttttccgttagaaaagaaccacgaaactaatgttctgattgcgtccgattccgttgctgaattaatggatttacaccaaaaactcatataacttctagatgtagaagcattcgctaaaaaattagtagaatcaaaggatataagtagatgttccaacaagtgagcaattcccaagatttcatctatatcattctcgaatccgaaattagaaattcccaagtagatatcctttttcatccgatcattgatgaaaatacgaactttattcggtaagacaatcatttactaaggagtaaaataggaagtaatgttcgtatgtcgttatcatcgtataaattaaaggtgtgttttttaccattaagtgacattataattttaccaatattggaattataatataggtgtatttgcgcactcgcgacggttgatgcatcggtaaatatagctgtatctaatgttctagtcggtatttcatcatttcgctgtctaataatagcgttttctctatctgtttccattacagctgcctgaagtttattggtcggataatatgtaaaataataagaaatacatacgaataacaaaaataaaataagatataataaagatgccatttagagatctaattttgttcaacttgtccaaattcctacttacagaagatgaggaatcgttggagatagtgtcttccttatgtagaggatttgaaatatcttatgatgacttgataacttactttccagataggaaataccataaatatatttctaaagtatttgaacatgtagatttatcggaggaattaagtatggaattccatgatacaactttgcgagatttagtttatcttagattgtacaagtattccaagtgtatacggccgtgttataaattaggagataatctaaaaggcatagttgttataaaggacaggaatatttatattagggaagcaaatgatgacttgatagaatatctcctcaaggaatacactcctcagatttatacatattctaatgagcgcgtccccataactggttcaaaattaattctttgtggattttctcaagttacatttatggcgtatacaacgtcgcatataacaacaaataaaaaggtagatgttctcgtttccaaaaaatgtatagatgaactagtcgatccaataaattatcaaatacttcaaaatttatttgataaaggaagcggaacaataaacaaaatactcaggaagatattttattcggtaacaggtggccaaactccataggtagctttttctatttcggattttagaatttccaaattcaccagcgatttatcggttttggtgaaatccaaggatttattaatgtccacaaatgccatttgttttgtctgtggattgtatttgaaaatggaaacgatgtagttagatagatgcgctgcgaagtttcctattagggttccgcgcttcacgtcacccagcatacttgaatcaccatcctttaaaaaaaatgataagatatcaacatggagtatatcatactcggattttaattcttctactgcatcactgacattttcacaaatactacaatacggtttaccgaaaataatcagtacgttcttcatttatgggtatcaaaaacttaaaatcgttactgctggaaaataaatcactgacgatattagatgataatttatacaaagtatacaatggaatatttgtggatacaatgagtatttatatagccgtcgccaattgtgtcagaaacttagaagagttaactacggtattcataaaatacgtaaacggatgggtaaaaaagggagggcatgtaaccctttttatcgatagaggaagtataaaaattaaacaagacgttagagacaagagacgtaaatattctaaattaaccaaggacagaaaaatgctagaattagaaaagtgtacatccgaaatacaaaatgttaccggatttatggaagaagaaataaaggcagaaatgcaattaaaaatcgataaactcacatttcaaatatatttatctgattctgataacataaaaatatcattgaatgagatactaacacatttcaacaataatgagaatgttacattattttattgtgatgaacgagacgcagaattcgttatgtgtctcgaggctaaaacacatttctctaccacaggagaatggccgttgataataagtaccgatcaggatactatgctatttgcatctactgataatcatcctaagatgataaaaaacttaactcaactgtttaaatttgttccctcggcagaggataactatttagcaaaattaacggcgttagtgaatggatgtgatttctttcctggactctatggggcatctataacacccaacaacttaaacaaaatacaattgtttagtgattttacaatcgataatatagtcactagtttggcaattaaaaattattatagaaagactaactctaccgtagacgtgcgtaatattgttacgtttataaacgattacgctaatttagacgatgtctactcgtatgttcctccttgtcaatgcactgttcaagaatttatattttccgcattagatgaaaaatggaacaattttaaatcatcttatttagagaccgttccgttaccctgtcaattaatgtacgcgttagaaccacgcaaggagattgatgtttcagaagttaaaactttatcatcttatatagatttcgaaaatactaaatcagatatcgatgttataaaatctatatcctcgatcttcggatattctaacgaaaactgtaacacgatagtattcggcatctataaggataatttactactgagtataaataattcattttactttaacgatagtctgttaataaccaatactaaaagtgataatataataaatataggttactagattaaaaatggtgttccaactcgtgtgctctacatgcggtaaagatatttctcacgaacgatataaattgattatacgaaaaaaatcattaaaggatgtactcgtcagtgtaaagaacgaatgttgtaggttaaaattatctacacaaatagaacctcaacgtaacttaacagtgcaacctctattggatataaactaatatggatccggttaattttatcaagacatatgcgcctagaggttctattatttttattaattataccatgtcattaacaagtcatttgaatccatcgatagaaaaacatgtgggtatttattatggtacgttattatcggaacacttggtagttgaatctacctatagaaaaggagttcgaatagtcccattggatagtttttttgaaggatatcttagtgcaaaagtatacatgttagagaatattcaagttatgaaaatagcagctgatacgtcattaactttattgggtattccgtatggatttggtcataatagaatgtattgttttaaattggtagctgactgttataaaaatgccggtgttgaaacatcgtctaaacgaatattaggtaaagatatttttctgagccaaaacttcacagacgataatagatggataaagatatatgattctaataatttaacattttggcaaattgattaccttaaagggtgagttaatatgcataactactcctccgttgttttttcccacgttctttttcttaacgttgtttgccatcactctcataatgtaaagatattctaaaatggtaaacttttgcatatcggacgcagaaattggtataaatgttgtaattgtattatttcccgtcaatggactagtcacagctccatcagttttatatcctttagagtatttctcactcgtgtctagcattctagagcattccatgatctgtttatcgttgatattggccggaaagatagattttttattttttattatattactattggcaattgtagatataacttctggtaaatatttttctaccttttcaatttcttctattttcaagccggctatatattctgctatattgttgctagtatcaataccttttctggctaagaagtcatatgtggtattcactatatcagttttaactggtagttccattagcctttccacttctgcagaataatcagaaattggttctttaccagaaaatccagctactataataggctcaccgatgatcattggcaaaatcctatattgtaccagattaatgagagcatatttcatttccaataattctgctagttcttgagacattgatttatttgatgaatctagttggttctctagatactctaccatttctgccgcatacaataacttgttagataaaatcagggttatcaaagtgtttagcgtggctagaatagtgggcttgcatgtattaaagaatgcggtagtatgagtaaaccgttttaacgaattatatagtctccagaaatctgtggcgttacatacatgagccgaatgacatcgaagattgtccaatatttttaatagctgctctttgtccattatttctatatttgactcgcaacaattgtagataccattaatcactgattcctttttcgatgccggacaatagcacaattgtttagctttggactctatgtattcagaattaatagatatatctcttaatacagattgcactatacattttgaaactatgtcaaaaattgtagaacgacgctgttctgcagccatttaactttaaataatttacaaaaatttaaaatgagcatccgtataaaaatcgataaactgcgccaaattgtggcatatttttcagagttcagtgaagaagtgtctataaatgtagactcgacggatgagttaatgtatatttttgccgccttgggcggatctgtaaacatttgggccattatacctctcagtgcatcagtgttctaccgaggagccgaaaacattgtgtttaatcttcctgtgtccaaggtaaaatcgtgtttgtgtagttttcacaatgatgccatcatagatatagaacctgatctggaaaataatctagtaaaactttctagttatcatgtagtaagtgtcgattgtaataaggaactgatgcctattaggacagatactactatttgtctaagtatagatcaaaagaaatcttatgtgtttaattttcacaagtatgaagaaaaatgttgtggtagaaccgtcattcatttagaatggttgttgggctttatcaagtgtattagtcagcatcagcatctggctattatgtttaaagatgacaatattattatgaagactcctggtaatactgatgcattttccagggaatattctatgactgaatgttctcaagaactacaaaagttttctttcaaaatagctatctcgtctctcaacaaactacgaggattcaaaaagagagtcaatgtttttgaaactagaatcgtaatggataatgacgataacattctaggaatgttgttttcggatagagttcaatcctttaagatcaacatctttatggcgtttttagattaatactttcaatgagataaatatgggtggcggagtaagtgttgagctccctaaacgggatccgcctccgggagtacccactgatgagatgttattaaacgtggataaaatgcatgacgtgatagctcccgctaagcttttagaatatgtgcatataggaccactagcaaaagataaagaggataaagtaaagaaaagatatccagagtttagattagtcaacacaggacccggtggtctttcggcattgttaagacaatcgtataatggaaccgcacccaattgctgtcgcacttttaatcgtactcattattggaaaaaggatggaaagatatcagataagtatgaagagggtgcagtattagaatcgtgttggccagacgttcacgacactggaaaatgcgatgttgatttattcgactggtgtcagggggatacgttcgatagaaacatatgccatcagtggatcggttcagcctttaataggagtaatagaactgtagagggtcaacaatcgttaataaatctgtataataagatgcaaacattatgtagtaaagatgctagtgtaccaatatgtgaatcatttttgcatcatttacgcgcacacaatacagaagatagcaaagagatgatcgattatattctaagacaacagtctgcggactttaaacagaaatatatgagatgtagttatcccactagagataagttagaagagtcattaaaatatgcggaacctcgagaatgttgggatccagagtgttcgaatgccaatgttaatttcttgctaacacgtaattataataatttaggactttgcaatattgtacgatgtaatactagcgtgaacaacttacagatggataaaacttcctcattaagattgtcatgtggattaagcaatagtgatagattttctactgttcccgtcaatagagcaaaagtagttcaacataatattaaacactcgttcgacctaaaattgcatttgatcagtttattatctctcttggtaatatggatactaattgtagctatttaaatgggtgccgcagcaagcatacagacgacggtgaatacactcagcgaacgtatctcgtctaaattagaacaagaagcgaatgctagtgctcaaacaaaatgtgatatagaaatcggaaatttttatatccgacaaaaccatggatgtaacctcactgttaaaaatatgtgctctgcggacgcggatgctcagttggatgctgtgttatcagccgctacagaaacatatagtggattaacaccggaacaaaaagcatacgtgccagctatgtttactgctgcgttaaacattcagacgagtgtaaacactgttgttagagattttgaaaattatgtaaaacaaacttgtaattctagcgcggtcgtcgataacaaattaaagatacaaaacgtaatcatagatgaatgttacggagccccaggatctccaacaaatttggaatttattaatacaggatctagcaaaggaaattgtgccattaaggcgttgatgcaattgactactaaggccactactcaaatagcacctagacaagttgctggtacaggagttcagttttatatgattgttatcggtgttataatattggcagcgttgtttatgtactatgccaagcgtatgctgttcacatccaccaatgataaaatcaaacttattttagccaataaggaaaacgtccattggactacttacatggacacattctttagaacttctccgatggttattgctaccacggatatgcaaaactgaaaatatattgataatattttaatagattaacatggaagttatcgctgatcgtctagacgatatagtgaaacaaaatatagcggatgaaaaatttgtagattttgttatacacggtctagagcatcaatgtcctgctatacttcgaccattaattaggttgtttattgatatactattatttgttatagtaatttatatttttacggtacgtctagtaagtagaaattatcaaatgttgttggcgttggtggcgctagtcatcacattaactattttttattactttatactataatagtactagactgacttctaacaaacatctcacctgccataaataaatgcttgatattaaagtcttctatttctaacactattccatctgtggaaaataatactctgacattatcgctaattgacacatcggtgagtgatatgcctataaagtaataatcttctttgggcacatataccagtgtaccaggttctaacaacctatttactggtgctcctgtagcatactttttctttaccttgagaatatccatcgtttgcttggtcaatagcgatatgtgattttttatcaaccactcgaaaaagtaattggagtgttcatatcctctacgggctattgtctcatggccgtgtatgaaatttaagtaacacgactgtggtagatttgttctatagagccggttgccgcaaatagatagaactaccaatatgtctgtacaaatgttaaacattaattgattaacagaaaaaacaatgttcgttctgggaatagaaaccagatcaaaacaaaattcgttagaatatatgccacgtttatacattgaatataaaataactacagtttgaaaaataacagtatcatttaaacatttaacttgcggggttaatttcacaactttactgtttttaagctgttcaaaatatagcatcgatccatgagaaatacgtttagccgcctttaatagaggaaatcccaccgcctttctggatctcaccaacgacgatagttctgaccagcaactcatttcttcatcatccacctgttttaacatataataggcaggagatagatatccgtcattgcaatattccttttcgtaggcacacaatctaatattgataaaatctccattctcttctctgcatttattatcttgtttcggtggctgattaggctgtagtcttggtttaggccttggtctatcgttgttgaatctattttggtcattaaatctttcatttcttcctggtatatttctatcacctcgtttggttggatttttgtctatattatcgtttgtaacatcggtacgggtattcatttatcacaaaaaaaacttctctaaatgagtctactgctagaaaacctcatcgaagaagataccatattttttgcaggaagtatatctgagtatgatgatttacaaatggttattgccggcgcaaaatccaaatttccaagatctatgctttctatttttaatatagtacctagaacgatgtcaaaatatgagttggagttgattcataacgaaaatatcacaggagcaatgtttaccacaatgtataatataagaaacaatttgggtctaggagatgataaactaactattgaagccattgaaaactatttcttggatcctaacaatgaagttatgcctcttattattaataatacggatatgactgccgtcattcctaaaaaaagtggtaggagaaagaataagaacatggttatcttccgtcaaggatcatcacctatcttgtgcattttcgaaactcgtaaaaagattaatatttataaagaaaatatggaatccgcatcgactgagtatacacctatcggagacaacaaggctttgatatctaaatatgcgggaattaatgtcctgaatgtgtattctccttccacatccatgagattgaatgccatttacggattcaccaataaaaataaactagagaaacttagtactaataaggaactagaatcgtatagttctagccctcttcaagaacccattaggttaaatgattttctgggactattggaatgtgttaaaaagaatattcctctaacagatattccgacaaaggattgattactataaatggagaatgttcctaatgtatactttaatcctgtgtttatagagcccacgtttaaacattctttattaagtgtttataaacacagattaatagttttatttgaagtattcgttgtattcattctaatatatgtattttttagatctgaattaaatatgttcttcatgcctaaacgaaaaatacccgatcctattgatagattacgacgtgctaatctagcgtgtgaagacgataaattaatgatctatggattaccatggatgacaactcaaacatctgcgttatcaataaatagtaaaccgatagtgtataaagattgtgcaaagcttttgcgatcaataaatggatcacaaccagtatctcttaacgatgttcttcgcagatgatgattcattttttaagtatttggctagtcaagatgatgaatcttcattatctgatatattgcaaatcactcaatatctagactttctgttattattattgatccaatcaaaaaataaattagaagccgtgggtcattgttatgaatctctttcagaggaatacagacaattgacaaaattcacagactctcaagattttaaaaaactgtttaacaaggtccctattgttacagatggaagggtcaaacttaataaaggatatttgttcgactttgtgattagtttgatgcgattcaaaaaagaatcctctctagctaccaccgcaatagatcctattagatacatagatcctcgtcgcgatatcgcattttctaacgtgatggatatattaaagtcgaataaagtgaacaataattaattctttattgtcatcatgaacggcggacatattcagttgataatcggccccatgttttcaggtaaaagtacagaattaattagacgagttagacgttatcaaatagctcaatataaatgcgtgactataaaatattctaacgataatagatacggaacgggactatggacgcatgataagaataattttgaagcattggaagcaactaaactatgtgatgtcttggaatcaattacagatttctccgtgataggtatcgatgaaggacagttctttccagacattgttgaattctgtgagcgtatggcaaacgaaggaaaaatagttatagtagccgcactcgatgggacatttcaacgtaaaccgtttaataatattttgaatcttattccattatctgaaatggtggtaaaactaactgctgtgtgtatgaaatgctttaaggaggcttccttttctaaacgattgggtgaggaaaccgagatagaaataataggaggtaatgatatgtatcaatcggtgtgtagaaagtgttacatcgactcataatattatattttttatctaaaaaactaaaaataaacattgattaaattttaatataatacttaaaaatggatgttgtgtcgttagataaaccgtttatgtattttgaggaaattgataatgagttagattacgaaccagaaagtgcaaatgaggtcgcaaaaaaactgccgtatcaaggacagttaaaactattactaggagaattattttttcttagtaagttacagcgacacggtatattagatggtgccaccgtagtgtatataggatcggctcctggtacacatatacgttatttgagagatcatttctataatttaggaatgattatcaaatggatgctaattgacggacgccatcatgatcctattctaaatggattgcgtgatgtgactctagtgactcggttcgttgatgaggaatatctacgatccatcaaaaaacaactgcatccttctaagattattttaatttctgatgtaagatccaaacgaggaggaaatgaacctagtacggcggatttactaagtaattacgctctacaaaatgtcatgattagtattttaaaccccgtggcatctagtcttaaatggagatgcccgtttccagatcaatggatcaaggacttttatatcccacacggtaataaaatgttacaaccttttgctccttcatattcagctgaaatgagattattaagtatttataccggtgagaacatgagactgactcgagttaccaaatcagacgttgtaaattatgaaaaaaagatgtactaccttaataagatcgtccgtaacaaagtagttgttaactttgattatcctaatcaggaatatgactattttcacatgtactttatgctgaggaccgtgtactgcaataaaacatttcctactactaaagcaaaggtactatttctacaacaatctatatttcgtttcttaaatattccaacaacatcaactgaaaaagttagtcatgaaccaatacaacgtaaaatatctagcaaaaattctatgtctaaaaacagaaatagcaagagatccgtacgcggtaataaatagaaacgtactactgagatatactaccgatatagagtataatgatttagttactttaataaccgttagacataaaattgattctatgaaaactgtgtttcaggtatttaacgaatcatccataaattatactccggttgatgatgattatggagaaccaatcattataacatcgtatcttcaaaaaggtcataacaagtttcctgtaaattttctatacatagatgtggtaatatctgacttatttcctagctttgttagactagatactacagaaactaatatagttaatagtgtactacaaacaggcgatggtaaaaagactcttcgtcttcccaaaatgttagagacggaaatagttgtcaagattctctatcgccctaatataccattaaaaattgttagatttttccgcaataacatggtaactggagtagagatagccgatagatctgttatttcagtcgctgattaatcaattagtagagatgagataagaacattataataatcaataatatatcttatatcttatatcttatatcttgtttagaaaaatgctaatattaaaatagctaacgctagtaatccaatcggaagccatttgatatctataatagggtatctaatttcctgatttaaatagcggacagctatattctcggtagctactcgtttggaatcacaaacattatttacatctaatttactatctgtaatggaaacgtttcccaatgaaatggtacaatccgatacattgcattttgttatatttttttttaaagaggctggtaacaacgcatcgcttcgtttacatggctcgtaccaacaataatagggtaatcttgtatctattcctatccgtactatgcttttatcaggataaatacatttacatcgtatatcgtctttgttagcatcacagaatgcataaatttgttcgtccgtcatgataaaaatttaaagtgtaaatataactattatttttatagttgtaataaaaagggaaatttgattgtatactttcggttctttaaaagaaactgacttgataaaaatggctgtaatctctaaggttacgtatagtctatatgatcaaaaagagattaatgctacagatattatcattagtcatgttaaaaatgacgacgatatcggtaccgttaaagatggtagactaggtgctatggatggggcattatgtaagacttgtgggaaaacggaattggaatgtttcggtcactggggtaaagtaagtatttataaaactcatatagttaagcctgaatttatttcagaaattattcgtttactgaatcatatatgtattcactgcggattattgcgttcacgagaaccgtattccgacgatattaacctaaaagagttatcgggacacgctcttaggagattaaaggataaaatattatccaagaaaaagtcatgttggaacagcgaatgtatgcaaccgtatcaaaaaattactttttcaaagaaaaaggtttgtttcgtcaacaagttggatgatattaacgttcctaattctctcatctatcaaaagttaatttctattcatgaaaagttttggccattattagaaattcatcaatatccagctaacttattttatacagactactttcccatccctccgctgattattagaccggctattagtttttggatagatagtatacccaaagagaccaatgaattaacttacttattaggtatgatcgttaagaattgtaacttgaatgctgatgaacaggttatccagaaggcggtaatagaatacgatgatattaaaattatttctaataacacttccagtatcaatttatcatatattacatccggcaaaaataatatgattagaagttatattgtcgcccgacgaaaagatcagaccgctagatctgtaattggtcccagtacatctatcaccgttaatgaggtaggaatgcccgcatatattagaaatacacttacagaaaagatatttgttaatgcctttacagtggataaagttaaacaactattagcgtcaaaccaagttaaattttactttaataaacgattaaaccaattaacaagaatacgccaaggaaagtttattaaaaataaaatacatttattgcctggtgattgggtagaagtagctgttcaagaatatacaagtattatttttggaagacagccgtctctacatagatacaacgtcatcgcttcatctatcagagctaccgaaggagatactatcaaaatatctcccggaattgccaactctcaaaatgctgatttcgacggagatgaagaatggatgatattggagcaaaatcctaaagccgtaattgaacaaagtattcttatgtatccgacgacgttactcaaacacgatattcatggagcccccgtttatggatctattcaagatgaaatcgtagcagcgtattcattgtttagaatacaagatctttgtttagatgaagtattgaacatcttggggaaatatggaagaaagttcgatcctaaaggtaaatgtaaattcagcggtaaagatatctatacttacttgataggtgaaaagattaattatccgggtctcttaaaggatggtgaaattattgcaaacgacgtagatagtaattttgttgtggctatgaggcatctgtcattggctggactcttatccgatcataagtcgaacgtggaaggtatcaactttattatcaagtcatcttatgtttttaagagatatctatctatttacggttttggggtgacattcaaagatctgagaccaaattcgacgttcactaataaattggaggccatcaacgtagaaaaaatagaacttatcaaagaagcatacgccaaatatctcaacgatgtaagagacgggaaaatagttccattatctaaagctttagaggcggactatgtggaatccatgttatccaacttgacaaatcttaatatccgagagatagaagaacatatgagacaaacgctgatagatgatccagataataacctcctgaaaatggccaaagcgggttataaagtaaatcccacagaactaatgtatattctaggtacttatggacaacagaggattgatggtgaaccagcagagactcgagtattgggtagagtcttaccttactatcttccagactctaaggatccagaaggaagaggttatattcttaattctttaacaaaaggattaacaggttctcaatattacttttcgatgctggttgccagatctcaatctactgatatcgtctgtgaaacatcacgtaccggaacactggctagaaaaatcattaaaaagatggaggatatggtggtcgacggatacggacaagtagttataggtaatacgctcatcaagtacgccgccaattataccaaaattctaggctcagtatgtaaacctgtagatcttatctatccagatgagtccatgacttggtatttggaaattagtgctctgtggaataaaataaaacagggattcgtttactctcagaaacagaaacttgcaaaaaagacattggcgccgtttaatttcctagtattcgtcaaacccaccactgaggataatgctattaaggttaaggatctgtacgatatgattcataacgtcattgatgatgtgagagagaaatacttctttacggtatctaatatagattttatggagtatatattcttgacgcatcttaatccttctagaattagaattacaaaagaaacggctatcactatctttgaaaagttctatgaaaaactcaattatactctaggtggtggaactcctattggaattatttctgcacaggtattgtctgagaagtttacacaacaagccctgtccagttttcacactactgaaaaaagtggtgccgtcaaacaaaaacttggtttcaacgagtttaataacctgactaatttgagtaagaataagaccgaaattatcactctggtatccgatgatatctctaaacttcaatctgttaagattaatttcgaatttgtatgtttgggagaattaaatccaaacatcactcttcgaaaagaaacagataggtatgtagtagatataatagtcaatagattatacatcaagagagcagaaattaccgaattagtcgtcgaatatatgattgaacgatttatctcctttagcgtcattgtaaaggaatggggtatggagacattcattgaggacgaggataatattagatttactgtctacctaaatttcgttgaaccggaagaattgaatcttagtaagtttatgatggttcttccgggtgccgccaacaagggcaagattagtaaattcaagattcctatctctgactatacgggatatgacgacttcaatcaaacaaaaaagctcaataagatgactgtagaactcatgaatctaaaagaattgggttctttcgatttggaaaacgtcaacgtgtatcctggagtatggaatacatacgatatcttcggtatcgaggccgctcgtgaatacttgtgcgaagccatgttaaacacctatggagaagggttcgattatctgtatcagccttgtgatcttctcgctagtttactatgtgctagttacgaaccagaatcagtgaataaattcaagttcggcgcagctagtactcttaagagagctacgttcggagacaataaagcattgttaaacgcggctcttcataaaaagtcagaacctattaacgataatagtagctgccacttttttagcaaggtccctaatataggaactggatattacaaatactttatcgacttgggtcttctcatgagaatggaaaggaaactatctgataagatatcttctcaaaagatcaaggaaatggaagaaacagaagacttttaattcttatcaataacatatttttctatgatctgtcttttaaacgatggattttccacaaatgcgcctctcaagtccctcatagaatgatacacgtataaaaaatatagcataggcgatgactccttatttttagacattagatatgccaaaatcatagccccgcttctatttactcccgcagcacaatgaaccaacacgggctcgtttcgttgatcacatttagataaaaaggcggtcacgtcgtcaaaatatttactaatatcggtagttgtatcatctaccaacggtatatgaataatattaatattagagttaggcaatgtatatttatccatcgtcaaatttaaaacatatttgaacttaacttcagatgatggtgcatccatagcatttttataatttcccaaatacacattattggttacccttgtcattatagtgggagatttggctttgtgcatatctccagttgaacgtagtagtaagtatttatacaaacttttcttatccatttataacgtacaaatggataaaactactttatcggtaaacgcgtgtaatttagaatacgttagagaaaaggctatagtaggcgtacaagcagccaaaacatcaacacttatattctttgttattatattggcaattagtgcgctattactctggtttcagacgtctgataatccagtctttaatgaattaacgagatatatgcgaattaaaaatacggttaacgattggaaatcattaacggatagcaaaacaaaattagaaagtgatagaggtaaacttctagccgctggtaaggatgatatattcgaattcaaatgtgtggatttcggcgcctattttatagctatgcgattggataagaaaacatatctgccgcaagctattaggcgaggtactggagacgcgtggatggttaaaaaggcggcaaaggtcgatccatctgctcaacaattttgtcagtatttgataaaacacaagtctaataatgttattacttgtggtaatgagatgttaaatgaattaggttatagcggttattttatgtcaccgcattggtgttccgattttagtaatatggaatagtgttagataaatgcggtaacaaatgttcctgtaaggaaccataacagcttagatttaacgttaaagatgagcataaacataataaacaaaattacaatcaaacctataacattaatatcaaacaatccaaaaaatgaaatcagtggagtagtaaacgcgtacataactcctggataacgtttagcagctgccgttcctattctagaccaaaaattcggtttcatgttttcgaagcggtgttctgcaacaagtcggggatcgtgttctacatatttggcggcattatccagtatctgcctattgatcttcatttcgttttcgattctggctatttcaaaataaaatcccgatgatagacctccagactttataatttcatctacgatgttcagcgccgtagtaactctaataatataggctgataagctaacatcataccctcctgtatatgtgaatatggtatgatttttgtccattacaagctcggttttaactttattgcctgtaataatttctctcatctgtaggatatctatttttttgtcatgcattgccttcaagacgggacgaagaaacgtaatatcctcaataacgttatcgttttctacaataactacatattctacctttttattttctaactcggtaaaaaaattagaatcccatagggctaaatgtctagcgatatttcttttcgtttcctctgtacacatagtgttacaaaaccctgaaaagaagtgagtatacttgtcatcatttctaatgtttcctccagtccactgtataaacgcataatccttgtaatgatctggatcatccttgactaccacaacatttcttttttctggcataacttcgttgtcctttacatcatcgaacttctgatcattaatatgctcatgaacattaggaaatgtttctgatggaggtctatcaataactggcacaacaataacaggagttttcaccgccgccatttagttattgaaattaatcatatacaactctttaatacgagttatattttcgtctatccattgtttcacatttacatatttcgacaaaaagatataaaatgcgtattccaatgcttctctgtttaatgaattactaaaatatacaaacacgtcactgtctggcaataaatgatatcttagaatattgtaacaatttattttgtattgcacatgttcgtgatctatgagttcttcttcgaatggcataggatctccgaatctgaaaacgtataaataggagttagaataataatatttgagagtattggtaatatataaactctttagcggtataattagtttttttctctcaatttctatttttagatgtgatggaaaaatgactaattttgtagcattagtatcatgaactctaatcaaaatcttaatatcttcgtcacacgttagctctttgaagtttttaagagatgcatcagttggttctacagatggagtaggtgcaacaattttttgttctacacatgtatgtactggagccattgttttaactataatggtgcttgtatcgaaaaactttaatgcagatagcggaagctcttcgccgcgactttctacatcgtaattgggttctaacgccgatctctgaatggatactagttttctaagttctaatgtgattctctgaaaatgtaaatccaattcctccggcattatagatgtgtatacatcggtaaataaaactatagtatccaacgatcccttctcgcaaattctagtcttaaccaaaaaatcgtatataaccacggagatggcgtatttaagagtggattcttctaccgttttgttcttggatgtcatataggaaactataaagtccgcactactgttaagaatgattactaacgcaactatatagttcaaattaagcattttggaaacataaaataactctgtagacgatacttgactttcgaataagtttgcagacaaacgaagaaagaacagacctctcttaatttcagaagaaaactttttttcgtattcctgacgtctagagtttatatcaataagaaagttaagaattagtcggttaatgttgtatttcattacccaagtttgagatttcataatattatcaaaagacatgataatattaaagataaagcgctgactatgaacgaaatagctatatggttcgctcaaaaatatagtcttgttaaacgtggaaacgataactgtatttttaatcacgtcagcggcatctaaattaaatataggtatatttattccacacactctacaatatgccacaccatcttcataataaataaattcgttagcaaaattattaattttagtgaaatagttagcgtcaactttcatagcttccttcaatctaatttgatgctcacacggtgcgaattctactctaacatcccttttccatgcctcaggttcatcgatctctataatatctagttttttgcgtttcacaaacacaggctcgtctctcgcgatgagatctgtatagtaactatgtaaatgataactagatagaaagatgtagctatatagatgacgatcctttaagagaggtataataactttaccccaatcagatagactgttgttatggtcttcggaaaaagaatttttataaatttttccagtattttccaaatatacgtacttaacatctaaaaaatccttaatgataataggaatggataatccgtctattttataaagaaatacatatcgcacattatacttttttttggaaatgggaataccgatgtgtctacataaatatgcaaagtctaaatattttttagagaatcttagttggtccaaattcttttccaagtacggtaatagatttttcatattgaacggtatcttcttaatctctggttctagttccgcattaaatgatgaaactaagtcactatttttataactaacgattacatcacctctaacatcatcatttaccagaatactgatcttcttttgtcgtaaatacatgtctaatgtgttaaaaaaaagatcatacaagttatacgtcatttcatctgtggtattcttgtcattgaaggataaactcgtactaatctcttctttaacagcctgttcaaatttatatcctatatacgaaaaaatagcaaccagtgtttgatcatccgcgtcaatattctgttctatcgtagtgtataacaatcgtatatcttcttctgtgatagtcgatacgttataaaggttgataacgaaaatatttttatttcgtgaaataaagtcatcgtaggattttggacttatattcgcgtctagtagatatgcttttatttttggaatgatctcaattagaatagtctctttagagtccatttaaagttacaaacaactaggaaattggtttatgatgtataatttttttagtttttatagattctttattctatacttaaaaaatgaaaataaatacaaaggttcttgagggttgtgttaaattgaaagcgagaaataatcataaattatttcattatcgcgatatccgttaagtttgtatcgtaatggcgtggtcaattacaaataaagcggatactagtagcttcacaaagatggctgaaatcagagctcatctaaaaaatagcgctgaaaataaagataaaaacgaggatattttcccggaagatgtaataattccatctactaagcccaaaaccaaacgagccactactcctcgtaaaccagcggctactaaaagatcaaccaaaaaggaggaagtggaagaagaagtagttatagaggaatatcatcaaacaactgaaaaaaattctccatctcctggagtcggcgacattgtagaaagcgtggctgctgtagagctcgatgatagcgacggggatgatgaacctatggtacaagttgaagctggtaaagtaaatcatagtgctagaagcgatctttctgacctaaaggtggctaccgacaatatcgttaaagatcttaagaaaattattactagaatctctgcagtatcgacggttctagaggatgttcaagcagctggtatctctagacaatttacttctatgactaaagctattacaacactatctgatctagtcaccgagggaaaatctaaagttgttcgtaaaaaagttaaaacttgtaagaagtaaatgcgtgcacttttttataaagatggtaaactctttaccgataataattttttaaatcctgtatcagacgataatccagcgtatgaggttttgcaacatgttaaaattcctactcatttaacagatgtagtagtatatgaacaaacgtgggaagaggcattaactagattaatttttgtgggaagcgattcaaaaggacgtagacaatacttttacggaaaaatgcatgtacagaatcgcaacgctaaaagagatcgtatttttgttagagtatataacgttatgaaacgaattaattgttttataaacaaaaatataaagaaatcgtccacagattccaattatcagttggcggtttttatgttaatggaaactatgttttttattagatttggtaaaatgaaatatcttaaggagaatgaaacagtagggttattaacactaaaaaataaacacatagaaataagtcccgatgaaatagttatcaagtttgtaggaaaggacaaagtttcacatgaatttgttgttcataagtctaatagactatataaaccgctattgaaactgacggatgattctagtcccgaagaatttctgttcaacaaactaagtgaacgaaaggtatacgaatgtatcaaacagtttggtattagaatcaaggatctccgaacgtatggagtcaattatacgtttttatataatttttggacaaatgtaaagtccatatctcctcttccgtcaccaaaaaagttaatagcgttaactatcaaacaaactgctgaagtggtaggtcatactccatcaatttcaaaaagagcttacatggcaacgactattttagaaatggtaaaggataaaaattttttagatgtagtatctaaaactacgttcgatgaattcctatctatagtcgtagatcacgttaaatcatctacggatggatgatatagatctttacacaaataattacaagaccgataaatggaaatggataagcgtataaaatctctcgcaatgacagctttcttcggagagctaaacacattagatattatggcattgataatgtctatatttaaacgccatccaaacaataccattttttcagtggataaggatggtcagtttatgattgatttcgaatacgataattataaggcttctcaatatttggatctgaccctcactccgatatctggagatgaatgcaagactcacgcatcgagtatagccgaacaattggcgtgtgcggatattattaaagaggatattagcgaatatatcaaaactactccccgtcttaaacgatttataaaaaaataccgcaatagatcagatactcgcatcagtcgagatacagaaaagcttaaaatagctctagctaaaggcatagattacgaatatataaaagacgcttgttaataagtaaatgaaaaaaaactagtcgtttataataaaacacgatatggatgccaacgtagtatcatcttctactattgcaacgtatatagacgctttagcgaagaatgcttcagaattagaacagaggtctaccgcatacgaaataaataatgaattggaactagtatttattaagccgccattaattactttgacaaatgtagtgaatatctctacgattcaggaatcgtttattcgatttaccgttactaataaggaaggtgttaaaattagaactaagattccattatctaaggtacatggtctagatgtaaaaaatgtacagttagtagatgctatagataacatagtttgggaaaagaaatcattagtgacggaaaatcgtcttcacaaagaatgcttgttgagactatcgacagaggaacgtcatatatttttggattacaagaaatatggatcctctatccgactagaattagtcaatcttattcaagcaaaaacaaaaaactttacgatagactttaagctaaaatattttctaggatccggtgcccagtctaaaagttctttattacacgctattaatcatccaaagtcaaggcctaatacatctctggaaatagaattcacacctagagacaatgaaaaagttccatatgatgaactaataaaggaattgacgactctatcacgtcatatatttatggcttctccagagaatgtaattctttctccgcctattaacgcacctataaagacttttatgttgcctaaacaagatatagtaggtctggatctggaaaatctatacgctgtaactaagactgacggcattcctataactatcagagttacatcaaacgggttgtattgttattttacacatcttggttatattattagatatcctgttaagagaataatagattccgaagtagtagtctttggtgaggcagttaaggataagaactggaccgtatatctcattaagctaatagagcctgtgaatgcaatcaatgatagactagaagaaagtaagtatgttgaatctaaactagtggatatttgtgatcggatagtattcaagtcaaagaaatacgaaggtccgtttactacaactagtgaagtcgtcgatatgttatctacatatttaccaaagcaaccagaaggtgttattctgttctattcaaagggacctaaatctaacattgattttaaaattaaaaaggaaaatactatagaccaaactgcaaatgtagtatttaggtacatgtccagtgaaccaattatctttggagaatcgtctatctttgtagagtataagaaatttagcaacgataaaggctttcctaaagaatatggttctggtaagattgtgttatataacggcgttaattatctaaataatatctattgtttggaatatattaatacacataatgaagtgggtattaagtccgtggttgtacctattaagtttatagcagaattcttagttaatggagaaatacttaaacctagaatcgataaaaccatgaaatatattaactcagaagattattatggaaatcaacataatatcatagtcgaacatttaagagatcaaagcatcaaaataggagatatctttaacgaggataaactatcggatgtgggacatcaatacgccaataatgataaatttagattaaatccagaagttagttattttacgaataaacgaactagaggaccgttgggaattttatcaaactacgtcaagactcttcttatttctatgtattgttccaaaacatttttagacgattccaacaaacgaaaggtattggcgattgattttggaaacggtgctgacctggaaaaatacttttatggagagattgcgttattggtagcgacggatccggatgctgatgctatagctagaggaaatgaaagatacaacaaattaaactctggaattaaaaccaagtactacaaatttgactacattcaggaaactattcgatccgatacatttgtctctagtgtcagagaagtattctattttggaaagtttaatatcatcgactggcagtttgctatccattattcttttcatccgagacattatgctaccgtcatgaataacttatccgaactaactgcttctggaggcaaggtattaatcactaccatggacggagacaaattatcaaaattaacagataaaaagacttttataattcataagaatttacctagtagcgaaaactatatgtctgtagaaaaaatagctgatgatagaatagtggtatataatccatcaacaatgtctactccaatgactgaatacattatcaaaaagaacgatatagtcagagtgtttaacgaatacggatttgttcttgtagataacgttgatttcgctacaattatagaacgaagtaaaaagtttattaatggcgcatctacaatggaagatagaccgtctacaaaaaactttttcgaactaaatagaggagccattaaatgtgaaggtttagatgtcgaagacttacttagttactatgttgtttatgtcttttctaagcggtaaataataatatggtatgggttctgatatccccgttctaaatgcattaaataattccaatagagcgatttttgttcctataggaccttccaactgtggatactctgtattgttaatagatatattaatacttttgtcgggtaacagaggttctacgtcttctaaaaataaaagtttgataacatctggcctgttcataaataaaaacttggcgattctatatatactcttattatcaaatctagccattgtcttatagatgtgagctactgtaggtgtaccatttgattttctttctaatactatatatttctctcgaagaagttcttgcacatcatctgggaataaaatactactgttgagtaaatcagttattttttttatatcgatattgatggacatttttatagttaaggataataagtatcccaaagtcgataacgacgataacgaagtatttatacttttaggaaatcacaatgactttatcagattaaaattaacaaaattaaaggagcatgtatttttttctgaatatattgtgactccagatacatatggatctttatgcgtcgaattaaatgggtctagttttcagcacggtggtagatatatagaggtggaggaatttatagatgctggaagacaagttagatggtgttctacatccaatcatatatctgaagatatacccgaagatatacacactgataaatttgtcatttatgatatatacacttttgacgctttcaagaataaacgattggtattcgtacaggtacctccgtcgttaggagatgatagtcatttgactaatccgttattgtctccgtattatcgtaattcagtagccagacaaatggtcaatgatatgatttttaatcaagattcatttttaaaatatttattagaacatctgattagaagccactatagagtttctaaacatataacaatagttagatacaaggataccgaagaattaaatctaacgagaatatgttataatagagataagtttaaggcgtttgtattcgcttggtttaacggcgtttcggaaaatgaaaaggtactagatacgtataaaaaggtatctaatttgatataatgaattcagtgactgtatcacacgcgccatatactattacttatcacgatgattgggaaccagttatgagtcaattggtagagttttataacgaagtagccagttggctgctacgagacgagacgtcgcctattcctgataagttctttatacagttgaaacaaccgcttagaaataaacgagtatgtgtgtgtggtatagatccgtatccgaaagatggaactggtgtaccgttcgaatcaccaaattttacaaaaaaatcaattaaggagatagcttcatctatatctagattaaccggagtaattgattataaaggttataaccttaatataatagacggggttataccctggaattattacttaagttgtaaattaggagaaacaaaaagtcacgcgatctactgggataagatttccaagttactgctgcagcatataactaaacacgttagtgttctttattgtttgggtaaaacagatttctcgaatatacgggcaaagttagaatccccggtaactaccatagtgggatatcatccagcggctagagaccgccaattcgagaaagatagatcatttgaaattatcaacgttttactggaattagacaacaaggtacctataaattgggctcaagggtttatttattaatgctttagtgaaattttaacttgtgttctaaatggatgcggctattagaggtaatgatgttatctttgtccttaagactataggtgtcccatcagcatgtagacaaaatgaagatccaagattcgtagaagcatttaaatgcgacgagttaaaaagatatattgataataatccagaatgtacactattcgaaagtcttagggatgaggaagcatactctatagtcagaattttcatggatgtagatttagacgcgtgtctagacgaaatagattatttaacggctattcaagattttattatcgaggtgtcaaactgtgtagctagattcgcgtttacagaatgcggtgccattcatgaaaatgtaataaaatccatgagatctaatttttcattgactaagtctacaaatagagataaaacaagttttcatattatctttttagacacgtataccactatggatacattgatagctatgaaacgaacactattagaattaagtagatcatctgaaaatccactaacaagatcgatagacactgccgtatataggagaaaaacaactcttcgggttgtaggtactaggaaaaatccaaattgcgacactattcatgtaatgcaaccaccgcatgataatatagaagattacctattcacttacgtggatatgaacaacaatagttattacttttctctacaacgacgattggaggatttagttcctgataagttatgggaaccagggtttatttcattcgaagacgctataaaaagagtttcaaaaatattcattaattctataataaactttaatgatctcgatgaaaataattttacaacggtaccactggtcatagattacgtaacaccttgtgcattatgtaaaaaacgatcgcataaacatccgcatcaactatcgttggaaaatggtgctattagaatttacaaaactggtaatccacatagttgtaaagttaaaattgttccgttggatggtaataaactgtttaatattgcacaaagaattttagacactaactctgttttattaaccgaacgaggagactatatagtttggattaataattcatggaaatttaacagcgaagaacccttgataacaaaactaattctgtcaataagacatcaactacctaaggaatattcaagcgaattactctgtccgaggaaacgaaagactgtagaagctaacatacgagacatgttagtagattcagtagagaccgatacctatccggataaacttccgtttaaaaatggtgtattggacctggtagacggaatgttttactctggagatgatgctaaaaaatatacgtgtactgtatcaaccggatttaaatttgacgatacaaagttcgtcgaagacagtccagaaatggaagagttaatgaatatcattaacgatatccaaccattaacggatgaaaataagaaaaatagagagctatatgaaaaaacattatctagttgtttatgtggtgctaccaaaggatgtttaacattcttttttggagaaactgcaactggaaagtcgacaaccaaacgtttgttaaagtctgctatcggtgacctgtttgttgagacgggtcaaacaattttaacagatgtattggataaaggacctaatccatttatcgctaacatgcatttgaaaagatctgtattctgtagcgaactacctgattttgcctgtagtggatcaaagaaaattagatctgataatattaaaaagttgacagaaccttgtgtcattggaagaccgtgtttctccaataaaattaataatagaaaccatgctacaatcattatcgatactaattacaaacctgtctttgataggatagataacgcattaatgagaagaattgccgtcgtgcgattcagaacacacttttctcaaccttctggtagagaggctgctgaaaataatgacgcgtacgataaagtcaaactattagacgaggggttagatggtaaaatacaaaataatagatatagatttgcatttctatacttgttggtgaaatggtacaaaaaatatcatgttcctattatgaaactatatcctacacccgaagagattcctgactttgcattctatctcaaaataggtactctgttagtatctagctctgtaaagcatattccattaatgacggacctctccaaaaagggatatatattgtacgataatgtggttactcttccgttgactactttccaacagaaaatatccaagtattttaattctagactatttggacacgatatagagagcttcatcaatagacataagaaatttgccaatgttagtgatgaatatctgcaatatatattcatagaggatatttcatctccgtaaatatatgctcatatatttatagaagatatcacatatctaaatgaataccggaattatagatttatttgataatcatgttgatagtataccaactatattacctcatcagttagctactctagattatctagttagaactatcatagatgagaacagaagcgtgttattgttccatattatgggatcaggtaaaacaataatcgctttgttgttcgccttggtagcttccagatttaaaaaggtttacattctagtgccgaacatcaacatcttaaaaattttcaattataatatgggtgtagctatgaacttgtttaatgacgaattcatagctgagaatatctttattcattccacaacaagtttttattctcttaattataacgataacgtcattaattataacggattatctcgctacaataactctatttttatcgttgatgaggcacataatatctttgggaataatactggagaacttatgaccgtgataaaaaataaaaacaagattccttttctactattgtctggatctcccattactaacacacctaatactctgggtcatattatagatttaatgtccgaagagacgatagattttggtgaaattattagtcgtggtaagaaagtaattcagacacttcttaacgaacgaggtgtgaatgtacttaaggatttgcttaaaggaagaatatcatattacgaaatgcctgataaagatctaccaacgataagatatcacggacgtaagtttctagatactagagtagtatattgtcacatgtctaaacttcaagagagagattatatgattactagacgacagctatgttatcatgaaatgtttgataaaaatatgtataacgtgtcaacggcagtattgggacaacttaatctgatgaataatttagatactttatttcaggaacaggataaggaattgtacccaaatctgaaaataaataatggcgtgttatacggagaagaattggtaacgttaaacattagttccaaatttaagtactttatcaatcggatacagacactcaacggaaaacattttatatacttttctaattctacatatggtggattggtaattaaatatatcatgctcagtaatggatattctgaatataatggttctcagggaactaatccacatatgataaacggcaaaccaaaaacatttgctatcgttactagtaaaatgaaatcgtctttagaggatctattagatgtgtataattctcctgaaaacgatgatggtagtcaattgatgtttttgttttcatcaaacattatgtccgaatcctatactctgaaagaggtaaggcatatttggtttatgactatcccagatactttttctcaatacaaccaaattcttggacgatctattagaaaattctcttacgccgatatttctgaaccagttaatgtatatcttttagccgccgtatattccgatttcaatgacgaagtaacgtcattaaacgattacacacaggatgaattaattaatgttttaccatttgacatcaaaaagctgttgtatctaaaatttaagacgaaagaaacgaatagaatatactctattcttcaagagatgtctgaaacgtattctcttccaccacatccatcaattgtaaaagttttattgggagaattggtcagacaatttttttataataattctcgtattaagtataacgactccaagttacttaaaatggttacatcagttataaaaaataaagaagacgctaggaattacatagatgatattgtaaacggtcacttctttgtatcgaataaagtatttgataaatctcttttatacaaatacgaaaacgatattattacagtaccgtttagactttcctacgaaccatttgtttggggagttaactttcgtaaagaatataacgtggtatcttctccataaaactgatgagatatataaagaaataaatgtcgagctttgttaccaatggatacctttccgttacattggaacctcatgagctgacgttagacataaaaactaatattaggaatgccgtatataagacgtatctccatagagaaattagtggtaaaatggccaagaaaatagaaattcgtgaagacgtggaattacctctcggcgaaatagttaataattctgtagttataaacgttccgtgtgtaataacctacgcgtattatcacgttggggatatagtcagaggaacattaaacatcgaagatgaatcaaatgtaactattcaatgtggagatttaatctgtaaactaagtagagattcgggtactgtatcatttagcgattcaaagtactgcttttttcgaaatggtaatgcgtatgacaatggcagcgaagtcactgccgttctaatggaggctcaacaaggtatcgaatctagttttgtttttctcgcgaatatcgtcgactcataagaaagagaatagcggtaagtataaacacgaatactatggcaataattgcgaatgttttattcccttcgatatatttttgataatatgaaaaacatgtctctctcaaatcggacaaccatctcataaaatagttctcgcgcgctggagaggtagttgctgctcgtataatctccccagaataatatacttgcgtgtcgtcgttcaatttatacggatttctatagttctctgttatataatacggttttccatcatgattagacgacgacaatagtgttctaaatttagatagttgatcagaatgaatgtttattggcgttggaaaaattatccatacagcgtctgcagagtgcttgatagttgttcctagatatgtaaaataatccaacgtactaggtagcaaattgtctagataaaatactgaatcaaacggcgcagacgtattagcggatctaatggaatccaattgattgactatcttttgaaaatatacatttttatgatccgatacttgtaagaatatagaaataatgataagtccatcatcgtgtttttttgcctcttcataagaactatattttttcttattccaatgaacaagattaatctctccagagtatttgtacacatctatcaagtgattggatccataatcgtcttcctttccccaatatatatgtagtgatgataacacatattcattggggagaaaccctccacttatatatcctcctttaaaattaatccttactagttttccagtgttctggatagtggttggtttcgactcattataatgtatgtctaacggcttcaatcgcgcgttagaaattgcttttttagtttctatattaataggagatagttgttgcggcatagtaaaaatgaaatgataactgtttaaaaatagctcttagtatgggaattacaatggatgaggaagtgatatttgaaactcctagagaattaatatctattaaacgaataaaagatattccaagatcaaaagacacgcatgtgtttgctgcgtgtataacaagtgacggatatccgttaataggagctagaagaacttcattcgcgttccaggcgatattatctcaacaaaattcagattctatctttagagtatccactaaactattacggtttatgtactacaatgaactaagagaaatctttagacggttgagaaaaggttctatcaacaatatcgatcctcacttcgaagagttaatattattgggtggtaaactagataaaaaggaatctattaaagattgtttaagaagagaattaaaagaggaaagtgatgaacgtataacagtaaaagaatttggaaatgtaattctaaaacttacaacacgggataaattatttaataaagtatatataagttattgcatggcgtgttttattaatcaatcgttggaggatttatcgcatactagtatttacaatgtagaaattagaaagattaaatcattaaatgattgtattaacgacgataaatacgaatatctgtcttatatttataatatgctagttaatagtaaatgaacttttacagatctagtataattagtcagattattaagtataatagacgactagctaagtctattatttgcgaggatgactctcaaattattacactcacggcattcgttaaccaatgcctatggtgtcataaacgagtatccgtgtccgctattttattaactactgataacaaaatattagtatgtaacagacgagatagttttctctattctgaaataattagaactagaaacatgtttagaaagaaacgattatttctgaattattccaattatttgtccaaacaggaaagaagtatactatcgtcatttttttctctatatccagctactgctgataatgatagaatagatgctatttatccgggtggcatacccaaaaggggtgagaatgttccagagtgtttatccagggaaattaaagaagaagttaatatagacaattcttttgtattcatagacactcggttttttattcatggcatcatagaagataccattattaataaattttttgaggtaatcttctttgtcggaagaatatctctaacgagtgatcaaatcattgatacatttaaaagtaatcatgaaatcaaggatctaatatttttagatccgaattcaggtaatggactccaatacgaaattgcaaaatatgctctagatactgcaaaactcaaatgttatggccatagaggatgttattacgaatcattaaaaaaattaactgaggatgattgattagaaaatataaattaatttaccatcgtgtatttttataacgggattgtccggcatatcatgtagatagttaccgtctacatcgtatactcgaccatctacgcctttaaatcctctatttattgacattaatctattagaattggaataccaaatattagtaccctcaattagtttattggtaatattttttttagacgatagatcgatggctcttgaaaccaaggttttccaaccggactcattgtcgatcggtgagaagtctttttcattagcatgaatccattctaatgatgtatgtttaaacactctaaacaattggacaaattcttttgatttgctttgaatgatttcaaataggtcttcgtctacagtaggcataccattagataatctagccattataaagtgcacgtttacatatctacgttctggaggagtaagaacgtgactattgagacgaatggctcttcctactatctgacgaagagacgcctcgttccaagtcatatctagaatgaagatatcattgattgagaagaagctaataccctcgcctccactagaagagaatacgcatgttttaatgcattctccgttagtgtttgattcttggttaaactcagccaccgccttgattctagtatcttttgttctagatgagaactctatattagagataccaaagactttgaaatatagtaataagatttctattcctgactgattaacaaatggttcaaagactagacatttaccatgggatgctaatattcccaaacatacatctataaatttgacgcttttctcttttaattcagtaaatagagagatatcagccgcactagcatcccctttcaatagttctccctttttaaaggtatctaatgcggatttagaaaactctctatttcttaatgaatttttaaaatcattatatagtgttgctatctcttgcgcgtattcgcccggatcacgattttgtctttcaggaaagctatcgaacgtaaacgtagtagccatacgtctcagaattctaaatgatgatatacctgtttttatttcagcgagtttagccttttgataaatttcttcttgctttttcgacatattaacgtatcgcattaatactgttttcttagcgaatgatgcagacccttctacgtcatcaaaaatagaaaactcgttattaactatgtacgaacataggcctcctagtttggagactaattctttctcatcaactagacgtttattctcaaatagcgattggtgttgtaaggatcctggtcgtagtaagttaaccaacatggtgaattcttgcacactattgacgataggtgtagccgataaacaaatcatcttatggttttttaacgcaatggttttagataaaaaattatatactgaacgagtaggacggatcttaccatcttctttgattaatgatttagaaatgaagttatgacattcatcaataatgacgcatattctactcttggaattaatagttttgatattagtaaaaaatttatttctaaaattttgatcatcgtaattaataaaaatacaatccttcgttatctctggagcgtatctgagtatagtgttcatccaaggatcttctatcaaagcctttttcaccaataagataatagcccaattcgtataaatatccttaagatgtttgagaatatatacagtagtcattgttttaccgacacccgtttcatggaacaataaaagagaatgcatactgtctaatcctaagaaaactcttgctacaaaatgttgataatccttgaggcgtactacgtccgaccccatcatttcaacaggcatattagtagttctgcgcaatgcataatcgatataggccgcgtgtgatttactcatttatgagtgataagtaataactatgttttaaaaatcacagcagtagtttaactagtcttctctgatgtttgttttcgatacttttcgaatcagaagtcatactagaataaagcagcgagtgaacgtaatagagagcttcgtatactctattcgaaaactctaagaacttattaatgaattccgtatccactggatcgtttaaaatactaaattgaacactgttcacatccttccaagaagaagacttagtgacggacttaacatgagacataaataaatccaaattttttttacaaacatcactagccaccataatggcgctatctttcaaccagctatcgcttacgcattttagcagtctaacatttttaaagagactacaatatattctcatagtatcgattacacctctaccgaataaagttggaagtttaataatacaatatttttcgtttacaaaatcaaataatggtcgaaacacgtcgaaggttaacatcttataatcgctaatgtatagattgttttcagtgagatgattattagatttaatagcatctcgttcacgtttgaacagtttattgcgtgcgctgaggtcggcaactacggcgtccgctttagtactcctcccataatactttacgctattaatctttaaaatttcatagactttatctagatcgctttctggtaacatgatatcatgtgtaaaaagttttaacatgtcggtcggcattctatttagatcattaactctagaaatctgaagaaagtaattagctccgtattccagactaggtaatgggcttttacctagagacagattaagttctggcaatgtttcataaaatggaagaaggacatgcgttccctcccggatattttttacaatttcatccatttacaactctatagtttgttttcattattattagttattatctcccataatcttggtaatacttaccccttgatcgtaagataccttatacaggtcattacatacaactaccaattgtttttgtacataatagattggatggttgacatccatggtggaataaactactcgaacagatagtttatctttccccctagatacattggccgtaatagttgtcggcctaaagaatatctttggtgtaaagttaaaagttagggttcttgttccattattgctttttgtcagtagttcattataaattctcgagatgggtccgttctctgaatatagaacatcatttccaaatctaacttctagtctagaaataatatcggtcttattcttaaaatctattcccttgatgaagggatcgttaatgaacaaatccttggcctttgattcggctgatctattatctccgttatagacgttacgttgactagtccaaagacttacaggaatagatgtatcgatgatgttgatactatgtgatatgtgagcaaagattgttctcttagtggcatcactatatgttccagtaatggcggaaaactttttagaaatgttatatataaaagaattttttcgtgttccaaacattagcagattagtatgaagataaacactcatattatcaggaacattatcaatttttacatacacatcagcatcttgaatagaaacgataccatcttctggaacctctacgatctcggcagactccggataaccagtcggtgggccatcactaacaataactagatcatccaacaatctactcacatatgcatctatataatctttttcatcttgtgagtaccctggatacgaaataaatttattatccgtatttccataataaggtttagtataaacagagagcgatgttgccgcatgaacttcagttacagtcgccgttggttggtttatttgacctattactctcctaggtttctctataaacgatggtttaatttgtacattcttaaccatatatccaataaagctcaattcaggaacataaacaaattctttgttgaacgtttcaaagtcgaacgaagagtcacgaataacgatatcggatactggattgaaggttaccgttacggtaatttttgaatcggatagtttaagactgctgaatgtatcttccacatcaaacggagttttaatataaacgtatactgtagatggttctttaatagtgtcattaggagttaggccaatagaaatatcattaagttcactagaatatccagagtgtttcaaagcaattgtattattgatacaattattatataattcttcgccctcaatttcccaaataacaccgttacacgaagagatagatacgtgattaatacatttatatccaacatatggtacgtaaccgaatcttcccatacctttaacttctggaagttccaaactcagaaccaaatgattaagcgcagtaatatactgatccctaatttcgaagctagcgatagcctgattgtctggaccatcgtttgtcataactccggatagagaaatatattgcggcatatataaagttggaatttgactatcgactgcgaagacattagaccgtttaatagagtcatccccaccgatcaaagaattaatgatagtattattcattttctatttaaaatggaaaaagcttacaataaactccgtagagaaatatctataatttgtgagttttccttaaagtaacagcttccgtaaacgccgtctttatctcttagtaagtttattgtatttataaccttttccttatcttcatagaatactaaaggcaacaaagaaatttttggttcttctctaagagctacgtgagacttaaccatagaagccaacgaatccctacatattttagaacagaaataccctacttcaccacccttgtatgtctcaatactaataggtctaaaaaccaaatcttgattacaaaaccaacacttatcaattacactatttgtcttaatagacacatctgccatagatttataatactttggtagtatacaagcgagtgcttcttctttagcgggcttaaagactgctttaggtgctgaaataaccacatctggaaggcttactcgcttagccatttaattacggaactatttttttatacttctaatgagcaagtagaaaacctctcatctacaaaaacgtactcgtgtccataatcctctaccatagtaacacgttttttagatctcatatgtgctaaaaagttttcccatactaattggttactattatttttcgtataatttttaacagtttgaggttttagatttttagttacagaagtgatatcgaatattttatccaaaaagaatgagtaattaattgtcttagaaggagtgttttcttggcaaaagaataccaagtgcttaaatatttctactacttcattaatcttttctgtactcagattcagtttctcatcttttacttgattgattatttcaaagactaacttataatcctttttatttattctctcgttagccttaagaaaactagatacaaaatttgcatctacatcatccgtggatatttgatttttttccatgatatccaagagttccgagataatttctccagaacattgatgagacaataatctccgcaatacatttctcaaatgaataagtttattagacacgtggaagtttgactttttttgtacctttgtacatttttgaaataccgactcgcaaaaaatacaatattcatatccttgttcagatactataccgttgtgtctacaaccgctacataatcgtagattcatgttaacactctacgtatctcgtcgtccaatattttatataaaaacattttatttctagacgttgccagaaaatcctgtaatatttttagttttttgggctgtgaataaagtatcgccctaatatggttaccgtcctccgccaatatagtagttaaattatccgcacatgcagaagaacacgcttaggcggattcagtacaatgttatatttttcgtaccaactcatttaaatatcataatctaaaatagttctgtaatatgtctagcgctaatatattgatcataatcctgtgcataaattaagatacaacaatgtctcgaaatcatcgacatggcttcttccatagttagaagatcgtcgtcaaagttagcaacgtgattcatcaacatttgctgttttgaggcagcaaatactgaaccatcgccattcaaccattcataaaaaccatcgtctgaatccattgataatttcttgtactggtttttgagagctcgcatcaatctagcatttctagctcccggattgaaaacagaaagaggatcgtacatccagggtccattttctgtaaatagaatcgtataatgtcccttcaagaagatatcagacgatccacaatcaaagaattggtctccgagtttgtaacaaactgcggactttaacctatacatgataccgtttagcataatttctggtgatacgtcaatcggagtatcatctattagagatctaaagccggtgtaacattctccaccaaacatattcttattctgacgtcgttctacataaaacatcattgctccattaacgataacaggggaatgaacagcactacccatcacattagttcccaatggatcaatgtgtgtaactccagaacatcttccatatcctatgttaggaggagcgaacaccactcttccactattgccatcgaatgccatagaataaatatccttggaattgatagaaatcggactgtcggatgttgtgatcatcttcataggattaacaacgatgtatggtgccgcctgaagtttcatatcgtaactgatgccgtttataggtctagccacagaaaccaacgtaggtctaaatccaactatagacaaaatagaagccaatatctgttcctcatctgtcataacttgagagcatccagtatgaataatcttcattagatggggatctaccgcatcatcatcgttacaataaaaaattcccattctaatgttcataattgcttttctaatcatggtatgcatgtttgctctctgaatctctgtggaaattagatctgatacacctgtaatcactatcggattatcctccgtaagacgattaaccaacaacatataattataagactttacttttctaaattcataaagttgctggattaggctataggtgtctccatgtacatacgcgttctcgagcgcaggaagtttaataccgaatagtgccatcagaataggatgaatatagtaattagtttctggttttctataaataaaagacaaatcttgtgaactagacatatcggtaaaatgcatggattggaatcgtgtagtcgacagaagaatatgatgattagatggagagtatattttatctaactctttgagttggtcaccgattctaggactagctcgagaatgaataagtactaaaggatgagtacatttcacagaaacactagcattgttcaatgtgctctttacatgggtaaggagttgaaatagctcgtttctatttgttctgacaatatttagtttattcataatgttaagcatatcctgaatagtaaagttagatgtgtcatacttgttagtagttagatatttagcaattgcattcccatcatttctcaatctcgtactccaatcatgtgtagatgctacttcatctatagaaaccatacaatcctttttgataggctgttgagattgattatttcctgcacgtttaggtttggtacgttgatttctagcccctgcggatataaagtcatcgtctacaatttgggacaatgaattgcatacactacaagacaaagatttatcagaagtgtgaatatgatcttcatctaccaaagaaagagtttgattagtataactagattttagtcctgcgttagatgttaaaaaaacatcgctattgaccacggcttccattatttatattcgtagtttttactcgaaagcgtgattttaatatccaatcttattacttttggaatcgttcaaaacctttgactagttgtagaatttgatctattgccctacgcgtatactcccttgcatcatatacgttcgtcaccagatcgtttgtttcggcctgaagttggtgcatatctttttcaacactcgacatgagatccttaagggccatatcgtctagattttgttgagatgctgctcctggatttggattttgttgtgctgttgtacatactgtaccaccagtaggtgtaggagtacatacagtggccacaataggaggttgaggaggtgtaaccgttggagtagtacaagaaatatttccatccgattgttgtgtacatgtagttgttggtaacgtctgagaaggttgggtagatggcggcgtcgtcgttttttgatctttattaaatttagagataatatcctgaacagcattgctcggcgtcaacgctggaaggagtgaactcgccggcgcatcagtatcttcagacagccaatcaaaaagattagacatatcagatgatgtattagtttgttgtcgtggttttggtgtaggagcagtactactaggtagaagaataggagccggtgtagctgttggaaccggctgtggagttatatgaatagttggttgtagcggttggataggctgtctgctggcggccatcatattatctctagctagttgttctcgcaactgtctttgataatacgactcttgagactttagtcctatttcaatcgcttcatcctttttcgtatccggatccttttcttcagaataatagattgacgactttggtgtagaggattctgccagcccctgtgagaacttgttaaagaagtccatttaaggctttaaaattgaattgcgattataagattaaatggcagacacagacgatattatcgactatgaatccgatgatctcactgaatacgaggatgatgaagaagaggaagaagatggagagtcactagaaactagtgatatagatcccaaatcttcttataagattgtagaatcagcatccactcatatagaagatgcgcattccaatcttaaacatatagggaatcatatatctgctcttaaacgacgctatactagacgtataagtctatttgaaatagcgggtataatagcagaaagctataacttgcttcaacgaggaagattacctctagtttcagaattttctgacgaaacgatgaagcaaaatatgctacatgtaattatacaagagatagaggagggttcttgtcctatagtcatcgaaaagaacggagaattgttgtcggtaaacgattttgacaaagatggtctaaaattccatctagactatattatcaaaatttggaaacttcaaaaacgatattagaatttatacgaatatcgttctctaaatgtcacaatcaagtctcgcatgttcagcaatttattgtcgtactttatatcgtgttcattaacgatatcttgcaaaatagtaatgattctatcttccttcgatagatattcttcagagattattgtcttatattctttcttgttatcagatatgaatttgataagactttgaacattattgatacccgtctgtttaattttttctacagatattttagttttggcagattctatcgtatctgtcaatagacatccaacatcgacattcgacgtcaattgtctataaatcaacgtataaattttagaaataacattagcgaattgttgtgcattgatgtcgttattctgaaacagtatgattttaggtagcattttcttaacaaagagaacgtatttattgttactcagttgaacagatgatatatccagattactaacgcatctgattccgtataccaaactttcagaagaaatggtatacaattgtttgtattcattcaatgtctctttttcagaaattagtttagagtcgaatactgcaataattttcaagagatagttttcatcagataagattttatttagtgtagatatgataaaactattgttttgttggagaacttgatacgccgcgttctctgtagtcgacgctctcaaatgggaaacaatctccattatttttttggaatcggatacaatatcttcggtatcttgacgcagtctagtatacatagagttaagagagattagagtttgtacattaagcaacatgtctctaaatgtggctacaaacttttccttttccacatcatctagtttattatataccgatttcacaacggcaccagatttaaggaaccagaatgaaaaactctgataactacaatatttcatcatagttacgattttatcatcttctatagttggtgtgatagcgcatacctttttctccaagactggaaccaacgtcataaaaatgtttaaatcaaaatccatatcaacatctgatgcgctaagaccagtctcgcgttcaagattatctttactaatggtgacgaactcatcgtataaaactctaagtttgtccattatttatttacagatttagttgtttaatttatttgtgctcttccagagttgggatagtatttttctaacgtcggtattatattattaggatctacgttcatatgtatcataatattaatcatccacgttttgataaatctatctttagcttctgaaataacgtatttaaacaaaggagaaaaatatttagctacggcatcagacgcaataacattttttgtaaatgtaacatatttagacgacagatcttcgttaaaaagttttccatctatgtagaatccatcagttgttaacaccattcccgcgtcagattgaataggagtttgaatagtttgttttggaaatagatccttcaataacttatagttgggtgggaaaaaatcgattttatcactagactctttcttttttactatcattacctcatgaactatttcttgaatgagtatatgtattttctttcctatatcggacgcgttcattggaaaatataccatgtcgttaactataagaatatttttatcctcgtttacaaactgaataatatcagatgtagttcgtaaacgaactatatcatcaccagcacaacatctaactatatgatatccactagtttcctttagtcgtttattatcttgttccatattagcagtcattccatcatttaagaaggcgtcaaagataatagggagaaatgacattttggattctgttacaactttaccaaaattaaggatatacggacttactatctttttctcaacgtcaatttgatgaacacacgatgaaaatgtacttcgatgagattgatcatgtagaaaacaacaagggatacaatatttccgcatatcatgaaatatattaagaaatcccaccttattatatttccccaaaggatccatgcacgtaaacattatgccgttatcattaataaagacttctttctcatcggatctgtaaaagttgttactgatttttttcattccaggatctagataattaataatgatgggttttctattcttattctttgtattttggcatatcctagaccagtaaacagtttccactttggtaaaatcagcagacttttgaacgctattaaacatggcattaatggcaataactaaaaatgtaaaatatttttctatgttaggaatatggtttttcactttaatagatatatggtttttggccaaaatgatagatatttttttatccgaggatagtaaaatattattagtcgccgtctctataaaaatgaagctagtctcgatatccaattttattctagaattgataggagtcgccaaatgtaccttatacgttatatctcccttgatgcgttccatttgtgtatctatatcggacacaagatctgtaaatagttttacgttattaatcatcacggtatcgccgtcgctagataatgctaatgtaccatccaagtcccaaatggagagatttaactgttcatcgtttagaataaaatgattaccggtcatattaataaagtgttcatcgtatctagataacaacgacttataattaatgtccaagtcttgaactcgctgaatgatcttttttaacccagttagttttagattggtacgaaatatattgttaaactttgattctacagtaatgtccaaatctagttgtggaaatacttccatcaacattgtttcaaacttgataatattattatctacatcttcgtacgatccaaattccggaatagatgtatcgcacgctctgaccacccagataaccaaaaagtcacacgctccaggatatacattgtataaaaagctatcgttttttagtagtgtttttttctgagtatatacgaagggattaaaaatagtattatcaacgtaactatattccaaattattcttatgagaatagataataatatcgtccttaatatctaacaaatttcctaaatatccctttaattgagtcattcgaagcgtcaatagaatatgtctcttaactatttccggctgttgtatatttaaatgacttcgtaaaaaataatatatgggcgacttctcatctatgtaatcatatggagtgagatatagggctcgttctacctcctgccccttacccacctgtaataccaattgcggacttactatatatcgcatatttatatcgtggggtaaagtgaaaatctactaccgatgatgtaagtcttacaatgttcgaaccagtaccagatcttaatttggaggcctccgtagaactaggggaggtaaatatagatcaaacaacacctatgataaaggagaatagcggttttatatcccgcagtagacgtctattcgcccatagatctaaggatgatgagagaaaactagcactacgattctttttacaaagactttattttttagatcatagagagattcattatttgttcagatgcgttgacgctgtaaaagacgtcactattaccaaaaaaaataacattatcgtggcgccttatatagcacttttaactatcgcatcaaaaggatgcaaacttacagaaacaatgattgaagcattctttccagaactatataatgaacatagtaagaaatttaaattcaactctcaagtatccatcatccaagaaaaactcggataccagtttggaaactatcacgtttatgattttgaaccgtattactctacagtagctctggctattcgagatgaacattcatctggcatttttaatatccgtcaagagagttatctggtaagttcattatctgaaataacatatagattttatctaattaatctaaaatctgatcttgttcaatggagtgctagtacgggcgctgtaattaatcaaatggtaaatactgtattgattacagtgtatgaaaagttacaactggtcatagaaaatgattcacaatttacatgttcattggctgtggaatcagaacttccaataaaattacttaaagatagaaatgaattatttacaaaattcattaacgagttaaaaaagaccagttcattcaagataagcaaacgcgataaggatacgctattaaaatattttacttaggactggagttagaatttatagacgactcatttcgtttatcattattactaccatcattattagtattcttcttgtcatcttgttcagaaatatacagcaatgctatacctaatactaaatacattatcatgctcgcaatggctctaacaacaacgaaccaaaatgaatttggtcgtagcttttgttcacaaaaatacataaagaaatgtctacataaatctatggcgccattggctacttgaaatagcgccagtcctcctacagattttaatatagctgtataacatgacatttattcatcatcaaaagagacagagtcaccatctgtcatatttagattttttttcatgtgttcaaagtatcctctactcatttcattataatagtttatcatacttagaattttaggacggatcaatgagtaagacttgactagatcgtcagtagtaatttgtgcatcgtctattctgcatccgcttcgtcgaataatgtatagcatcgctttgagattctccatagctatcaagtctttatacaatgacatggaaatatctgtgaatactttatacttctccaacatcgatgccttaacatcatcgcctactttagcattgaaaatacgttctattgtgtagatggatgtagcaagatttttaaacaacaatgccattttacacgatgattgcctcaagtctccaatcgtttgtttagaacgattagctacagagttcaacgcttggctgactagcatattattatctttagaaattgtattcttcaatgaggcgtttatcatatctgtgatttcgttagtcatattacagtctgactgggttgtaatgttatccaacatatcacctatggatacggtacacgtaccagcatttgtaataatcctatctaagatgttgtatggcattgcgcagaaaatatcttctcctgtaatatctccactctcgataaatctactcagattattcttaaatgccttattctctggagaaaagatatcagtgtccatcatttcattaatagtatacgcagaaaagataccacgagtatcaattctatccaagatacttatcggttccgagtcacagataatggtttcctctccttcgggagatcctgcatagaaatatctaggacaatagtttctatactgtctgtaactctgataatctctaaagtcactaactgataccatgaaattgagaagatcaaacgctgaagtaattaatttttctgcctcgtttttactacaactagttttcatcaatgtagtgacgatgtattgtttagttactcttggtctaatactgatgatagagatattattacttcccataatggatcttctagtagtcaccttaaagcccattgatgcaaatagcagatagataaagtcttggtatgactcctttctaatatagtacggactacctttgtcacccaactttatacccacataagccataacaacctctttaatagccgtttcatgaggtttatcagccatgagcctgagtagttggaagaatctcatgaatcccgtctcagaaagtcctatatgcatgatagatttatctttcctgggaaactctcgtatagtcatagatgaaatactcttcaaagtttctgaaataagattagtaacagtcttacctccgactactctaggtaacaaacaaactctaataggtgttttctctgcggagataatatcagaaaggatagagcaataagtagtattattgtgattataaagaccgaatacataacaggtagaatttataaacatcatgtcctgaaggtttttagacttgtattcctcgtaatccataccgtcccaaaacatggatttggtaactttgatagccgtagatctttgttccttcgccaacaggttaaagaaattaataaagaatttgttgtttctatttatgtccacaaattgcacgtttggaagcgccacggttacattcactgcagcattttgaggatcgcgagtatgaagtacgatgttattgtttactggtatatctggaaagaaatctaccagtctaggaataagagattgatatcgcatagaaatacaaaagttcataatctcatcatcgaagagcattttgttaccattgtaataaatatccactctgtcatatgtataaatgaagtactgttcaaacatgatgagatgtttatatgttggcatagtagtgagatcgacgtttggtaatggcaatgtattaagattaactccataatgtctagcagcatctgcgatgttataagtgttgtcaaagcggggtcgatcttgtgctgttatatattgtctaacacctataagattatcaaaatcttgtctgcttaatacaccgttaacaatttttgccttgaattcttttattggtgcattaataacatccttatagaggatgttaaacaaataagtattatcaaagttaagatctgggtatttcttttctgctagaacatccattgagtcggagccatctggtttaatataaccaccgataaatctagctctgtattctgtatccgtcaatctaatattaagaaggtgttgagtgaaaggtggaagatcgtaaaagctgtgagtattaatgataggattagtttccgaactaatgttaattggggtattaataatatctatatttccagcgttaagtgtaacattaaacagttttaattcacgtgacgtggtatcaattaaataattaatgcccaatttggatatagcagcctgaagctcatcttgtttagttacggatcctaatgagttattaagcaatatatcgaacggatgaacgaaggttgttttgagtttgtcgcatactttgtaatctagacatagatgcggaagaacggtagaaactatacgaaataaatattcagagtcctctaattgatcaagagtaactattgacttaataggcatcatttatttagtattaaatgacgaccgtaccagtgacggatatacaaaacgatttaattacagagttttcagaagataattatccatctaacaaaaattatgaaataactcttcgtcaaatgtctattctaactcacgttaacaacgtggtagatagagaacataatgccgccgtagtgtcatctccagaggaaatatcctcacaacttaatgaagatctatttccagatgatgattctccggccactattatcgaaagagtacaacctcatactactattattgacgatactccacctcctacgtttcgtagagagttattgatatcggaacaacgtcaacaacgagaaaaaagatttaatattacagtatcgaaaaatgctgaagcaataatggaatctagatctatgatatcttctatgccaacacaaacaccatccttgggagtagtttatgataaagataaaagaattcagatgttggaggatgaagtggttaatcttagaaatcaacgatctaatacaaaatcatctgataatttagataattttaccagaatactatttggtaagactccgtataaatcaacagaagttaataagcgtatagccatcgttaattatgcaaatttgaacgggtctcccttatcagtcgaggacttggatgtttgttcagaggatgaaatagatagaatctataaaacgattaaacaatatcacgaaagtagaaaacgaaaaattatcgtcactaacgtgattattattgtcataaacattatcgagcaagcattgctaaaactcggatttgaagaaatcaaaggactgagtaccgatatcacttcagaaattatcgatgtggagatcggagatgactgcgatgctgtagcatctaaactaggaatcggtaacagtccggttcttaatattgtattgtttatactcaagatattcgttaaacgaattaaaattatttaatttaatacattcccatatccagacaacaatcgtctggattaatctgttcctgtcgtctcataccggacgacatattaatctttttattagtaggcatctttttagatggtttctttttcccagcattaactgagtcgatacctagaagatcgtgattgatctctccgaccattccacgaacttctaattggccgtctctgacggtaccataaactattttaccagcattagtaacagcttggacaatctgaccatccatcgcattgtacgatgtagtagtaactgttgttctacgtctaggagcaccagaagtatttttggagcccttggaggttgatgtagaagaagacgaggattttgattttggtttacatgtaatacattttgaactctttgattttgtatcacatgcgccggcagtcacatctgtttgagaattaagattattgttgcctcctttgacggctgcatctccaccgatttgcgctagtagatttttaagctgtggtgtaatcttattaactgtttcgatataatcatcgtaactgcttctaacggctaaattttttttatccgccatttagaagctaaaaatatttttatttatacagaagatttaactagattatacaatgaactaatatgatccttttccagattatttacaaacttggtattttttggttctggaggaggcgaatttaaattcggacttggattcggattttgtgagttcttgatcttattatacatcgagtataggatggcgacggtaactgctacgcaaataccgatcaacaaaagaataccaatcatttattgacaataacttcactattgatcaagtatgcaatatatcatcttttcactaaataagtagtaataatgattcaacaatgtcgagatatatggacgataataatttagttcatggaaatatcgctatgattggtatgaatgactccgctaactctgtggggtgcgcagtgctttccccacatagaataaattagcattccgactgtgataataataccaagtataaacgccataatactcaatactttccatgtacgagtgggactggtagacttactaaagtcaataaaggcgaagatacacgaaagaatcaaaagaatgattccagcgattagcacgccggaaaaataatttccaatcataagcatcatgtccatttaactaataaaaattttaaatcgccgaatgaacaaagtggaatataaaccatataaaaacaatagtttgtactgcaaaaataatatctatttttgttttcgaagatatggtaaaattaaatagtagtacacagcatgttataactaacagcagcaacggctcgtaattacttatcatttactagacgaaaaggtggtgggatattttcttgctcaaataatacgaatatatcacccatccattttatgcgatgtttatatactctaatctttaatagatctatagacgacgggtttaccaacaatatagattttatcgattcatctaatttaaacccttccttaaacgtgaatgatctattatctggcataacgatgactctacctgatgaatcggacaatgtactgggccatgtagaataaattatcaacgaattatcgtctacgaacatttatatcatttgttttaattttaggacgcgaataaatagatataaaatagaaaataacagatattacaaccaatgttatggccgcgcccaaccaggtaggcagttttattttatcttttactacaggttctcctggatgatgtacgtcaccaacggcggacgtagttctagtacaattagacgtaagttctgcttgggaattttttaacgctaaagagttaacgttaatcgtgcacccaacgtatttacatctagttctttgaacatcttgattataatataaccattttctatctctagattcgtcggtgcactcatgtaaccaacataccctaggtcctaaatatttatctccggaattagattttggataattcgcgcaccaacaatttctatttcctttatgatcgttacaaaagacgtataatgccgtatccccaaaagtaaaataatcaggacgaataattctaataaactcagaacaatatctcgcatccatatgtttggagcaaatatcggaataagtagacatagccggtttccgttttgcacgtaaccattctaaacaattggggtttccaggatcgtttctacaaaatccagtcatgaaatcgtcacaatgttctgtcttgtaattattattaaatatttttggacagtgtttggtatttgtcttagaacaacattttgctacgctatcactatcgcccaggagataatccttttttataaaatgacatcgttgcccggatgctatataatcagtagcgtgttttaaatccttaatatattcaggagttacctcgttctgataatagattaatgatccaggacgaaatttgaaagaactacatggttctccatgaattaatacatattgtttagcaaattcaggaactataaaactactacaatgatctatcgacataccatctatcaaacaaaatttgggtttaatttctcccggagatgtttcataatagtacgtataactttcttctgcaaacttaacagctctattatattcaggataattaaaacctaattccatatatttgtctcgtatatctgctattcctggtgctattttgattctattaagagtaacagctgcccccattcttaataatcgtcagtatttaaactgttaaatgttggtatatcaacatctaccttatttcccgcagtataaggtttgttgcaggtatactgttcaggaatggttacatttatacttcttctatagtcctgtctttcgatgttcatcacatatgcaaagaacagaataaacaaaataatgtaagaaataatattaaatatctgtgaattcgtaaatacattgattgccataataattacagcagctacaatacacacaatagacattcccacagtgttgccattacctccacgatacatttgagttactaagcaataggtaataactaagctagtaagaggcaatagaaaagatgagataaatatcatcaatatagagattagaggagggctatatagagccaagacgaacaaaatcaaaccgagtaacgttctaacatcattatttttgaagattcccaaataatcattcattcctccataatcgttttgcatcatacctccatctttaggcataaacgattgctgctgttcctctgtaaataaatctttatcaagcactccagcacccgcagagaagtcgtcaagcatattgtaatatcttaaataactcatttatatattaaaaaatgtcactattaaagatggagtataatctttatgccgaactaaaaaaaatgacttgtggtcaacccctaagtctttttaacgaagacggggatttcgtagaagttgaaccgggatcatcctttaagtttctgatacctaagggattttacgcctctccttccgtaaagacgagtctagtattcgagacattaacaacgaccgataataaaatcactagtatcaatccaacaaatgcgccaaagttatatcctcttcaacgcaaagtcgtatctgaagtagtttctaatatgaggaaaatgatcgaatcaaaacgtcctctatacattactcttcacttggcgtgtggatttggtaagactattaccacgtgttatcttatggctacacacggtagaaaaaccgtcatttgcgtacccaataaaatgttaatacatcaatggaagacacaggtagaggcagtcggattggaacataagatatccatagatggagtaagtagtctattaaaggaactaaagactcaaagtccggatgtattaatagtagtcagtagacatctgacaaacgatgccttttgtaaatatatcaataagcattatgatttgttcatcttggatgaatcacatacgtataatctgatgaacaatacagcagttacaagatttttagcgtattatcctccgatgatgtgttattttttaactgctacacctagaccagctaaccgaatttattgtaacagtattattaatattgccaagttatccgatctaaaaaaaactatctatgcggtagatagtttttttgagccatattccacagataatattagacatatgataaaacgattagatggaccatctaataaatatcatatatatactgagaagttattatctgtagacgagcctagaaatcaacttattcttgataccctggtagaagaattcaagtcaggaactattaatcgaattttagttattactaaactacgtgaacatatggtattcttctacaaacgattattagatcttttcggaccagaggttgtatttataggagacgcccaaaatagacgtactccagatatggtcaaatcaatcaaggaactaaatagatttatattcgtatccaccttattttattccggtactggtttagatattcctagtttggattcgttgttcatttgctcggcagtaatcaacaatatgcaaatagagcaattactagggagggtatgtcgagaaacagaactattagataggacggtatatgtatttcctagcacatccatcaaagaaataaagtacatgataggaaatttcatgcaacgaattattagtctgtctgtagataaactaggatttaaacaaaaaagttatcggaaacatcaagaatccgatcccacttctgtatgtacaacatcctccagagaagaacgtgtattaaatagaatatttaactcgcaaaatcgttaagaagtttaagcgacgatccgcatgctgcgcaggccagtgtattacccctcatagtattaatataatccaatgatacttttgtgatgtcggaaatcttaaccaatttagactgacaggcagaacacgtcatgcaatcatcatcgtcatcgataactgtagtcttgggcttctttttgcggctcttcattccggaacgcacattggtgctatccatttaggtagtaaaaaataagtcagaatatgccctatagcacgatcgtgcaaaacctggtatatcgtctctatctttatcacaatatagtgtatcgacatctttattattattgacttcgtttatcttggaacatggaatgggaacatttttgttatcaacggccacctttgccttaattccagatgttgtaaaattataactaaacagtctatcatcgacacaaatgaaattcttgtttagacgtttgtagtttacgtatgcggctcgttcgcgtctcattttttcagatattgcaggtactataatattaaaaataagaatgaaataacataggattaaaaataaagttatcatgacttctagcgctgatttaactaacttaaaagaattacttagtctgtacaaaagtttgagattttcagattctgcggctatagaaaagtataattctttggtagaatggggaacatctacttactggaaaataggcgtgcaaaaggtagctaatgtcgagacgtcaatatctgattattatgatgaggtaaaaaataaaccgtttaatattgatccgggctattacattttcttaccggtatattttgggagcgtctttatttattcgaagggtaaaaatatggtagaacttggatctggaaactcttttcaaataccagatgatatgcgaagtgcgtgtaacaaagtattagacagcgataacggaatagactttctgagatttgttttgttaaacaatagatggataatggaagatgctatatcaaaatatcagtctccagttaatatatttaaactagctagtgagtacggattaaacatacccaaatatttagaaattgaaatagaggaagacacattatttgacgacgagttatactctattatagaacgctcttttgatgataaatttccaaaaatatccatatcgtatattaagttgggagaacttagacggcaagttgtagactttttcaaattctcgttcatgtatattgagtccatcaaggtagatcgtataggagataatatttttattcctagcgttataacaaaatcaggaaaaaagatattagtaaaagatgtagaccatttaatacgatccaaggttagagaacatacatttgtaaaagtaaaaaagaaaaacacattttccattttatacgactatgatggaaacggaacagaaactagaggagaagtaataaaacgaattatagacactataggacgagactattatgttaacggaaagtatttctctaaggttggtagtgcaggcttaaagcaattgactaataaattagatattaatgagtgcgcaactgtcgatgagttagttgatgagattaataaatccggaactgtaaaacgaaaaataaaaaaccaatcagcatttgatttaagcagagaatgtttgggatatccagaagcggattttataacgttagttaataacatgcggttcaaaatagaaaattgtaaggttgtaaatttcaatattgaaaatactaattgtttaaataacccgagtattgaaactatatatagaaactttaaccagttcgtctcaatctttaatgtcgtcaccgatgtcaaaaaaagattattcgagtgaaataatatgcgcctttgatataggtgcaaaaaatcctgccagaactgttttagaagtcaaggataactccgttagggtattggatatatcaaaattagactggagttctgattgggaaaggcgcatagctaaagatttgtcacaatatgaatacactacagttcttctagaacgtcagcctagaaggtcgccgtatgttaaatttatctattttattaaaggctttttatatcatacatcggctgccaaagttatttgcgtctcgcctgtcatgtctggtaattcatatagagatcgaaaaaagagatcggtcgaagcatttcttgattggatggacacattcggattgcgagactccgttccggatagacgcaaattagacgatgtagcggatagtttcaatttggctatgagatacgtattagataaatggaatactaattatacaccttataataggtgtaaatctaggaattacataaaaaaaatgtaataacgttagtaacgccattatggataatctatttacctttctacatgaaatagaagatagatatgccagaactatttttaactttcatctaataagttgcgatgaaataggagatatatatggtcttatgaaagaacgaatttcctcagaggatatgtttgataatatagtgtataataaagatatacatcatgccattaagaaactagtgtattgcgacatccaacttactaaacacattattaatcagaatacgtatccggtatttaacgattcttcacaagtgaaatgttgtcattatttcgatataaactcagataatagcaatattagctctcgtacagtagagatatttgagagggaaaagtcatctcttgtatcatatattaaaactaccaataagaagagaaaggtcaattacggcgaaataaagaaaactgttcatggaggcactaatgcaaattacttttccggtaaaaagtctgatgagtatctgagtactacagttagatccaacattaatcaaccttggatcaaaaccatttctaagagaatgagagtagatatcattaatcactctatagtaacgcgtggaaaaagctctatattacaaactatagaaattatttttactaatagaacatgtgtgaaaatattcaaggattctactatgcacattattctatccaaggacaaggatgaaaaggggtgtatacacatgattgacaaattattctatgtctattataatttatttctgttgttcgaagatatcatccaaaacgagtactttaaagaagtagctaatgttgtaaaccacgtacttacggctacggcattagatgagaaattattcctaattaagaaaatggctgaacacgatgtttatggagttagcaatttcaaaatagggatgtttaacctgacatttattaagtcgttggatcataccgttttcccctctctgttagatgaggatagcaaaataaagttttttaaggggaaaaagctcaatattgtagcattacgatctctggaggattgtataaattacgtgactaaatccgagaatatgatagaaatgatgaaggaaagatcgactattttaaatagcatagatatagaaacggaatcggtagatcgtctaaaagaattgcttctaaaatgaaaaaaaacactgattcagaaatggatcaacgactcggatataagtttttggtgcctgatcctaaagccggagttttttatagaccgttacatttccaatatgtatcgtattctaattttatattgcatcgattgcatgaaatcttgaccgtcaagcggccactcttatcgtttaagaataatacagaacgaattatgatagaaattagcaatgttaaagtgactcctccagattactcacctataatcgcgagtattaaaggtaagagttatgacgcattagccacgttcactgtaaatatctttaaagaggtaatgaccaaagagggtatatccatcactaaaataagtagttatgagggaaaagattctcatttgataaaaattccgctactaataggatacgggaataaaaatccacttgatacagccaagtatcttgttcctaatgtcataggtggagtctttatcaataaacaatctgtcgaaaaagtaggaattaatctagtagaaaagattacaacatggccaaaatttagggttgttaagccaaactcattcactttctcgttttcctccgtatcccctcctaatgtattaccgacaagatatcgccattacaagatatctctggatatatcacaattggaagcgttgaatatatcatcgacaaagacatttataacggtcaatattgttttgctgtctcaatatttatctagagtgagtctagaattcattagacgtagcttatcatacgatatgcctccagaagttgtctatctagtaaacgcgataatagatagtgctaaacgaattactgaatctattactgactttaatattgatacatacattaatgacctggtggaagctgaacacattaaacaaaaatctcagttaacgatcaacgagttcaaatatgaaatgctgcataactttttacctcatatgaactatacacccgatcaactaaagggattttatatgatatctttactaagaaagtttctctactgtatctaccacacttctagatatccagatagagattcgatggtttgtcatcgtatactaacatacggcaaatattttgagacgttggcacatgatgaattagagaattacataggcaacatccgaaacgatatcatgaacaatcacaagaacagaggcacttacgcggtaaacattcatgtactaacaactcctggacttaatcatgcattttctagcttattgagtggaaagttcaaaaagtcagacggtagttatcgaacacatcctcactattcatggatgcagaatatttctattcctaggagtgttggattttatccggatcaagtaaagatttcaaagatgttttctgtcagaaaataccatccaagtcaatatctttacttttgttcatcagacgttccggaaagaggtcctcaggtaggtttagtatctcaattgtctgtcttgagttccattacaaatatactaacgtctgagtatttggatttggaaaagaaaatttgtgagtatatcagatcatattataaagatgatataagttactttgaaacaggatttccaatcactatagaaaatgctctagtcgcatctcttaatccaaatatgatatgtgattttgtaactgactttagacgtagaaaacggatgggattcttcggtaacttggaggtaggtattactttagttagggatcacatgaatgaaattcgcattaatattggagcgggaagattagtcagaccattcttggttgtggataacggagagctcatgatggatgtgtgtccggagttagaaagcagattagacgatatgacattctctgacattcagaaagagtttccacatgtcatcgaaatggtagatatagaacaatttacttttagtaacgtatgtgaatcggttcaaaaatttagaatgatgtcaaaggatgaaagaaagcaatacgatttatgtgactttcctgccgaatttagagatggatatgtggcatcttcattagtgggaatcaatcacaattctggacccagagctattcttggatgtgctcaagctaaacaagctatctcttgtctgagttcggatatacgaaataaaatagacaatggaattcatttgatgtatccagagaggccaatcgtgattagtaaggctttagaaacttcaaagattgcggctaattgcttcggccaacatgttactatagcattaatgtcgtacaaaggtatcaatcaagaggatggaattatcatcaaaaaacaatttattcagagaggcggtctcgatatagttaccgcaaagaaacatcaagtagaaattccgttggaaaactttaataacaaagaaagagataggtctaatgcatattcgaaattagaaagtaatggattagttagactgaatgctttcttggaatccggagacgctatggcacgaaatatctcatcaagaactcttgaagatgattttgctagagataatcagattagcttcgatgtttccgagaaatataccgatatgtacaaatctcgcgttgaacgagtacaagtagaacttactgacaaagttaaggtacgagtattaaccatgaaagaaagaagacccattctaggagacaaatttaccactagaacgagtcaaaagggaacagtcgcgtatgtcgcggatgaaacggaacttccatacgatgaaaatggtatcacaccagatgtcattattaattctacatccatcttctctagaaaaactatatctatgttgatagaggttattttaacagccgcatattctgctaagccgtacaacaataagggagaaaaccgacctgtctgttttcctagtagtaacgaaacatccatcgatacatatatgcaattcgctaaacaatgttatgagcattcaaatccgaaattgtctgatgaagaattatcggataaaatcttttgtgaaaagattctctatgatcctgaaacggataagccttatgcatccaaagtattttttggaccaatttattacttgcgtctgaggcatttaactcaggacaaggcaaccgttagatgtagaggtaaaaagacgaagctcattagacaagcgaatgagggacgaaaacgtggaggaggtattaagtttggagaaatggagagagactgtttaatagcgcatggcgcagccaatactattacagaagttttgaaagattcggaagaagattatcaagatgtgtatgtttgtgaaaattgtggagacatagcagcacaaatcaagggtattaatacatgtcttagatgttcaaaacttaatctctctcctctcttaacaaaaattgataccacgcacgtatctaaagtatttcttactcaaatgaacgccagaggcgtaaaagtcaaattagatttcgaacgaaggcctccttcgttttataaaccattagataaagttgatctcaagccgtcttttctggtgtaatattctagtttggtagtagatacatatcaatatcatcaaattcgagatccgaattataaaatgggcgtggattgttaactatagaatcggacgtctgatattcgaaaatctgtggagtttcaggttttggtggaggtgtaactgctacttgggatactgaagtctgatattcagaaagctgggggatgttctggttcgacatccaccgatggtgtcacatcactaatcggttcggtaacgtctgtggatggaggtgctacttctacagaacctgtagcctcagttgtcaacggagatacatttttaatgcgaggaaatgtataatttggtaatggtttctcatgtggatctgaagaagaggtaagatatctactagaaagataccgatcacgttctagttctcttttgtagaacttaactttttctttctcagcatctagttgatattccaacctcttcacgttactacgttcagatttcaattcacgttcgcatgggttacctccgcagtttttacgagcgatttcacgttcagccttcatgcgtctctgtgatccgtttacgttaaaccataaatacatgggtgatcctataaacatgaatttatttctaattctcagagctatagttaattgaccgtgtaatatttgcttacatgcatacttgatacgctcattaataagatttttatcattgctcgttatctcagaatcgtatatataaggagtaccatcgtgattcttaccagatattatacaaaatactatatataaaatatattgaccaacgttagtaatcatataaatgtttaacgttttaaattttgtattcaatgatccattatcatacgctagcatggtcttatgatattcattctttaaaatataatattgtgttagccattgcattggagctcctaatggagattttctattctcgtccattttaggatatgctttcataaagtccctaataacttcgtgaataatgtttctatgttttctactgatgcatgtatttgcttcgatttttttatcccatgtttcatctatcatagatttaaacgcagtaatgctcgcaacattaacatcttgaaccgttggtacaattccgttccataaatttataatgttcgccatttatataactcattttttgaatatacttttaattaacaaaagagttaagttactcatatggacgccgtccagtctgaacatcaatctttttagccagagatatcatagccgctcttagagtttcagcgtgattttccaacctaaatagaacttcatcgttgcgtttacaacacttttctatttgttcaaactttgttgttacattagtaatctttttttccaaattagttagccgttgtttgagagtttcctcattgtcgtcttcatcggctttaacaattgcttcgcgtttagcctctggctttttatcagcctttgtagaaaaaaattcagttgctggaattgcaagatcgtcatctccggggaaaagagttccgtccatttaaagtacagattttagaaactgacactctgcgttatttatatttggtacaacacatggattataaatattgatgttaataacatcagaaaatgtaaagtctatacattgttgcatcgtgttaaattttctaatggatctagtattattgggtccaacttctgcctgaaatccaaatatggaagcggatacaaaaccgtttcctggataaaccacacatctccacttttgctttacatcagaaattgtgtcgttgacatcttgaactctcctatctaatgccggtgttccacctatagattttgaatattcgaatgctgcatgagtagcattaaattccttaatattgccataattttcatatattgagtaaccctggataaaaagtaaacacaccgcagccgtcgctaccacaataaaaaaaattgatagagagttcatttataatctattagaagctgacaaaatttttttacacgcatcagacaatgctttaataaatagttcaacatctacttttgtcatatcgaaccgatggtatgattctaacctagaattacatccgaaaaagttgactatgttcatagtcattaagtcattaacaaacaacattccagactctggattataagacgatactgtttcgtcacaatcacctaccttaatcatgtgattatgaatattggctattagagcaccttctaagaaatctataatatctttgaaacacgatttaaaatcaaaccacgaatatacttctacgaagaaagttagtttacccataggagagataactataaatggagatctaaatacaaaatccggatctatgatagttttaacattattatattctctattaaatacctccacatctaaaaatgttaattttgaaactatgtcttcgtttattaccgtacctgaactaaacgctataagctctattgtttgagaactctttaaacgatattcttgaaatacatgtaacaaagtttcctttaactcggtcggtttatctaccatagttacagaatttgtatccttatctataatataataatcaaaatcgtataaagttatataattatcgcgttcagattgggatcttttcaaatagactaaaaaccccatttctctagtaagtatcttatgtatatgtttgtaaaatatcttcatggtgggaatatgctctaccgcagttagccattcctcattgacagcggtagatgtattagacaaaactattccaatgtttaacaagggccattttacgagattattaaatccttgtttgataaatgtagccaatgagggttcgagttcaacgacgattgaattctcttcccgcggatgctgcatgatgaacgacgggatgttgttcgattgatttggaattctttttcgactttttgtttatattaaatattttaaaatttatagctgatagcaattcatgtaccacggataatgtagacgcgtattgcgcatcgatatctttattattagataaatttatcaataaatgtgagaagtttgcctcgttaaggtcttccatttaaatattatataaacatttgtgtttgtatcttattcgtcttttatggaatagttttttactagtaaagctgcaattacacactttgtccgtaaaacataaatataaacaccagcttttatcaatcgttccaaaaagtcgacggcggacatttttaacatggcatctattttaaatacacttaggtttttggaaaaaacatcattttataattgtaacgattcaataactaaagaaaagattaagattaaacataagggaatgtcatttgtattttataagccaaagcattctaccgttgttaaatacttgtctggaggaggtatatatcatgatgatttggttgtattggggaaggtaacaattaatgatctaaagatgatgctattttacatggatttatcatatcatggagtgacaagtagtggagtaatttacaaattgggatcgtctatcgatagactttctctaaataggactattgttacaaaagttaataattatgatgatacattttttgacgacgatgattgatcgctattgcacaattttgtttttttactttctaatatagcgtttagattctttttcatgtgcgaatattgatttactaaaatatcgatgtttaacttttgttctatgacgtccttatcggcggtatcggtacatatacgtaattcaccttcacaaaatacggagtcttcgataataatagccaatcgattattggatctagctgtctgtatcatattcaacatgtttaatatatcctttcgtttcccctttacaggcatcgatcgtagcatattttccgcgtctgagatggaaatgttaaaactacaaaaatgcgtaatgttagcccgtcctaatattggtacgtgtctataagtttggcatagtagaataatagacgtgtttaaatgccttccaaagtttaagaattctattagagtattgcattttgatagtttatcgcctacatcatcaaaaataagtaaaaagtgtgctgattttttatgattttgtgcgacagcaatacatttttctatgttacttttagttcgtatcagattatattctagagattcctgactactaacgaaattaatatgatttggccaaatgtatccatcataatctgggttataaacgggtgtaaacaagaatatatgtttatattttttaactagtgtagaaaacagagatagtaaatagatagtttttccagatccagatcctcccgttaaaaccattctaaacggcatttttaataaattttctcttgaaaattgtttttcttggaaacaattcataattatatttacagttactaaattaatttgataataaatcaaaatatggaaaactaaggtcgttagtagggaggagaacaaagaaggcatatcgtgatataaataacatttattatcatgatgacaccagaaaacgacgaagagcagacatctgtgttctccgctactgtttacggagacaaaattcaaggaaagaataaacgcaaacgcgtgattggtctatgtattagaatatctatggttatttcactactatctatgattaccatgtccgcgtttctcatagtgcgcctaaatcaatgcatgtctgctaacgaggctgctattactgacgccgctgttgccgttgctgctgcatcatctactcatagaaaggttgcgtctagcactacgcaatatgatcacaaagaaagctgtaatggtttatattaccagggttcttgttatatattacattcagactaccagttattctcggatgctaaagcaaattgcactgcggaatcatcaacactacccaataaatccgatgtcttgattacctggctcattgattatgttgaggatacatggggatctgatggtaatccaattacaaaaactacatccgattatcaagattctgatgtatcacaagaagttagaaagtatttttgtgttaaaacaatgaactaatatttatttttgtacattaataaatgaaatcgcttaatagacaaactgtaagtatgtttaagaagttgtcggtgccggccgctataatgatgatactctcaaccattattagtggcataggaacatttctgcattacaaagaagaactgatgcctagtgcttgcgccaatggatggatacaatacgataaacattgttatctagataccaacattaaaatgtccacagataatgcggtttatcagtgtcgtaaattacgagctagattgcctagacctgatactagacatctgagagtattgtttagtattttttataaagattattgggtaagtttaaaaaagaccaataataaatggttagatattaataatgataaagatatagatattagtaaattaacaaattttaaacaactaaacagtacgacggatgctgaagcgtgttatatatacaagtctggaaaactggttaaaacagtatgtaaaagtactcaatctgtactatgtgttaaaaaattctacaagtgacaacaaaaaatgaattaataataagtcgttaacgtacgccgccatggacgccgcgtttgttattactccaatgggtgtgttgactataacagatacattgtatgatgatctcgatatttcaatcatggactttataggaccatacattataggtaacataaaaactgtccaaatagatgtacgggatataaaatattccgacatgcaaaaatgctactttagctataagggtaaaatagttcctcaggattctaatgatttggctagattcaacatttatagcatttgtgccgcatacagatcaaaaaataccatcatcatagcatgcgactatgatatcatgttagatatagaagataaacatcagccattttatctattcccatctattgatgtttttaacgctacaatcatagaagcgtataacctgtatacagctggagattatcatctaatcatcaatccttcagataatctgaaaatgaaattgtcgtttaattcttcattctgcatatcagacggcaatggatggattataattgatgggaaatgcaatagtaattttttatcataaaagttgtaaagtaaataataaaacaataaatattgaactagtagtacgtatattgagcaatcagaaatgatgctggtacctcttatcacggtgacagtagttgcgggaacaatattagtatgttatatattatatatttgtaggaaaaagatacgtactgtctataatgacaataaaattatcatgacaaaattaaaaaagataaagagttctaattccagcaaatctagtaaatcaactgatagcgaatcagactgggaggatcactgtagtgctatggaacaaaacaatgacgtagataatatttctaggaatgagatattggacgatgatagcttcgctggtagtttaatatgggataacgaatccaatgttatggcgcctagcacagaacacatttacgatagtgttgctggaagcacgctgctaataaataatgatcgtaatgaacagactatttatcagaacactacagtagtaattaatgaaacggagactgttgaagtacttaatgaagataccaaacagaatcctaactattcatccaatcctttcgtaaattataataaaaccagtatttgtagcaagtcaaatccgtttattacagaacttaacaataaatttagtgagaataatccgtttagacgagcacatagcgatgattatcttaataagcaagaacaagatcatgaacacgatgatatagaatcatcggtcgtatcattggtgtgattagtttcctttttataaaattgaagtaatatttagtattattgctgccgtcacgttgtacaaatggagatattccctgtattcggcatttctaaaattagcaattttattgctaataatgactgtagatattatatagatacagaacatcaaaaaattatatctgatgagatcaatagacagatggatgaaacggtacttcttaccaacatcttaagcgtagaagttgtaaatgacaatgagatgtaccatcttattccccatagactatcgactattatactctgtattagttctgtcggaggatgtgttatctctatagataatgacgtcaatggcaaaaatattctaacctttcccattgatcatgctgtaatcatatccccactgagtaaatgtgtcgtagttagcaagggtcctacaaccatattggttgttaaagcggatatacctagcaaacgattggtaacatcgtttacaaacgacatactgtatgtaaacaatctatcactgattaattatttgccgttgtctgtattcattattagacgagttaccgactatttggatagacacatatgcgatcagatatttgcgaataataagtggtattccattataaccatcgacaataagcagtttcctattccatcaaactgtataggtatgtcctctgccaagtacataaattctagcatcgagcaagatactttaatacatgtttgtaacctcgagcatccattcgacttagtatacaaaaaaatgcagtcgtacaattctgtacctatcaaggaacaaatattgtacggtagaattgataatataaatatgagcattagtatttctgtgtattaatagatttctagtatggggatcattaatcatctctaatctctaaatacctcataaaacgaaaaaaaagctattatcaaatactgtacggaatggattcattctcttctctttttatgaaactctgttgtatatctactgataaaactggaagcaaaaaatctgatagaaagaataagaataagatcaagatcaaggattatatggaacacgattattataaaataacaatagttcctggttcctcttccacgtctactagctcgtggtattatactcatgcctagtaatagtctctttgcgttgacggaaagcagactagaaataacaggctaaaatgttcagacaccataatagttcccaacccagataataacagagtaccatcaacacattcctttaaactcaatcccaaacccaaaaccgttaaaatgtatccggccaattgatagtagataatgaggtgtacagcgcatgataatttacacagtaaccaaaatgaaaatactttagtaattataagaaatatagatggtaacgtcatcatcaacaatccaataatatgccggagagtaaacattgacggataaaacaaaaatgctccgcataactctatcatggcaataacacaaccaaatacttgtaagattcctaaattagtagaaaatacaacggatatcgatgtataagtgatctcgagaaataataagaataaagtaatgcccgtaaagataaacatcaacattgtttggtaatcattaaaccaattagtatgaagttgaactaatttcacagtagattttattccagtgttatcctcgcatgtataagtacctggtaagatatctttatattctataatcaatgagacatcactatccgataacgaatgaagtctagcactagtatgccatttacttaatattgtcgtcttggaagttttattataagttaaaatatcatggttatccaatttccatctaatatactttgtcggattatctatagtacacggaataatgatggtatcattacatgctgtatactctatggtctttgtagttgttataacaaccaacgtatagaggtatatcaacgatattctaactcttgacattttttatttatttaaaatgatacctttgttatttattttattctattttgctaacggtattgaatggcataagtttgaaacgagtgaagaaataatttctacttacttattagacgacgtattatacacgggtgttaatggggcggtatacacattttcaaataataaactaaacaaaactggtttaactaataataattatatcacaacatctataaaagtagaggatgcggataaggatacattagtatgcggaaccaataacggaaatcccaaatgttggaaaatagacggttcagacgacccaaaacatagaggtagaggatacgctccttatcaaaatagcaaagtaacgataatcagttacaacgaatgtgtactatctgacataaacatatcaaaagaaggaattaaacgatggagaagatttgacggaccatgtggttatgatttatacacggcggataacgtaattccaaaagatggtttacgaggagcattcgtcgataaagatggtacttatgacaaagtttacattcttttcactgatactatcggctcaaagagaattgtcaaaattccgtatatagcacaaatgtgcctaaacgacgaaggtggtccatcatcattgtctagtcatagatggtcgacgtttctcaaagtcgaattagaatgtgatatcgacggaagaagttatagacaaattattcattctagaactataaaaacagataatgatacgatactatatgtattcttcgatagtccttattccaagtccgcattatgtacctattctatgaataccattaaacaatctttttctacgtcaaaattggaaggatatacaaagcaattgccgtctccagctcctggtatatgtttaccagctggaaaagttgtttcacataccacgtttgaagtcatagaaaaatataatgtactagatgatattataaagcctttatctaaccaacctatcttcgaaggaccgtctggtgttaaatggttcgatataaaggagaaggaaaatgaacatcgggaatatagaatatacttcataaaagaaaattctatatattcgttcgatacaaaatctaaacaaactcgtagctcgcaagtcgatgcgcgactattttcagtaatggtaacttcgaaaccgttatttatagcagatatagggataggagtaggaatgccacaaatgaaaaaaatacttaaaatgtaatcttaatcgagtacaccacacgacaatgaacaaacctaagacagattatgctggttatgcttgctgcgtaatatgcggtctaattgtcggaattatttttacagcgacactattaaaagttgtagaacgtaaattagttcatacaccatcaatagataaaacgataaaagatgcatatattagagaagattgtcctactgactggataagctataataataaatgtatccatttatctactgatcgaaaaacctgggaggaaggacgtaatacatgcaaagctctaaatccaaattcggatctaattaagatagagactccaaacgagttaagttttttaagaagccttagacgaggctattgggtaggagaatccgaaatattaaaccagacaaccccatataattttatagctaaaaatgccacgaagaatggaaatatatttgtagcacaacgaatactcccaaactgcattcgtgttacactatataacaattacactacatttttatcataccactacttcggttagatgttttagaaaaaaataaatatcgccgtaccgttcttgtttttataaaaataacaattaacaattatcaaattttttctttaatattttacgtggttgaccattcttggtggtaaaataatctcttagtgttggaatggaatgctgtttaatgtttccgcactcatcgtatattttgacgtatgcagtcacatcgtttacgcaatagtcagactgtagttctatcatgcttcctacatcagaaggaggaacagttttaaagtctcttggttttaatctattgccattagttttcatgaaatcctttgttttatccacttcacattttaaataaatgtccactatacattcttctgttaattttactagatcgtcatgggtcatagaatttataggttccgtagtccatggatccaaactagcaaacttcgcgtatacggtatcgcgattagtgtatacaccaacagtatgaaaattaagaaaacagtttaatagatcaacagaaatatttaatcctccgtttgatacagatgcgccatatttatggatttcggattcacacgttgtttgtctgaggggttcgtctagcgttgcttctacgtaaacttcgattcccatatattctttattgtcagaatcgcataccgatttatcatcatacactgtttgaaaactaaatggtatacacatcaaaataataaataataacgagtacattctgcaatattgttatcgtaattggaaaaatagtgttcgagtgagttggattatgtgagtattggattgtatattttattttatattttatattttatattttgtaataagaataaaatgctaatgtcaagtttattccaatagatgtcttattaaaaaacatatataataaataacaatggctgaatggcataaaattatcgaggatatctcaaaaaataataagttcgaggatgccgccatcgttgattacaagactacaaagaatgttctagctgctattcctaacagaacatttgccaagattaatccgggtgaaattattcctctcatcactaatcgtaatattctaaaacctcttattggtcagaaatattgtattgtatatactaactctctaatggatgagaacacgtatgctatggagttgcttactgggtacgcccctgtatctccgatcgttatagcgagaactcataccgcacttatatttttgatgggtaagccaacaacatccagacgtgacgtgtatagaacgtgtagagatcacgctacccgtgtacgtgcaactggtaattaaaataaaaagtaatattcatatgtagtgtcaattttaaatgatgatgatgaaatggataatatccatattgacgatgtcaataatgccggtattggcatacagctcatcgatttttagatttcattcagaggatgtggaattatgttatgggcatttgtattttgataggatctataatgtagtaaatataaaatataatccgcatattccatatagatataattttattaatcgcacgttaaccgtagatgaactagacgataatgtcttttttacacatggttattttttaaaacacaaatatggttcacttaatcctagtttgattgtctcattatcaggaaacttaaaatataatgatatacaatgctcagtaaatgtatcgtgtctcattaaaaatttggcaacgagtacatctactatattaacatctaaacataagacttattctctacatcggtccacgtgtattactataataggatacgattctattatatggtataaagatataaatgacaagtataatgacatctatgattttactgcaatatgtatgctaatagcgtctacattgatagtgaccatatacgtgtttaaaaaaataaaaatgaactcttaattatgctatgctattagaaatggataaaatcaaaattacggttgattcaaaaattggtaatgttgttaccatatcgtataacttggaaaagataactattgatgttacaccaaaaaagaaaaggatgtattattagcgcaatcagttgctgtcgaagaggcaaaagatgtcaaggtagaagaaaaaaatattatcgatattgaagatgacgatgatatggatgtagaaagcgcgtaatactatctataaacataagtatataataaatactttttatttacggtactcttgtagtggtgataccctactcgattatttttttaaaaaaaaaatacttattctgattcttctaaccatttccgtgttcgtttgaatgccacatcgacgtcaaagataggggagtagttgaaatctagttctgcattgttggtacgcacctcaaatgtagtgttggatatcttcaacgtatagttgttgagtagtgatggttttctaaatagaattctcttcatatcattcttgcacgcgtacatttttagcatccatcttggaatcctagatccttgttctattcccaatggtttcatcaatagaagattaaacatatcgtacgaacacgatggagagtaatcgtagcaaaagtaagcatttcctttaatcttagatcccggatactggatatattttgcagccaacacgtgcatccatgcagcatttcctacatatacccggctatgtaccgcgttatcatcgactgtacgatacataatgttaccgtgttgcttacattgctcgtaaaagactttcgtcaatttgtctccttctccgtaaattccagtgggtcttaggcaacaagtatacaattttgctccattcatgattacggaattattggctttcataaccagttgctcggccatacgtttactttttgcgtatacatgtcctggtgatatatcataaagggtatgctcatggccgatgaatggatcaccgtgtttattgggtcctattgcttccatgctactagtatagatcaaatacttgattcctaggtccacacaagctgccaatatagtctgtgttccataatagtttactttcatgatttcattatcggtgtattttccaaatacatccactagagcagccgtatgaataatcagatttaccccatctagcgcttctctcaccttatcaaagtcgtttatatcacattgtatatagtttataaccttaactttcgaggttattggttgtggatcttctacaatatctatgactctgatttcttgaacatcatctgcactaattaacagttttactatatacctgcctagaaatccggcaccaccagtaaccgcgtacacggccattgctgccactcataatatcagactacttattctattttactaaataatggctgtttgtataatagaccacgataatatcagaggagttatttactttgaaccagtccatggaaaagataaagttttaggatcagttattggattaaaatccggaacgtatagtttgataattcatcgttacggagatattagtcaaggatgtgattccataggcagtccagaaatatttatcggtaacatctttgtaaacagatatggtgtagcatatgtttatttagatacagatgtaaatatatttacaattattggaaaggcgttatctatttcaaaaaatgatcagagattagcgtgtgaagttattggtatttcttacataaatgaaaagataatacattttcttacaattaacgagaatggcgtttgatatatcagttaatgcgtctaaaacaataaatgcattagtttacttttctactcagcaaaataaattagtcatacgtaatgaagttaatgatacacactacactgtcgaatttgatagggacaaagtagttgacacgtttatttcatataatagacataatgacaccatagagataagaggggtgcttccagaggaaactaatattggttgcgcggttaatacgccggttagtatgacttacttgtataataagtatagttttaaactgattttagcagaatatataagacacagaaatactatatccggcaatatttattcggcattgatgacactagatgatttggctattaaacagtatggagacattgatctattatttaatgagaaacttaaagtagactccgattcgggactatttgactttgtcaactttgtaaaggatatgatatgttgtgattctagaatagtagtagctctatctagtctagtatctaaacattgggaattgacaaataaaaagtataggtgtatggcattagcgaacatatatctgatagtattccaatatctgagctatctagactacgatacaatctatgtaagtatctacgcgggcacactgagagcatagaggatgaatttgattattttgaagacgatgattcgtctacatgttctgccgtaaccgacagggaaacggatgtataattttttttatagcgtgaaggatatgataaaaaatataattgttgtatttatcccattccaatcaccttatatgattctgtaaaaaaattatactgtaacacaataaaggagtcttatagatgtatagaggtcagatactggtttgataaactgtttattccacataagtatgtttgactttatggttagacccgcatactttaacaaatcactgaaaattggagttaggtattgacctctcagaatcagttgccgttctggaacattaaatgtattttttatgatatactccaacgcatttatgtgggcatacaacaagtcattactaatggagtattccaagagttttagttgtctagtatttaacaagagaagagatttcaacagactgtttatgaactcgaatgccgcctcattgtcgcttatattgatgatgtcgaattctcccaatatcatcaccgatgagtagctcatcttgttatcgggatccaagttttctaaagatgtcattaaaccctcgatcatgaatggatttatcatcatcgtttttatgttggacatgagcttagtccgtttgtccacatctatagacgacgatttctgaattatttcatatatccctctctttaactccaggaacttgtcaggatggtctactttaatatgttctcgtctaagagatgaaaatctttggatggttgcacgcgacttttctctaaaggatgacgttgcccaagatcctctcttaaatgaatccatcttatccttggacaagatggacagtctattttccttagatggtttaatatttttgttacccatgatctataaaggtagacctaatcgtctcggatgaccatatatttattttcagttttattatacgcataaattgtaaaaaatatgttaggtttacgaaaatgtctcgtggggcattaatcgtttttgaaggattggacaaatctggaaaaacaacacaatgtatgaacatcatggaatctataccggcaaacacgataaaatatcttaactttcctcagagatccactgtcactggaaagatgatagatgactatctaactcgtaaaaaaacctataatgatcatatagttaatctattattttgtgcaaatagatgggagtttgcatcttttatacaagaacaactagaacagggaattactttaatagttgatagatacgcattttctggagtagcgtatgccgccgctaaaggcgcgtcaatgactctcagtaagagttatgaatctggattgcctaaacccgacttagttatattcttggaatctggtagcaaagaaattaatagaaacgtcggcgaggaaatttatgaagatgttacattccaacaaaaggtattacaagaatataaaaaaatgattgaagaaggagatattcattggcaaattatttcttctgaattcgaggaagatgtaaagaaggagttgattaagaatatagttatagaggctatacacacggttactggaccagtggggcaactgtggatgtaatagtgaaattacattttttataaatagatgttagtacagtgttataaatggatgaagcatattactctggcaacttggaatcagtactcggatacgtgtccgatatgcataccgaactcgcatcaatatctcaattagttattgccaagatagaaactatagataatgatatattaaacaaggacattgtaaattttatcatgtgtagatcaaacttggataatccatttatctctttcctagatactgtatatactattatagatcaagagaactatcagactgagttgattaattcattagacgacaatgaaattatcgattgtatagttaataagtttatgagcttttataaggataacctagaaaatatagtagatgctatcatcactctaaaatatataatgaataatccagattttaaaactacgtatgccgaagtactcggttccagaatagccgatatagatattaaacaagtgatacgtaagaatatactacaattgtctaatgatatccgcgaacgatatttgtgaaaaatattaaaaaaaaatactttttttattaaatgacgtcgcttcgcgaatttagaaaattatgctgtgatatatatcacgcatcaggatataaagaaaaatctaaattaattagagactttataacagatagggatgataaatatttgatcattaagctattgcttcccggattagacgatagaatttataacatgaacgataaacaaattataaaattatatagtataatatttaaacaatctcaggaagatatgctacaagatttaggatacggatatataggagacactattaggactttcttcaaagaaaacacagaaatccgtccaagagataaaagcattttaactttagaagacgtggatagtttcttaactacgttatcatccgtaactaaagaatcgcatcaaataaaattattgactgatatcgcatccgtttgtacatgtaatgatttaaaatgtgtagtcatgcttattgataaagatctaaaaattaaagcgggtcctcggtacgtacttaacgctattagtcctaatgcctatgatgtgtttagaaaatctaataacttgaaagagataatagaaaattcatctaaacaaaatctagactctatatctatttctgttatgactccaattaatcccatgttagcggaatcgtgtgattctgtcaataaggcgtttaaaaaatttccatcaggaatgtttgcggaagtcaaatacgatggtgaaagagtacaagttcataaaaataataacgagtttgccttctttagtagaaacatgaaaccagtactctctcataaagtggattatctcaaagaatacataccgaaagcatttaaaaaagctacgtctatcgtattggattctgaaattgttcttgtagacgaacataatgtaccgctcccgtttggaagtttaggtatacacaaaaagaaagaatataaaaactctaacatgtgtttgttcgtgtttgactgtttgtactttgatggattcgatatgacggacattccattgtacgaacgaagatcttttctcaaagatgttatggttgaaatacccaatagaatagtattctcagagttgacgaatattagtaacgagtctcagttaactgacgtattggatgatgcactaacgagaaaattagaaggattggtcttaaaagatattaatggagtatacgaaccgggaaagagaagatggttaaaaataaagcgagactatttgaacgagggttccatggcagattctgccgatttagtagtactaggtgcctactatggtaaaggagcaaagggtggtatcatggcagtctttctaatgggttgttacgacgatgaatccggtaaatggaagacggtaactaaatgttccggtcacgatgataatacgttaagggttttgcaagaccaattaacgatgattaaaattaacaaggatcccaaaaaaattccagagtggttagtagttaataaaatctatattcccgattttgtagtagaggatccgaaacaatctcagatatgggaaatttcaggagcagagtttacatcttccaagtcccataccgcaaatggaatatccattagatttcctagatttactaggataagagaggataaaacgtggaaagaatctactcatctaaacgatttagtaaacttgactaaatcttaatagttacatacaaactgaaaattaaaataacaccatttagttggtggtcgccatggatggtgttattgtatactgtctaaacgcgttagtaaaacatggcgaggaaataaatcatataaaaaatgatttcatgattaaaccatgttgtgaaagagtttgtgaaaaagttaagaacgttcacattggcggacaatctaaaaacaatacagtgattgcagatttgccatatatggataatgctgtatcggatgtatgcaattcactgtataaaaagaatgtatcaagaatatccagatttgctaatttgataaagatagatgacgatgacaagactcctactggtgtatataattattttaaacctaaagatgttattcctgttatcatatctataggaaaggataaagatgtctgtgaactattaatctcatcagacatatcgtgtgcatgcgtggagttaaattcatataaagtagccattcttcccatggatgtttccttttttaccaaaggaaatgcatcattgattattctcctgtttgatttctctatcgatgcagcacctctcttaagaagtgtaaccgataataatgttattatatctagacaccagcgtctacatgacgagcttccgagttccaattggttcaagttttacataagtataaagtccgactattgttctatattatatatggttgttgatggatctgtgatgcatgcgatagctgataatagaactcacgcaattattagcaaaaatatattagacaatactacgattaacgatgagtgtagatgctgttattttgaaccacagattaggattcttgatagagatgagatgctcaatggatcatcgtgtgatatgaacagacattgtattatgatgaatttacctgatgtaggcgaatttggatctagtatgttggggaaatatgaacctgacatgattaagattgctctttcggtggctggtaatttaataagaaatcgagactacattcccgggagacgaggatatagctactacgtttacggtatagcctctagataatttttttaagcacgaaataaaaaacataattttaaaccaatctatttcatactattttgtgtgatcaccatggacataaagatagatattagtatttctggtgataaatttacggtgactactaggagggaaaatgaagaaagaaaaaaatatctacctctccaaaaagaaaaaactactgatgttatcaaacctgattatcttgagtacgatgacttgttagatagagatgagatgtctactattctagaggaatattttatgtacagaggtctattaggcctcagaataaaatatggacgactctttaacgaaattaaaaaattcgacaatgatgcggaagaacaattcggtactatagaagaactcaagcagaaacttagattaaattctgaagagggagcagataactttatagattatataaaggtacaaaaacaggatatcgtcaaacttactgtatacgattgcatatctatgataggattgtgtgcatgcgtggtagatgtttggagaaatgagaaactgttttctagatggaaatattgtttacgagctattaaactgtttattaatgatcacatgcttgataagataaaatctatactgcagaatagactagtatatgtggaaatgtcatagaaagttaaaagttaatgagagcaaaaatatataaggttgtattccatatttgttattttttctgtaatagttaaaaaaatacattcgatggtctatctatcagattattatgtgttataaggtactttttctcataataaactagagtatgagtaagatagtgtttttcaaaacatataaatctaaaattgatggatgagatatacagctattaatttcgaaaatatattttaatctgataactttaaacatggatttttgatggtggtttaacgttttaaaaaaagattttgttattgtagtatatgataatattaaaagatggatataaagaatttgctgactgcatgtactattttttacattactacattggctacggcagatatacctactccgccaccaacgggtcatgtgacaagggagaatatcttgataagaggcataatcaatgttgtaatcggtgtccacctggagaatttgccaaggttagatgtaatggtaacgataacacaaaatgtgaacgctgcccacctcatacatataccacaatcccaattattctaatggatgtcatcaatgtagaaaatgcccaacaggatcatttgataaggtaaagtgtaccggaacacagaacagtaaatgttcgtgtcttcctggttggtattgcgctactgattcttcacagactgaagattgttgaaattgtataccaaaaaggagatgtccatgcggatactttggtggaatagatgaacaaggaaatcctatttgtaaatcgtgttgtgttggtgaatattgcgactacctacgtaattatagacttgatccatttcctccatgcaaactatctaaatgtaattaattatgattttgatgataatgttaccatacattatatcgctacttggttagtgtattattcagtatgaagacctattaataattacttatcttttgacgatcttgttataattataatataaaaatacttatggcatagtaactcataattgctgacgcgataaattcgtaataatctgttttgttcaaaggaatctacaggcataaaaataaaaatataatttataatatactcttacaacgccatcatgaataacagcagtgaattgattgctgttattaatggatttagaaatagtggacgattttgtgatattaatatagttattaatgatgaaaggataaacgctcataaactcatcctatctggagcctccgaatatttttccattctgttttccaataattttatcgattctaatgaatacgaagttaatctaagtcatttagattatcaaagtgttaacgatttgatcgattacatttatgggatacctttgagcctaactaacgataacgtgaaatatattctttcaaccgctgattttttacaaattggatctgccattacggagtgtgaaaattacatacttaaaaatctttgttctaaaaactgtatcgatttctacatatacgctgataaatataataacaagaaaatagaatcagcgtcgtttaacacaatattacaaaatattttgagactcatcaacgatgaaaactttaaatacttaacagaggaatcaatgataaaaattttaagcgatgatatgttaaatataaaaaatgaggatttcgccccactaattctcattaaatggttagagagtactcaacaatcatgcaccgtcgagttacttaaatgcctcagaatatcattgctttccccacaagttataaaatcactttatagtcatcgactggttagttcaatctacgaatgtataacattcttaaacaatatagcattcttggatgaatcatttcctagataccatagcatcgagttgatatctatcggtataagtaattcgcgtgataaaatttccataaactgctacaatcataaaaaaaatacatgggaaatgatatcttcacgtagatataggtgtagtttcgcagtggccgtcctggataatattatttatatgatgggtggatatgatcagtccccgtatagaagttcaaaggttatagcgtacaatacatgtacaaattcttggatatatgatataccagagctaaaatatcctcgttctaattgtgggggactggctgatgacgaatacatttattgtataggcggcatacgcgatcaggattcatcgttgacatctagtattgataaatggaagccatcaaaaccatattggcagaagtatgctaaaatgcgcgaaccaaaatgtgatatgggggttgcgatgttaaacggattaatatatgttataggtggaatcgttaaaggtgacacgtgtaccgacgcactagagagtttatcagaagatggatggatgaagcatcaacgtcttccaataaaaatgtccaatatgtcgacgattgttcatgatggcaagatttatatatctggaggttacaacaatagtagtgtagttaatgtaatatcgaatctagtccttagctataatccgatatatgatgaatggaccaaattatcatcattaaacattcctagaattaatcccgctctatggtcagcgcataataaattatatgtaggaggaggaatatctgatgatgttcgaactaatacatctgaaacatacgataaagaaaaagattgttggacattggataatggtcacgtgttaccacgcaattatataatgtataaatgcgaaccgattaaacataaatatccattggaaaaaacacagtacacgaatgattttctaaagtatttggaaagttttataggtagttgatagaacaaaatacataattttgtaaaaataaatcactttttatactaatatgacacgattaccaatacttttgttactaatatcattagtatacgctacaccttttcctcagacatctaaaaaaataggtgatgatgcaactctatcatgtaatcgaaataatacaaatgactacgttgttatgagtgcttggtataaggagcccaattccattattcttttagctgctaaaagcgacgtcttgtattttgataattataccaaggataaaatatcttacgactctccatacgatgatctagttacaactatcacaattaaatcattgactgctagagatgccggtacttatgtatgtgcattctttatgacatcgcctacaaatgacactgataaagtagattatgaagaatactccacagagttgattgtaaatacagatagtgaatcgactatagacataatactatctggatctacacattcaccagaaactagttctgagaaacctgattatatagataattctaattgctcgtcggtattcgaaatcgcgactccggaaccaattactgataatgtagaagatcatacagacaccgtcacatacactagtgatagcattaatacagtaagtgcaacatctggagaatccacaacagacgagactccggaaccaattactgataaagaagaagatcatacagtcacagacactgtctcatacactacagtaagtacatcatctggaattgtcactactaaatcaaccaccgatgatgcggatctttatgatacgtacaatgataatgatacagtaccatcaactactgtaggtagtagtacaacctctattagtaattataaaaccaaggactttgtagaaatatttggtattaccgcattaattatattgtcggccgtggcaatattctgtattacgtattatatatgtaataaacgttcacgtaaatacaaaacagagaacaaagtctagatttttgacttacataaatgtctgggatagtaaaatctatcatattgagcggaccatctggttcaggaaagacagccatagccaaaagactatgggaatatatttggatttgtggtgtcccataccactagatttcctcgtcctatggaacgagaaggtgtcgattaccattacgttaacagagaggccatctggaagggaatagccgccggaaactttctagaacatactgagtttttaggaaatatttacggaacttctaaaactgctgtgaatacagcggctattaataatcgtatttgtgtgatggatttaaacatcgacggtgttagaagttttaaaaatacttacctaatgccttactcggtgtatataagacctacctctcttaaaatggttgagaccaagcttcgttgtagaaacactgaagctaacgatgagattcatcgtcgcgtgatattggcaaaaacggatatggatgaggccaacgaagcaggtctattcgacactattattattgaagatgatgtgaatttagcatatagtaagttaattcagatactacaggaccgtattagaatgtattttaacactaattaaagacttaagacttaaaacttgataattaataatataactcgtttttatatgtggctatttcaacgtctaatgtattagttaaatattaaaacttaccacgtaaaacttaaaatttaaaatgatatttcattgacagatagatcacacattatgaactttcaaggacttgtgttaactgacaattgcaaaaatcaatgggtcgttggaccattaataggaaaaggtggatttggtagtatttatactactaatgacaataattatgtagtaaaaatagagcccaaagctaacggatcattatttaccgaacaggcattttatactagagtacttaaaccatccgttatcgaagaatggaaaaaatctcacaatataaagcacgtaggtcttatcacgtgcaaggcatttggtctatacaaatccattaatgtggaatatagattcttggtaattaatagattaggtgtagatctagatgcggtgatcagagccaataataatagattaccaaaaaggtcggtgatgttgatcggaatcgaaatcttaaataccatacaatttatgcacgagcaaggatattctcacggagatattaaagcgagtaatatagtcttggatcaaatagataagaataaattatatctagtggattacggattggtttctaaattcatgtctaatggcgaacatgttccatttataagaaatccaaataaaatggataacggtactctagaatttacacctatagattcgcataaaggatacgttgtatctagacgtggagatctagaaacacttggatattgtatgattagatggttgggaggtatcttgccatggactaagatatctgaaacaaagaattgtgcattagtaagtgccacaaaacagaaatatgttaacaatactgcgactttgttaatgaccagtttgcaatatgcacctagagaattgctgcaatatattaccatggtaaactctttgacatattttgaggaacccaattacgacgagtttcggcacatattaatgcagggtgtatattattaagtgtggtgtttggtcgatgtaaaatttttgtcgataaaaattaaaaaataacttaatttattattgatctcgtgtgtacaaccgaaatcatggcgatgttttacgcacacgctctcggtgggtacgacgagaatcttcatgcctttcctggaatatcatcgactgttgccaatgatgtcaggaaatattctgttgtgtcagtttataataacaagtatgacattgtaaaagacaaatatatgtggtgttacagtcaggtgaacaagagatatattggagcactgctgcctatgtttgagtgcaatgaatatctacaaattggagatccgatccatgatcaagaaggaaatcaaatctctatcatcacatatcgccacaaaaactactatgctctaagcggaatcgggtacgagagtctagacttgtgtttggaaggagtagggattcatcatcacgtacttgaaacaggaaacgctgtatatggaaaagttcaacatgattattctactatcaaagagaaggccaaagaaatgagtacacttagtccaggacctataattgattaccacgtctggataggagattgtatctgtcaagttactgctgtggacgtacatggaaaggaaattatgagaatgagattcaaaaagggtgcggtgcttccgatcccaaatctggtaaaagttaaacttggggagaatgatacagaaaatctttcttctactatatcggcggcaccatcgaggtaaccacctctctggaagacagcgtgaataatgtactcatgaaacgtttggaaactatacgccatatgtggtctgttgtatatgatcattttgatattgtgaatggtaaagaatgctgttatgtgcatacgcattcatctaatcaaaatcctataccgagtactgtaaaaacaaatttgtacatgaagactatgggatcatgcattcaaatggattccatggaagctctagagtatcttagcgaactgaaggaatcaggtggatggagtcccagaccagaaatgcaggaatttgaatatccagatggagtggaagacactgaatcaattgagagattggtagaggagttcttcaatagatcagaacttcaggctggtaaattagtcaaatttggtaattctattaattgttaaacatacatctgtttcagctaagcaactaagaacacgtatacggcagcagcttcctttatactctcatcttttaccaacacaaagggtggatatttgttcattggagttgataataatacacacaaagtatttggattcacggtgggttacgactacctcagactggtagagaatgatatagaaaagcatatcaaaagactttgtgttgtgcatttctgtgagaagaaagaggacatcaagtacgcgtgtcgattcatcaaggtatataaacctggggatgaggctacctcgacatacgtgtgcgctatcaaagtggaaagatgctgttgtgctgtgtttgcagattggccagaatcatggtatatggatactaatggtatcaagaagtattctccagatgaatgggtgtcacatataaaattttaattaatgtaactatagagaacaaataataggttgtaatatcatatagacaataactaacaattaattagtaactgttatctcttttttaactaaccaactaactatatacctattaatacatcgtaattatagttcttaacatctattaatcattgattcgcttctttaattttttataaactaacattgttaattgaaaagggataacatgttacagaatataaattatatatggatttttttaaaaaggaaatacttgactggagtgtatatttatctcttcattatatagcacgcgtgtgttccaattcttccacatcccatataatacaggattataatctcattcgaacatacgagaaagtggataaaacaatagttgattttttatctaggttgccaaatttattccatattttagaatatggggaaaatattctacatatttattctatggatgatgctaatacgaatattataattttttttctagatagagtattaaatattaataagaacgggtcatttatacacaatctcaggttatcatcatccattaatataaaagaatatgtatatcaattagttaataatgatcatccagataataggataagactaatgcttgaaaatggacgtagaacaagacattttttgtcctatatatcagatacagttaatatctatatatgtattttaataaatcatggattttatatagatgccgaagacagttacggttgtacattattacatagatgtatatatcactataagaaatcagaatcagaatcatacaatgaattaattaagatattgttaaataatggatcagatgtagataaaaaagatacgtacggaaacacaccttttatcctattatgtaaacacgatatcaacaacgtggaattgtttgagatatgtttagagaatgctaatatagactctgtagactttaatagatatacacctcttcattatgtctcatgtcgtaataaatatgattttgtaaagttattaatttctaaaggagcaaatgttaatgcgcgtaataaattcggaactactccattttattgtggaattatacacggtatctcgcttataaaactatatttggaatcagacacagagttagaaatagataatgaacatatagttcgtcatttaataatttttgatgctgttgaatctttagattatctattatccagaggagttattgatattaactatcgtactatatacaacgaaacatctatttacgacgctgtcagttataatgcgtataatacgttggtctatctattaaacagaaatggtgattttgagacgattactactagtggatgtacatgtatttcggaagcagtcgcaaacaacaacaaaataataatggaagtactattgtctaaacgaccatctttgaaaattatgatacagtctatgatagcaattactaaaaataaacaacataatgcagatttattgaaaatgtgtataaaatatactgcgtgtatgaccgattatgatactcttatagatgtacagtcgctacagcaatataaatggtatattttaaaatgtttcgatgaaatagatatcatgaagagatgttatataaaaaataaaactgtattccaattagttttttgtatcaaagacattaatactttaatgagatacggtaaacatccttctttcgtgaagtgcactagtctcgacgtatacggaagtcgtgtacgtaatatcatagcatctattagatatcgtcagagattaattagtctattatccaagaagctggatgcgggagataaatggtcgtgttttcctaacgaaataaaatataaaatattggaaaactttaacgataacgaactgtccacatatctaaaaatcttataaacactattaaaatataaaatctaagtaggataaaatcacactacatcattgtttccttttagtgctcgacagtgtatactatttttaacactcataaataaaaatgaaaacgatttccgttgttacgttgttatgcgtactacctgctgttgtttattcaacatgtactgtacccactatgaataacgctaaattaacgtctaccgaaacatcgtttaataataaccagaaagttacgtttacatgtgatcagggatatcattcttcggatccaaatgctgtctgcgaaacagataaatggaaatacgaaaatccatgcaaaaaaatgtgcacagtttctgattacatctctgaactatataataaaccgctatacgaagtgaattccaccatgacactaagttgcaacggcgaaacaaaatattttcgttgcgaagaaaaaaatggaaatacttcttggaatgatactgttacgtgtcctaatgcggaatgtcaacctcttcaattagaacacggatcgtgtcaaccagttaaagaaaaatactcatttggggaatatatgactatcaactgtgatgttggatatgaggttattggtgcttcgtacataagttgtacagctaattcttggaatgttattccatcatgtcaacaaaaatgtgatataccgtctctatctaatggattaatttccggatctacattttctatcggtggcgttatacatcttagttgtaaaagtggttttatactaacgggatctccatcatccacatgtatcgacggtaaatggaatcccgtactcccaatatgtgtacgaactaacgaagaatttgatccagtggatgatggtcccgacgatgagacagatttgagcaaactctcgaaagacgttgtacaatatgaacaagaaatagaatcgttagaagcaacttatcatataatcatagtggcgttaacaattatgggcgtcatatttttaatctccgttatagtattagtttgttcctgtgacaaaaataatgaccaatataagttccataaattgctaccgtaaatataaatccgttaaaataattaataattaataattaataattaataacgaacaagtatcaaaagattaaagacttatagctagaatcaattgagatgtcttcttcagtggatgttgatatctacgatgccgttagagcatttttactcaggcactattataacaagagatttattgtgtatggaagaagtaacgccatattacataatatatacaggctatttacaagatgcgccgttataccgttcgatgatatagtacgtactatgccaaatgaatcacgtgttaaacaatgggtgatggatacacttaatggtataatgatgaatgaacgcgatgtttctgtaagcgttggcaccggaatactattcatggaaatgtttttcgattacaataaaaatagtatcaacaatcaactaatgtatgatataattaatagcgtatctataattctagctaatgagagatatagaagcgcttttaacgacgatggtatatacatccgtagaaatatgattaacaagttgtacggatacgcatctctaactactattggcacgatcgctggaggtgtttgttattatctgttgatgcatctagttagtttgtataaataattatttcaatatactagttaaaattttaagattttaaatgtataaaaaactaataacgtttttatttgtaataggtgcattagcatcctattcgaataatgagtacactccgtttaataaactgagtgtaaaactctatatagatggagtagataatatagaaaattcatatactgatgataataatgaattggtgttaaattttaaagagtacacaatttctattattacagagtcatgcgacgtcggatttgattccatagatatagatgttataaacgactataaaattattgatatgtataccattgactcgtctactattcaacgcagaggtcacacgtgtagaatatctaccaaattatcatgccattatgataagtacccttatattcacaaatatgatggtgatgagcgacaatattctattactgcagagggaaaatgctataaaggaataaaatatgaaataagtatgatcaacgatgatactctattgagaaaacatactcttaaaattggatctacttatatatttgatcgtcatggacatagtaatacatattattcaaaatatgatttttaaaaatttaaaatatattatcacttcagtgacagtagtcaaataacaaacaacaccatgagatatattataattctcgcagttttgttcattaatagtatacacgctaaaataactagttataagtttgaatccgtcaattttgattccaaaattgaatggactggggatggtctatacaatatatcccttaaaaattatggcatcaagacgtggcaaacaatgtatacaaatgtaccagaaggaacatacgacatatccgcatttccaaagaatgatttcgtatctttctgggttaaatttgaacaaggcgattataaagtggaagagtattgtacgggactatgcgtcgaagtaaaaattggaccaccgactgtaacattgactgaatacgacgaccatatcaatttgtacatcgagcatccgtatgctactagaggtagcaaaaagattcctatttacaaacgcggtgacatgtgtgatatctacttgttgtatacggctaacttcacattcggagattctgaagaaccagtaacatatgatatcgatgactacgattgcacgtctacaggttgcagcatagactttgccacaacagaaaaagtgtgcgtgacagcacagggagccacagaagggtttctcgaaaaaattactccatggagttcggaagtatgtctgacacctaaaaagaatgtatatacatgtgcaattagatccaaagaagatgttcccaatttcaaggacaaaatggccagagttatcaagagaaaatttaataaacagtctcaatcttatttaactaaatttctcggtagcacatcaaatgatgttaccacttttcttagcatgcttaacttgactaaatattcataactaatttttattaatgatacaaaaacgaaataaaactgcatattatacactggttaacgcccttataggctctaaccattttcaagatgaggtccctgattatagtccttctgttcccctctatcatctactccatgtctattagacgatgtgagaagactgaagaggaaacatggggattgaaaatagggttgtgtataattgccaaagatttctatcccgaaagaactgattgcagtgttcatctcccaactgcaagtgaaggattgataactgaaggcaatggattcagggatatacgaaacaccgataaattataaaaaaagcaatgtgtccgctgtttccgttaataatactattttcgtaactggcggattattcataaataactctaatagcacgatcgtggttaacaatatggaaaaacttgacatttataaagacaaacaatggtcgattatagaaatgcctatggctagggtatatcacggcatcgactcgacatttggaatgttatattttgccggaggtctatccgttaccgaacaatatggtaatttagagaaaaacaacgagatatcttgttacaatcctagaacgaataagtggtttgatatttcatatactatttataagatatccatatcatcattgtgtaaactaaataacgtcttctatgtatttagtaaggacattggatatgtggaaaagtatgatggtgcatggaagttagtacatgatcgtctccccgctataaaggcattatcaacttctccttattgattgaaaatgaaaatataaatagtttttatgtatagcagtattaccctatagttttattgcttactactaacatggatacagatacagatacagatacagatacagatacagatacagatacagatacagatgttacaaatgtagaagatatcataaatgaaatagatagagagaaagaagaaatactaaaaaatgtagaaattgaaaataataaaaacattaacaagaatcatccaagtggatatattagagaagcactcgttattaatacaagtagtaatagtgattccattgataaagaagttatagaatgtatcagtcacgatgtaggaatatagatcatatctactaatttttataatcaatacaaaacataaaaaacaactcgttattacatagcaggcatggaatccttcaagtattgttttgataacgatggcaagaaatggattatcggaaatactttatattctggtaattcaatactctataaggtcagaaaaaatttcactagttcgttctacaattacgtaatgaagatagatcacaaatcacacaagccattgttgtctgaaatacgattctatatatctgtattggatcctttgactatcgacaactggacacgggaacgtggtataaagtatttggctattccagatctgtatggaattggagaaaccgatgattatatgttcttcgttataaagaatttgggaagagtattcgccccaaaggatactgaatcagtcttcgaagcatgtgtcactatgataaacacgttagagtttatacactctcgaggatttacccatggaaaaatagaaccgaggaatatactgattagaaataaacgtctttcactaattgactattctagaactaacaaactatacaagagtggaaactcacatatagattacaacgaggacatgataacttcaggaaatatcaattatatgtgtgtagacaatcatcttggagcaacagtttcaagacgaggagatttagaaatgttgggatattgcatgatagaatggttcggtggcaaacttccatggaaaaacgaaagtagtataaaagtaataaaacaaaaaaaagaatataaaaaatttatagctactttctttgaggactgttttcctgaaggaaatgaacctctggaattagttagatatatagaattagtatacacgttagattattctcaaactcctaattatgacagactacgtagactgtttatacaagattgaaattatattctttttttatagagtgtggtagtgttacggatatctaatattaatattagactatctctatcgcgctacacgaccaatatcgattactatgaatatcttctatgaaaggagagaatgtattcatttctccagcgtcaatctcgtcagtattgacaatactgtattatggagctaatggatccactgctgaacagctatcaaaatatgtagaaacggaggagaacacggataaggttagcgctcagaatatctcattcaaatccataaataaagtatatgggcgatattctgccgtgtttaaagatttctttttgggaaaaattggcgataagtttcaaactgttgacttcactgattgtcgcactatagatgcaatcaacaagtgtgtagatatctttactgaggggaaaatcaatccactattggatgaaccattgtctcctagcaattagtgccgtatactttaaagcaaaatggttgacgccattcgaaaaggaatttaccagtgattatcccttttacgtatcaccaacggaaatggtagatgtaagtatgatgtctatgtacggcgagctatttaatcacgcatctgtaaaggaatcattcggcaacttttcaatcatagaactgccatatgttggagatactagtatgatggtcattcttccagacaagattgatggattagaatccatagaacaaaatctaacagatacaaattttaagaaatggtgtaactctctggatgctatgtttatagatgttcacattcccaagtttaaggtaacaggctcgtataatctggtggatactctagtaaagtcaggactgacagaggtgttcggttcaactggagattatagcaatatgtgtaatttagatgtgagtgtcgacgctatgatccacaaaacgtatatagatgtcaatgaagagtatacagaagcagctgcagcaacttgtgcactggtgtcagactgtgcatcaacaattacaaatgagttctgtgtagatcatccgttcatctatgtgattaggcatgttgatggaaaaattcttttcgttggtagatattgctctccaacaactaattgttaaccattttttttaaaaaaaatagaaaaaacatgtggtattagtgcaggtcgttgttcttccaattgcaattggtaagatgacagccaactttagtacccacgtcttttcaccacagcactgtggatgtgacagactgaccagtattgatgacgtcaaacaatgtttgactgaatatatttattggtcgtcctatgcataccgcaacaggcaatgcgctggacagttgtattccacactcctctcttttagagatgatgcggaattagtgttcatcgacattcgcgagctggtaaaaaatatgccgtgggatgatgtcaaagattgtacagaaatcatccgttgttatataccggatgagcaaaaaaccatcagagagatttcggccatcatcggactttgtgcatatgctgctacttactggggaggtgaagaccatcccactagtaacagtctgaacgcattgtttgtgatgcttgagatgctcaattacgtggattataacatcatattccggcgtatgaattgatgagttgtacatcttgacattttcttctttcttctcttctccctttcccagaaacaaacttttttacccactataaaataaaatgagtatactacctgttatatttcttcctatatttttttattcttcattcgttcagacttttaacgcgtctgaatgtatcgacaaagggtaatattttgcatcattcatggagttagaaaacgagccagtaatcttaccatgtcctcaaataaatacgctatcatccggatataatatattagatattttatgggaaaaacgaggagcggataatgatagaattataccgatagataatggtagcaatatgctaattctgaacccgacacaatcagactctggtatttatatatgcattaccacgaacgaaacctactgtgacatgatgtcgttaaatttgacaatcgtgtctgtctcagaatcaaatatagattttatctcgtatccacaaatagtaaatgagagatctactggcgaaatggtatgtcccaatattaatgcatttattgctagtaacgtaaacgcagatattatatggagcggacatcgacgccttagaaataagagacttaaacaacggacacctggaattattaccatagaagatgttagaaaaaatgatgctggttattatacatgtgttttagaatatatatacggtggcaaaacatataacgtaaccagaattgtaaaattagaggtacgggataaaataatacatcctactatgcaattaccagaaggtgttgtaacttcaataggtagtaatttgactattgcgtgtagagtatcgttgagacctcccacaacggatgcagacgtcttttggataagtaatggtatgtattacgaagaagatgatggggacggagacggtagaataagtgtagcaaataaaatctatatgaccgataagagacgtgttattacatcccggttaaacattaatcctgtcaaggaagaagatgctacaacgtttacgtgtatggcgtttactattcctagcatcagcaaaacagttactgttagtataacgtgaatgtatgttgttacatttccatgtcaattgagtttataagaatttttatacattatcttccaacaagcaattgacgaacgtattgctatgattaactcccacgatactatgcatattattaatcattaacttgcagactatacctagagctattttgacatactcgtgttcttgtgtaattgcagtatctatattattaaagtacgtaaatctagctatagttttattatttaattttagataatataccgtctccttatttttaaaaattgccacatcctttattaaatcatgaatgggaatttctatgtcatcgttagtatattgtgaacaacaagagcagatatctataggaaagggtggaatgcgatacattgatctatgtagttttaaaacacacgcaaactttgaagaatttatataaatcattccatcgatacatccttctatgttgacatgtatatatccaggaattcttttattaatgtcaggaaatgtataaactaaaacattgcccggaagcggagcttctaccggagttatatccgttcttaacttacaaaatgtaaccaatacctttgcatgacttgttttgttcggcaacgttagtttaaacttgacgaatggattaattacaatagcatgatccgcgcatctattaagtttttttactttaacgcccttgtatgtttttacagagactttatctaaatttctagtacttgtatgtgttataaatataacgggatatagaaccgaatcacctaccttagatacccaattacattttatcagatccagataataaacaaattttgtcgccctaactaattctatattgttatatattttacaattggttatgatatcatgtaataacttggaatctaacgcacatcgtcgtacgtttacacaattgtgatttagtgtagtatatctacacatgtatttttccgcgctatagtattctggactagtgataaaactatcgttatatctgtcttcaatgaactcatcgagatattgctctctgtcatattcatacacctgcataaactttctagacatcttacaatccgtgttattttaggatcatatttacatatttactggtataaagatgttagattagttaatgggaatcgtctataataatgaatattaaacaattatatgaggacttttaccacaaagcatcataaaaatgagtcgtcgtctgatttatgttttaaatatcaaccgcaaatcaactcataaaatacaagagaatgaaatatatacatattttagtcattgcaatatagaccatacttctacagaacttgattttgtagttaaaaactatgatctaaacagacgacaacatgtaactgggtatactgcactacactgctatttgtataataattactttacaaacgatgtactgaagatattattaaatcatgacgtaaatgtaacgatgaaaaccagtagcggacgtatgcctgtttatatattgcttactagatgttgtaatatttcacatgatgtagtgatagatatgatagacaaagataaaaaccacttatcgcatagagactattccaacctactactagagtatataaaatctcgttacatgttattgaaggaagaggatatcgatgagaacatagtatcaactttattagataagggaatcgatcctaactttaaacaagacggatatacagcgttacattattattatttgtgtctcgcacacgtttataaaccaggtgagtgtagaaaaccgataacgataaaaaaggccaagcgaattatttctttgtttatacaacatggagctaatctaaacgcgttagataattgtggtaatacaccattccatttgtatcttagtattgaaatgtgtaataatattcatatgactaaaatgctgttgacttttaatccgaatttcaaaatatgtaataatcatggattaacgcctatactatgttatataacttccgactacatacaacacgatattcttgttatgttaatacatcactatgaaacaaatgttggagaaatgccgatagatgagcgtcgtatgatcgtattcgagtttatcaaaacatattctacacgtcctgcagattcgataacttatttgatgaataggtttaaaaatataaatatttatacccgctatgaaggaaagacattattacacgtagcatgtgaatataataatacacaagtaatagattatcttatacgtatcaacggagatataaatgcgttaaccgacaataacaaacacgctacacaactcattatagataacaaagaaaattccccatataccattaattgtttactgtatatacttagatatattgtagataagaatgtgataagatcgttggtggatcaacttccatctctacctatcttcgatataaaatcatttgagaaattcatatcctactgtatacttttagatgacacattttacgataggcacgttaagaatcgcgattctaaaacgtatcgatacgcattttcaaaatacatgtcgttcgataaatacgatggtataataactaaatgtcacgacgaaacaatgttactcaaactgtccactgttctagacactacactatatgcagttttaagatgtcataattcgagaaagttaagaagatacctcaccgagttaaaaaaatataataacgataagtcctttaaaatatattctaatattatgaatgagagataccttaatgtatattataaagatatgtacgtgtcaaaggtatatgataaactatttcctgttttcacagataaaaattgtctactaacattactaccttcagaaattatatacgaaatattatacatgctgacaattaacgatctttataatatatcgtatccacctaccaaagtatagttgtatttttctcatgcgatgtgtgtaaaaaaactgatattatataaatattttagtgccgtataataaagatgacgatgaaaatgatggtacatatatatttcgtatcattatcattattgttattgctattccacagttacgccatagacatcgaaaatgaaatcacagaattcttcaataaaatgagagatactctaccagctaaagactctaaatggttgaatccagcatgtatgttcggaggcacaatgaatgatatggccactctaggagagccattcagtgcaaagtgtcctcctattgaagacagtcttttatcgcacagatataaagactatgtggttaaatgggagaggctagaaaagaatagacggcgacaggtttctaataaacgtgttaaacatggtgatttatggatagccaactatacatctaaattcagtaaccgtaggtatttgtgcaccgtaactacaaagaatggtgactgtgttcagggtatagttagatctcatattaaaaaacctccttcatgcattccaaaaacatatgaactaggtactcatgataagtatggcatagacttatactgtggaattctttacgcaaaacattataataatataacttggtataaagataataaggaaattaatatcgacgacattaagtattcacaaacgggaaaggaattaattattcataatccagagttagaagatagcggaagatacgactgttacgttcattacgacgacgttagaatcaagaatgatatcgtagtatcaagatgtaaaatacttacggttataccgtcacaagaccacaggtttaaactaatactagatccgaaaatcaacgtaacgataggagaacctgccaatataacatgcactgctgtgtcaacgtcattattgattgacgatgtactgattgaatgggaaaatccatccggatggcttataggattcgattttgatgtatactctgttttaactagtagaggcggtatcaccgaggcgaccttgtactttgaaaatgttactgaagaatatataggtaatacatataaatgtcgtggacacaactattattttgaaaaaacccttacaactacagtagtattggagtaaatatacaatgcatttttatatacattactgaattattattactgaattattattactgaattattattaattatatcgtatttgtgctatagaatggatgaagatacgcgactatctaggtatttgtatctcaccgatagagaacatataaatgtagactctattaaacagttgtgtaaaatatcagatcctaatgcatgttatagatgtggatgtacggctttacatgagtacttttataattatagatcagtcaacggaaaatacaagtatagatacaacggttactatcaatattattcatctagcgattatgaaaattataatgaatattattatgatgattatgatagaactggtatgaacagcgagagcgatagtgagagtgataatatatcaatcaaaacagaatatgagaatgaatatgaattctatgatgaaacacaagatcaaagtacacaacacaatgacttataaaaatactaaaactggagagactgattacacgtacctctctaatgggggttgcctgcatactatcgtaatggggtcgatggttgattattgattagtatattccttattcacacaaaaagaacatttttataaacatgaaaccactgtctaaatgtaattatgatcttgatttatagatgaagatcagcctttagaggattttaaccagtatgtttaatatgaaaaaaataaacataacatattttgagattaagcgctattgtgcttaattattttgctctataaactgaatatatagccacaattattgacgggcttgtttatgaccggcaatcatgaatttacagaaattatctctggctatatatcttactgcgacatgttcgtggtgttatgaaacatgcataagaaaaactgcgttgtatcatgacattcaattggagcatgtagaagacaataaagatagtgtagcgtcgctaccgtacaagtagtcaatcaaagagaacgtagtagattgttggctacatttaattggacagatatagctgagggtgttagaaatgagttcattaaaatatgtgatatcaacggaacatatttatataattatactattgctgttagtataattattgattccacggaagaactaccaacagttactccaattacaacaacatatgaaccttctacatataattatactatcgatgatagcactgttattactactgaagaactacaagtgactcctcatatggatctccatcgatgatacatgtattaaaatactttccgaataagtcttttaaatattgtattaattatgaaaaactatgctatgcgagtatgatgcaaagatgtttaatgatacgatactagattttatctctagcgagagatgtcgttagaatcatttatcataactacgtttaataataattcatcaacgaatatcgataacatgtgtcatttatacgttaaagtctgtccgtcttctctattgtttagactgtttgtagaatgctgtgatataaacaaactagtagaaggtacgactccgttacactgttatctaatgaatgaaggatttgaatcatctgttttaaaaaacctattaaaggagtatgtcatgaatacgtttaatgttcatgacatccattacacaaatatttaactcatgatgaagttgagaatgatatgctttctgatagtatagatagctttagctaatataaaaatatattaatccactatatattctagacttgatttaaaaccgataaactactactacgtactgtataagttgttaaaaaaaggagcagaccctaattatgtagatgatagaggtaatacttttcttcattacttctgcatctatatgtccacttatgagaaaacgtcattcaataagatgcatcgtgaaaagaaatttattaaagagttggtaaaatatgaaaccgaaagtaaataatataggaaatacacctctacataactacgtatctcaatatgatatcactctcattcctcatccacaacccattaaaaaaatggaaattaaagccctctattagcataaacggctacaggtctacctttacaatggcctttccttgtgcccagttcagaccctgtcattgccacgctactaaggactccctgaataccgtggccgacgtcagacattgtctgactgaatacatcctgtgggtttctcatagatggacccatagagaaagcgcagggtctctctacaggcttctcatctctttcagaactgatgcaacggagctctttggtggtgagttgaaggattcacttccgtgggacaatatcgacaattgcgtggagatcattaaatgtttcatcagaaatgactccatgaaaaccgccgaagaacttcgtgcaatcattggactttgtactcaatcagctatcgtctctggaagagtcttcaacgataagtatatcgacatactacttatgctgcgaaagattctgaacgagaacgactatctcaccctcttggatcatatccgcactgctaaatactaaatctccttcatgctctctcactacactttttatcatcttatgaggaatgattgccttcatcatttttcgtgaaataggaataattagcaccagaatagctatggattattgtggtagagagtgcactattctatgtcgtctactggatgaagatgtgacgtacaaaaaaataaaactagagattgaaacgtgtcacaacttatcaaaacatatagatagacgaggaaacaatgcgctacattgttacgtctccaataaatgcgatacagacattaagattgttcgactgttactctctcgcggagtcgagagactttgtagaaacaacgaaggattaactccgctaggagcatacagtaagcatagatacgtaaaatctcagattgtgcatctactgatatccagctattcgaattcctctaacgaactcaagtcgaatataaatgatttcgatctgtcttcggataatatcgacttacgtctgctaaaatacctaattgtggataaacggatacgtccgtccaagaatacgaattatgcaatcaatggtctcggattggtggatatatacgtaacgacgcctaatccgagaccagaagtattgctatggcttcttaaatcagaatgttacagcaccggttacgtatttcgtacctgtatgtacaacagtgatatgtgtaagaactctcttcattactatatatcgtctcatagagaatctcaatctctatccaaggatgtaattaaatgtttgatcaataacaatgtttccatccatggcagagacgaaggaggatctttacccatccaatactactggtctttctcaaccatagatatagagattgttaaattattattaataaaggatgtggacacgtgtagagtatacgacgtcagccctatattagaggcgtattatctaaacaagcgatttagagtaaccccatataatgtagacatggaaatcgttaatcttcttattgagagacgtcatactcttgtcgacgtaatgcgtagtattacttcgtacgattccagagaatataaccactacatcatcgataacattctaaagagatttagacaacaggatgaatccatcgtacaagccatgttgataaactacttacattacggcgatatggtcgttcgatgcatgttagataacggacaacaactatcctctgcacgactactttgttaataataatctcgtcgatgtaaacgtcgtaaggtttatcgtggaaaatatggacacgcggctgtaaatcacatatctaacaatggccgtctatgtatgtacggtctgatattatcgagatttaataattgcgggtatcactgttatgaaaccatactaatagatgtatttgatatactaagcaagtacatggatgatatagatatgatcgataatgagaataaaactctactatattacgcggtcgatgtcaataatatacaatttgcaaagcggttattggaatatggagcgagtgttacaacatcacgctcgataatcaatacggccatccagaaaagcagttaccaaagagaaaacaaaacgaggatagttgatttattacttagctaccatcccactctagagactatgattgacgcatttaatagagatatacgctatctatatcctgaaccattattcgcctgtatcagatacgccttaatcctagatgatgattttccttctaaagtaagtatgatatcgccggtcatcataaggaactaaagcgctatagagtagacattaatagaatgaagaatgcctacatatcaggcgtctccatgtttgatatattatttaaacgaagcaaacgccacagactgagatacgcaaagaatccgacatcaaatggtacaaaaaagaactaacgtccatcattacagaaactgtaaagaacagtgagaggatcgactccatagtggacaacattaatacagacgataacttgatttcgaaattacccatggagatactttattactccattaaataatttatcatggagtgataatgtcctgtttcatttgtttccatgacatattacaaaatcgattccgtccaagatgataaaaacatttaccggcatcataaacacggagtttattttatatgtctcgcataaacattactaaaaaaatatattgttctgtttttctttttctttttctttttctttcgtacatctctaattatgaaaaagtaaatgatgaaatgtatgagatgggcgagatggacgagattgtgagcatcgttcgcgacagtatgtggtacatacctaacgtatttatggacgacggtaagaatgaaggtcacgtttctgtcaacaatgtttgtcatatgtattttacgttctttgatgtggatacatcgtctcatctgtttaagctagttattaaacactgcgatctgaataaacgaggtaactctccattacattgctatacgatgaatacacgatttaatccatctgtattaaagatattgttacaccacggcatgcgtaactttgatagcaaggatgaaaaaggacaccactatctgattcattcactatcaatcgataacaagatctttgatatactaacggacaccattgatgactttagtaaatcatccgatctattgctgtgttatcttagatataaattcaatgggagcttaaactactacgttctgtacaaaggatccgaccctaattgcgccgacgaggatgaactcacttctcttcattactactgtaaacacatatccacgttctacaaaagcaattattacaagttaagtcacactaagatgcgagccgagaagcgattcatctacgcgataatagattatggagcaaacattaacgcggttacacacttaccttcaacagtataccaaacatagtcctcgtgtggtgtatgctcttttatctcgaggatacgtaataatcttgattgtacacccatcatggaacgattgtgcaacaggtcatattctcataatgttactcaattggcacgaacaaaaggaagaaggacaacatctactttatctattcataaaacataatcaaggatacactctcaatatactacggtatctactagataggttcgacattcagaaagacgaatacatataccgcctttcaaaattgtaacaacaatgttgcctcatacatcggatacgacatcaaccttccgactaaagacggtattcgacttggtgtttgaaaacagaaacatcatatacaaggcggatgttgtgaatgacatcatccaccacagactgaaagtatctctacctatgattaaatcgttgttctacaagatgtcagaattctctccctacgacgattactacgtaaaaaagatactagcctactgcctattaagggacgagtcattcgcggaactacatagtaaattctgtttaaacgaggactataaaagtgtatttatgaaaaatatatcattcgataagatagattccatcatcgtgacataagtcgcctcaaagagattcgaatctccgacaccgacctgtatacggtatcacagctatcttgaagccatacattcggacagacacatttcatttcccatgtacgacgatctcatagaacagtgccatctatcgatggagcgtaaaagtaaactcgtcgacaaagcactcaataaattagagtctaccatcggtcaatctagactatcgtatttgcctccggaaattatgcgcaatatcatctaaacagtatgttgtacggaaagaaccattacaaatattatccatgatagaaagaaaatatctatatgattggagaagtaggaaacaggaacacgacaacgattactacattattaaattatgaagtccgtattatactcgtatatattgtttctctcatgtataataataaacggaagagatatagcaccgcatgcaccatccgatggaaagtgtaaagacaacgaatacaaacgccataatttgtgtccgggaacatacgcttccagattatgcgatagcaagactaacacacaatgtacgccgtgtggttcgggtaccttcacatctcgcaataatcatttacccgcttgtctaagttgtaacggaagacgcgatcgtgtaacactactcacaatagaatctgtgaatgctctcccggatattattgtcttctcaaaggatcatccggatgcaaggcatgtgtttcccaaacaaaatgtggaataggatacggagtatccggagacgtcatctgttctccgtgtggtctcggaacatattctcacaccgtctcttccgcagataaatgcgaacccgtacccagaaatacctttaactatatcgatgtggaaattaatctgtatcccgtcaacgacacgtcgtgtactcggacgaccactaccggtctcagtgaatccatctcaacgtcggaactaactattactatgaatcataaagactgtaatcccgtatttcgtgatggatacttctccgttcttaataaggtagcgacttcaggattctttacaggagaaaggtgtgcactctgaatttcgagattaaatgcaataacaaagattcttcctccaaacagttaacgaaagcaaagaatgatgacggtatcatgccgcattcggagactgtatatctagcgtcgacatctatatactatatagtaataccaatactcaagactacgaaactgatacaatctcttatcatgtgggtaatgttctcgatgtcgatagccatatgcccggtagttgcgatatacataaactgatcactaattccaaacccacccgctttttatagtaagtttttcacccataaataataaatacaataattaatttctcgtaaaagtagaaaatatattctaatttattgcatggtaaggaagtagaatcataaagaacagtactcaatcaatagcaattatgaaacaatatatcgtcctggcatgcatgtgcctgccagtcttcagcaatcatcctcatcctcctcctcgtgtacggaagaagaaaacaaacatcatatgggaatcgatgttattatcaaagtcacaaagcaagaccaaacaccgaccaatgataagatttgccaatccgtaacggaaattacagagtccgagtcagatccagatcccgaggtggaatcagaagatgattccacatcagtcgaggatgtagatcctcctaccacttattactccatcatcggtggaggtctgagaatgaactttggattcaccaaatgtcctcagattaaatccatctcagaatccgctgatggaaacacagtgaatgctagattgtccagcgtgtccccaggacaaggtaaggactctcccgcgatcactcgtgaagaagctctggctatgatcaaagactgtgaggtgtctatcgacatcagatgtagcgaagaagagaaagacagcgacatcaagacccatccagtactcgggtctaacatctctcataagaaagtgagttacgaagatatcatcggttcaacgatcgtcgatacaaaatgtgtcaagaatctagagtttagcgttcgtatcggagacatgtgcaaggaatcatctgaacttgaggtcaaggatggattcaagtatgtcgacggatcggcatctgaaggtgcaaccgatgatacttcactcatcgattcaacaaaactcaaagcgtgtgtctgaatcgataactctattcatctgaaattggatgagtagggttaatcgaacgattcaggcacaccacgaattaaaaaagtgtaccggacactatattccggtttgcaaaacaaaaatgttcttaactacattcacaaaaagttacctctcgttacttcttctttttctgtctcaatagtgtgatacgattatgacactattcctattcctattcctatttcctttcagggtatcacaaaaatattaaacctctttctgatggtctcataaaaaaagttttacaaaaatatttttattctctttctctctttgatggtctcataaaaaaagttttacaaaaatatttttattctctttctctctttgatggtctcataaaaaaagttttacaaaaatatttttattctctttctctctttgatggtctcataaaaaaagttttacaaaaatatttttattctctttctctctttgatggtctcataaaaaaagttttacaaaaatatttttattctctttctctctttgatggtctcataaaaaaagttttacaaaaatatttttattctctttctctctttgatggtctcataaaaaaagttttacaaaaatatttttattctctttctctcttcgatggtctcacaaaaaaagttttacaaaaatatttttattctctttctctctttgatggtctcataaaaaaagttttacaaaaatatttttattctctttctctctttgatggtctcataaaaaatattaaacctctttctgatggtgtcactaaaatatttttattctcattctcattttctctttctctcttcaatggagtcataaaatatttttattctctttctctcttcgatggtctcacaaaaatattaaacctctttctgatggtgtcactaaaatatttttattctcattctcattttctctttctctcttcaatggagtcataaaatatttttattctctttctctcttcgatggtctcacaaaaatattaaacctctttctgatggagtcgtaaaaaagttttatctctttctctcttcgatggtctcactaaaatattttttattctctttctgatgcatcaactatttcttaaacaataacgtccaacaacatatactcgtcgagcttatcaacatcccctatgcccatctaggttaccagacaattgtatatcataaaataatgtttataatttacacgttaaaatcatataataaaacgtagatcgtataatattttttggtatataaatgatctagtaaaatccatgtaggggatactgctcacattttttctttggtacaaaatttcacacaagtttttatacagacaaattcttgtccatatattttaaaacattgacttttgtactaagaaaaatatctagactaactatctctttctctttctctcttcgatggtctcacaaaaatattaaacctctttctgatggagtcgtaaaaaagttttatctctttctctcttcgatggtctcacaaaaatattaaacctctttctgatggagtcgtaaaaaagttttatctctttctctcttcgatggtctcacaaaaatattaaacctctttctgatggagtcgtaaaaaagttttatctttctctcttcgatggtctcacaaaaatattaaacctctttctgatggagtcgtaaaaaagttttatctctttctctcttcgatggtctcacaaaaatattaaacctctttctgatggagtcgtaaaaaagttttatctctttctctcttcgatggtctcacaaaaatattaaacctctttctgatggagtcgtaaaaaagttttatctctttctctcttcgatggtctcacaaaaatattaaacctctttctgatggagtcgtaaaaaagttttatctctttctctcttcgatggtctcacaaaaatattaaacctctttctgatggagtcgtaaaaaagttttatctctttctctcttcgatggtctcacaaaaatattaaacctctttctgatggagtcgtaaaaaagttttatctctttctctcttcgatggtctcacaaaaatattaaacctctttctgatggagtcgtaaaaaagttttatctctttctctcttcgatggtctcacaaaaatattaaacctctttctgatggagtcgtaaaaaagttttatctctttctctcttcgatggtctcacaaaaatattaaacctctttctgatggagtcgtaaaaaagttttatctctttctctcttcgatggtctcacaaaaatattaaacctctttctgatggagtcgtaaaaaagttttatctctttctctcttcgatggtctcacaaaaatattaaacctctttctgatggagtcgtaaaaaagttttatctctttctctcttcgatggtctcacaaaaatattaaacctctttctgatggagtcgtaaaaaagttttatctctttctctcttcgatggtctcacaaaaatattaaacctctttctgatggagtcgtaaaaaagttttatctctttctctcttcgatggtctcacaaaaatattaaacctctttctgatggagtcgtaaaaaagttttatctctttctctcttcgatggtctcacaaaaatattaaacctctttctgatggagtcgtaaaaaagttttatctctttctctcttcgatggtctcacaaaaatattaaacctctttctgatggagtcgtaaaaaagttttatctctttctctcttcgatggtctcacaaaaatattaaacctctttctgatggagtcgtaaaaaagttttatctctttctctcttcgatggtctcacaaaaatattaaacctctttctgatggagtcgtaaaaaagttttatctctttctctcttcgatggtctcacaaaaatattaaacctctttctgatggagtcgtaaaaaagttttatctctttctctcttcgatggtctcacaaaaatattaaacctctttctgatggagtagtcgtaaaaaagttttatctctttctctcttcgatggtctcacaaaaatattaaacctctttctgatggagtcgtaaaaaagttttatctctttctctcttcgatggtctcacaaaaatattaaacctctttctgatggagtcgtaaaaaagttttatctctttctctcttcgatggtctcacaaaaatattaaacctctttctgatggagtcgtaaaaaagttttatctctttctctcttcgatggtctcacaaaaatattaaacctctttctgatggagtcgtaaaaaagttttatctctttctccttcgatggtctcacaaaaatattaaacctctttctgatggagtcgtaaaaaagttttatctctttctccttcgatggtctcacaaaaatattaaacctctttctgatggagtcgtaaaaaagttttatctctttctcctttctcacaaaaatattaaacctctttctgatggagtcgtaaaaaagttttatctctttctcctttctcacaaaaatattaaacctctttctgatggagtctccttcgatggtctcacaaaaatattaaacctctttctgatggagtcgtaaaaaagttttatctctttctccttcgatggtctcacaaaaatattaaacctctttctgatggagtcgtaaaaaagttttatctctttctccttcgatggtctcacaaaaatattaaacctctttctgatggagtcgtaaaaaagttttatctctttctccttcgatggtctcacaaaaatattaaacctctttctgatggagtcgtaaaaaagttttatctctttctcctttctcacaaaaatattaaacctctttctgatggagtcgtaaaaaagttttatctctttctccttcgatggtctcacaaaaatattaaacctctttctgatggagtcgtaaaaaagttttatctctttctccttcgatggtctcacaaaaatattaaacctctttctgatggagtcgtaaaaaagttttatctctttctccttcgatggtctcacaaaaatattaaacctctttctgatggtctctataaagcgattgatttttcttaccctctagagtttcctacggtcgttggtcacacatttttttctagacactaaataaatagtaaaattaaattaattataaaattatgtatatgatttactaactttagttagataagttagtaatacataaattttagtatattaatattatattttaaa

SEQ ID NO: 20 - DNA, 183369 bp, Artificial Sequence
  LIVP 1.1.1
tttttttatgagaccatcaaagagagaaagagaataaaaatatttttgtaaaactttttttatgagaccatcaaagagagaaagagaataaaaatatttttgtaaaactttttttatgagaccatcaaagagagaaagagaataaaaatatttttgtaaaactttttttatgagaccatcaaagagagaaagagaataaaaatatttttgtaaaactttttttatgagaccatcaaagagagaaagagaataaaaatatttttgtaaaactttttttatgagaccatcaaagagagaaagagaataaaaatatttttgtaaaactttttttatgagaccatcaaagagagaaagagaataaaaatatttttgtaaaactttttttatgagaccatcaaagagagaaagagaataaaaatatttttgtaaaactttttttatgagaccatcaaagagagaaagagaataaaaatatttttgtaaaactttttttatgagaccatcaaagagagaaagagaataaaaatatttttgtaaaactttttttatgagaccatcagaaagaggtttaatatttttgtgatactctgaaaggaaataggaataggaataggaatagtgtcataatcgtatcacactattgagacagaaaaagaagaagtcgcgagaggtaactttttgtgaatgtagttaagaacatttttgttttgcaaaccggaatatagtgtccggtacacttttttaattcgtggtgtgcctgaatcgttcgattaaccctactcatccaatttcagatgaatagagttatcgattcagacacacgctttgagttttgttgaatcgatgagtgaagtatcatcggttgcaccttcagatgccgatccgtcgacatacttgaatccatccttgacctcaagttcagatgattccttgcacatgtctccgatacgaacgctaaactctagattcttgacacattttgtatcgacgatcgttgaaccgatgatatcttcgtaactcactttcttatgagagatgttagacccgagtactggatgtcgctgtctttctcttcttcgctacatctgatgtcgatagacacctcacagtctttgatcatagcaagagcttcttcatgagtccttaccttgtcctggggacacgctggacaatctagcattcactgtgtttccatcagcggattctgagatggatttaatctgaggacatttggtgaatccaaagttcattctcagacctccaccgatgatggagtaataagtggtaggaggatctacatcctcgactgatgtggaatcatcttctgattccacctcgggatctggatctgactcggactctgtaatttccgttacggattggcaaatcttatcattggtcggtgtttggtcttgctttgtgactttgataataacatcgattcccatatgatgtttgttttcttcttccgtacacgaggaggaggatgaggatgattgctgaagactggcaggcatagcagctgccgccaggcacatgcatgccaggacgatatattgtttcataattgctattgattgagtactgttctttatgattctacttccttaccgtgcaataaattagaatatattttctacttttacgagaaattaattattgtatttattatttatgggtgaaaaacttactataaaaagtgggtgggtttggaattagtgatcagtttatgtatatcgcaactaccgggcatatggctatcgacatcgagaacattacccacatgataagagattgtatcagtttcgtagtcttgagtattggtattactatatagtatatagatgtcgcccactagagttactgtctccgaatgcggcatgatagtatcattctttgctttcgttaactgtttggaggaagaatctttgttattgcatttaatctcgaaattcagagtgcacacctttctcctgtaaagaaacctgaagtcgctaccttattaagaacggagaagtatccatcacgaaagacgggattacagtctttatgattcatagtaatagttagttccgacgttgagatggattcgctgagaccggtagtggtcgtccgagtacacgacgtgtcgttgacgggatacaggttaatttccacatcgatatagttaaaggtatttctgggtacgggttcgcatttatctgcggaagagacggtgtgagaatatgttccgagaccacacggagaacagatgacgtctccggatactccgtatcctattccacattttgtttgggaaacacatgccttgcatccggatgatcctttgagaagacaataatatccgggagagcattcacagattctattgtgagtcgtgttacacgatcgcgtcttccgttacaacttagacaagcgggtaaatgattattgcgagatgtgaaggtacccgaaccacacggcgtacattgtgtgttagtcttgctatcgcataatctggaagcgtatgttcccggacacaaattatggcgtttgtattcgttgtctttacactttccatcggatggtgcatgcggtgctatatctcttccgtttattattatacatgagagaaacaatatatacgagtataatacggacttcatgatttaataatgtagtaatcgtcgtcttgttcctgtttcctacttctccaatcatatagatattttctttctatcatggataatatttgtaatggttctttccgtacaacatactgtttagatgatattgcgcataatttccggaggcaaatacgatagtctagattgaccgatggtagactctaatttattgagtgctttgtcgacgagtttacttttacgctccatcgatagatggcactgttctatgagatcgtcgtacatgggaaatgaaatgtgtctgtctgaatgtatggctttaagatagctgtgataccgtatacaggtcggtgtcggagattcgaatctctttaaggcgacttatgtcacgatgatggaatctatcttatcgaatgatatatttttcataaatacacttttatagtcctcgtttaaacagaatttactatgtagttccgcgaatgactcgtcccttaataggcagtaggctagtatcttttttacgtagtaatcgtcgtagggagagacatcttgtagaacaacgatttaatcataggtagagatactttcagtctgtggtggatgatgtcattcacaacatccgccttgtatatgatgtttctgttttcaaacaccaagtcgaataccgtctttagtcggaaggttgatgtcgtatccgatgtatgaggcaacattgttgttacaattttgaaaggcggtattatagtattcgtctttctgaatgtcgaacctatctaatagataccgtagtatattgagagtgtatccttgattatgttttatgaatagataaagtagatgttgtccttcttccttttgttcgtgccaattgagtaacattatgagaatatgacctgttgcacaatcgttccatgatgggtgtacaatcaagattattacgtatcctcgtatcggctcctcgagataaaagagcatacaccacacgaggactatgtttggtatactgttgaaggtaagtgtgtaaccgcgttaatgtttgctccataatctattatcgcgtagatgaatcgcttctcggctcgcatcttagtgtgacttaacttgtaataattgctttcgtagaacgtggatatgtgtttacagtagtaatgaagagaagtgagttcatcctcgtcggcgcaattagggtcggatcctttgtacagaacgtaatagtttaagctcccattgaatttatatctaagataacacagcaatagatcggatgatttactaaagtcatcaatggtgtccgttagtatatcaaagatcttgttatcgattgatagtggtcatccttgctatcaaagttacgcatgccgtggtgtaacaatatctttaatacagatggattaaatcgtgtattcatcgtatagcaatgtaatggagagttacctcgtttattcagatcgcagtgtttaataactagcttaaacagatgagacgatgtatccacatcaaagaacgtaaaatacatatgacagacattgttgacagaaacgtgaccttcattcttaccgtcgtccataaatacgttaggtatgtaccacatactgtcgcgaacgatgcgtacaatctcgtccatctcataatgatttactttttcataattaaagatgtgaaagaaaaccgaacaatatatttttttagtaatgtttatgcgagacatataaaataaactccgtgtttatgatgccggtaaatgtttttatcatcttggacggaatcgattttgtaatatgtcatggaaacaaatgaaacaggacattatcgctccatgataaattatttaatggagtaataaagtatctccatgggtaatttcgaaatcaagttatcgtctgtattaatgttgtccactatggagtcgatcctctcattgttctttacagtttctgtaatgatggacgttagttcttttttgtaccatttgatgtcggattctttgcgtatctcaatttgtggcgtttgcttcgtttaaataatatatcaaacatggagacgcctgatatgtagacattcttcattctattaatgtctactctatagcgctttagttccttatgacgaccggcgatatcatactttactttagaaggaaaatcatcatctaggattaaggcgtatctgatacaggcgaataatggttcaggatatagatagcgtatatctctattaaatgcgtcaatcatagtctctagagtgggatggtaactcagtaataaatcaactagcttcgttttgttttctctttggtaactgcttttctggatggccgtattgattatcgagcgtgacactcgctccatattccaataaccgctttgcaaattgtatattattgacatcgaccgcgtaatatagtagagttatcgatcatatctatatcatccatgtacttgcttagtatatcaaatacatctatcagtatggtttcataacagtgatacccgcaattattaaatctcgataatatcagaccgtacatacatagacggccattgttcgatacgtgatttacagccgcgtgtccatattttccacgataaaccttacgacgtttacatcgacgagattattattaacaaagtagtcgtgcagaggatagttgttgtccgttatctaacatgcatcgaacgaccatatcgccgtaatgtaagtagtttatcaacatggcttgtacatcctgttgtctaaatctctttagaatgttatcgatgatgtagtggttatattctctggaatcgtacgaagtaatactacgcattacgtcgacaagagtatgacgtctctcaataagaagattaacgatttccatgtctacattatatggggttactctaaatcgcttgtttagataatatagggctgacgtcgtatactctacacgtgtccacatcctttattaataataatttaacaatctctatatctatggttgagaaagaccagtagtattggatgggtaaagatcctccttcgtctctgccatggatggaaacattgttatcgatcaaacatttaattacatccttggatagagattgagattctctatgagacgatatatagtaatgaagagagttcttacacatatcactgtcgtacatacaggtacgaaatacgtaaccggtgctgtaacattctgatttaagaagccatagcaatacttctggtctcggattaggcgtcgttacgtatatatccaccaatccgagaccattgattgcataattcgtattcttggacggacgtatccgtttatccacaattaggtattttagcagacgtaagtcgatattatccgaatacagatcgaaatcatttatattcgacttgagttcgttagaggaatttgaatagctggatatcagtagatgcacaatctgagattttacgtatctatgcttactgtatactcctagcggagttaatccttcgttgtttctacaaagtctctcgactccgcgagagaacaatcttaatgtctgtatcgcatttattggagacgtaacaatgtagcgcattgtttcctcgtctatctatatgttttgataagttgtgacacgtttcaatttctagttttatttttttgtacgtcacatcttcatccagtagacgacatagaatagtgcactctctaccacaataatccatagctattctggtgctaattattcctatttcacgaaggcaatcattcctcataagatgataaaaagtgtagtggagatttagtatttagcagtgcggatatgatccaagagggtgagatagtcgttctcgttcagaatctttcgcagcataagtagtatgtcgatatacttatcgttgaagactctttataaaagtctatttgtttatatttattgcggatagcagtatttccctataaaaagtatacgtcctgtggtgtctttaatcatgtacatgaatggatggtttatgtagaccttcgtacgatataccatcgaaaagttaatcgtaaatactcctgtaacggccgatgcttctgtatactcctcattaacatctataaacgtcgtatgtagaaatttttctacagtgatagtttcattacacatcttgctaaaatctgcataatatccgaatatattagtaagtcctaaattttctaaaatcggtaccagattatacggttctgtcatttccactttaaactttggcatatacaagtctatacttttagtagataacataccacaccattttttaaatttttcatctgttatatttttttctatgttatatataccttctatgtcgtccggtagtataattaccatactagagtttccctcgtatggaatatcgataatagagaatcctccgaataattcattaatatgtacatattgcaagttattctcggtacccaccatcatatcaacgctggtaactatattcttagaaatataaaacttgtctgtatatgtaagatgtttagaaaatggatatttccacattgctttaaaatggacggcgctaacaactgtcatacgagtattaatggatagcggactagtcaataaggaattaattttaccatttgtcattgtcttaacccattcgttgattagttcctttgtttggttagcattattaaagtttacagtttgaaaatcgtcttttattttttgtaggaaggaggcgtggaactcgatactatcgctaccgtatattttatttgcggtagctagtgtcgcacaatacggaatatctacctccatgtcatcattattgtcatcgggtgtattctcattcatattctctatatattttgatagttgttcagctgtagaaccagctgctccatgatttagaatagataaagtagataaaatagaaactggagaaatcaaaacattttcatccgtgtgttttaagattagttctttaaagatatccatggtatagaccaaacaataacgataacgatatatatcataaataaataatgttaaatttcagtttatgtttgtaccccgtattcatacttaacaaattggtattgcgtacacaatcaatcatattacataccattaataatgcaagcataaaaaattgttagtagatgtttctaaatataggttccgtaagcaaagaatataagaatgaagcggtaatgataaaatcaatcgttatctaaaatgatcatactcatttattttattctattatattaacacatacatttttaacagcaacacattcaatattgtattgttatttttatattatttacacaattaacaatatattattagtttatattactgaattaataatataaaattcccaatcttgtcataaacacacactgagaaacagcataaacacagaatccatcaaaaatgttgataaattatctgatgttgttgttcgctgctatgataatcagatcattcgccgatagtggtaacgctatcgaaacgacattgccagaaattacaaacgctacaacagatattccagctatcagattatgcggtccagagggagatggatattgtttacacggtgactgtatccacgctagagatattgacggtatgtattgtagatgctctcatggttatacaggcattagatgtcagcatgtagtattagtagactatcaacgttcagaaaacccaaacactacaacgtcatatatcccatctcccggtattatgcttgtattagtaggcattattatgtgttgtctattatctgtttataggttcactcgacgaactaaactacctatacaagatatggttgtgccataatttttataaatttttttatgagtatttttacaaaaatgtataaagtgtatgtcttatgtatatttataaaaatgctaagtatgcgatgtatctatgttatttgtatttatctaaacaatacctctacctctagatattatacaaaaattttttatttcggcatattaaagtaaaatctagttaccttgaaaatgaatacagtgggtggttccgtatcaccagtaagaacataatagtcaaatacagtatccgattgagattttgcatacaatactagtctagaaagaaatttgtaatcatcttctgtgacgggagtccatatatctgtatcatcgtctagtttatcagtgtcccatgctatattcctgttatcatcattagttaatgaaaataactctcgtgcttcagaaaagtcaaatattgtatccatacatacatctccaaaactatcgcttatacgtttatctttaacgatacctatacctagatggttatttactaacagacattttccagatctattgactataactcctatagtttccacatcaaccaagtaatgatcatctattgttatataacaataacataactcttttccatttttatcagtatgtatatctatatcaacgtcgtcgttgtagtgaatagtagtcattgatctattatatgaaacggatatgtctagaacggcaattgttttacgtccagttaacactttcgttgatttaaagtctagagtctttgcaaacataatatccttatccgactttatatttcctgtagggtggtataattttattttgcctccacatatcggtgtttccaaatatattactagacaatattccatatagttattagttaagggtacccaattagaacacgtacgcttattatcatcatttggatcgtatttcataaaagttattgtgttatcgatgtcaacacattctacattttttaatcgtctatatagtatttttctgatattttctataatatcagaattgtcttccatcggaagttgtatactatcggaatcagttacatgtttaaataattctctgatgtcattccttatacaatcaaattcattattaaacagtttaatagtctgtagacctttatcgtcgtaaatatccattgtcttattagttacgcttatttttatgtgtttttacgttgctttattatattttataagaatgattgtttgacgaatcacgagaactattaagacacattattaggtatatattataaaaaagtttttgattacgatgttataagaggaaagaggacacattaacatcatacatcaattaactacattcttataacatcgtaatcaaaagaattgcaattttgatgtataacaactgtcaatgggttatggaattgtatattacatattatacggtatgttggtaacgacaaataccggtcggtaattgtctgccggtgtaatagaattatatatatctatctattacaccggccttgtatacataataataagttgtggtagtatgatctccatatttataatttaggactttgtattcagtatttttggaatcataaaaaataaaaaaaagttttactaatttaaaatttaaaaagtatttacatttttttcactgtttagtcgcggatatggaattcgatcctgccaaaatcaatacatcatctatagatcatgtaacaatattacaatacatagatgaaccaaatgatataagactaacagtatgcattatccgaaatattatatcaatatcacaaaaataaatacacatttggctaatcaatttcgggcttggaaaaaacgtatcgccggaagggactatatgactaacttatctagagatacaggaatacaacaatcaaaacttactgaaactatacgtaactgtcaaaaaaatagaaacatatatggtctatatatacactacaatttagttattaattggataaccgatgtgattatcaatcaatattaagagggttggtaaattggtacatagctaataatacctatactccaaatacacccaataatacaacaaccatttctgagttggatatcatcaaaatactggataaatacgaggacgtgtatagagtaagtaaagaaaaagaatgtggaatttgctatgaagttgtttactcaaaacgatagatactttggtttattggattcgtgtactcatatattttgcataacatgcatcaatatatggcatagaacacgaagagaaaccggtgcgtcggataattgtcctatatgccgtacccgttttagaaacataacaatgagcaagttctataagctagttaactaataaataaaaagtttaatttgttgacgacgtatgtcgttattttttctcgtataaaagattaatttgattctaatataatctttagtattggataaatatcaattcaaattaattccattagattatatcataaataaaaatagtagcacgcactacttcagccaaatattcttttttgaaacgccatctatcgtagtgaggacacaagtgaacctataattatcaaatttattagtatcggttacatgaaggactttacgtagagtgacgattccactatctgtggtacgaacggtttcatcttctttgatgccatcacccagatgttctataaacttggtatcctcgtccgatctcatatcctttgccaaccaatacatgtagctaaaattaggcataaatttcacacatcctgaacaatgaaattctccagaagatgttacaatgtctagatttggacatttggtttcaaccgcgttaacatatgagtgaacacacccatacatgaaagcgatgagaaataggattctcatcttgccaaaatatcactagaaaaaatttatttatcagttttaaaggtataaaaaatacttattgttgctcgaatattttgtatttgatggtatacggaagattagaaatgtaggtattatcatcaactgattctatggttttatgtattctatcatgtttcactattgcgttggaaataatatcatatgcttccacatatattttattttgttttaactcataatactcacgtaattctggattattggcatatctatgaataattttagctccatgatcagtaaatattaatgagaacatagtattaccacctaccattatttttttcatctcattcaattcttaattgcaaagatctatataatcattatagcgttgacttatggactctggaatcttagacgatgtacagtcatctataatcatggcatatttaatacattgttttatagcatagtcgttatctacgatgttagatatttctctcaatgaatcaatcacacaatctaatgtaggtttatgacataatagcattttcagcagttcaatgtttttagattcgttgatggcaatggctatacatgtatatccgttatttgatctaatgttgacatctgaaccggattctagcagtaaagatactagagattgtttattatatctaacagccttgtgaagaagtgtttctcctcgtttgtcaatcatgttaatgtctttaagataaggtaggcaaatgtttatagtactaagaattgggcaagcataagacatgtcacaaagacccttttttgtatgtataagtgtaaaaattataacatccatagttggatttacataggtgtccaatcgggatctctccatcatcgagataattgatggcatctcccttccttttttagtagatatttcatcgtgtaagaatcaatattaatatttctaaagtatccgtgtatagcctctttatttaccacagctccatattccactagagggatatcgccgaatgtcatatactcaattagtatatgttggaggacatccgagttcattgttttcaatatcaaagagatggtttccttatcatttctccatagtggtacaatactacacattattccgtgcggctttccattttccaaaaacaatttgaccaaatctaaatctacatctttattgtatctataatcactatttagataatcagccataattcctcgagtgcaacatgttagatcgtctatatatgaataagcagtgttatctattcctttcattaacaatttaacgatgtctatatctatatgagatgacttaatataatattgaagagctgtacaatagtttttatctataaaagacggcttgattccgtgattaattagacatttaacaacttccggacgcacatatgctctcgtatccgactttgaatacagatgagagatgatatacagatgcaatacggtaccgcaatttcgtagttgataatcatcatacgcgtatcagtactcgtcctcataaagaacactgcagccattttctatgaacaaatcaataattttagaaacaggatcattgtcattacataattttctataactgaacgatggttttcacatttaacactcaagtcaaatccatgttctaccaacacctttatcaagtcaacgtctacatttttggatttcatatagctgaatatattaaagttatttatgttgctaaatccagtggcttctagtagagccatcgctatatccttattaactttaacatgtctactatttgtgtattcttctaatggggtaagctgtctccaatttttgcgtaatggattagtgccactgtctagtagtagtttgacgacctcgacattattacaatgctcattaaaaaggtatgcgtgtaaagcattattcttgaattggttcctggtatcattaggatctctgtctttcaacatctgtttaagttcatcaagagccacctcctcattttccaaatagtcaaacattttgactgaatgagctactgtgaactctatacacccacacaactaatgtcattaaatatcatgtcaaaaacttgtacaattattaataaaaataatttagtgtttaaattttaccagttccagattttacacctccgttaatacctccattaaccccactggacgatcctcctccccacattccaccgccaccagatgtataagttttagatcctttattactaccatcatgtccatggataaagacactccacatgccgccactaccccctttagaagacatattaataagacttaaggacaagtttaacaataaaattaatcacgagtaccctactaccaacctacactattatatgattatagtttctatttttacagtaccttgactaaagtttctagtcacaagagcaatactaccaacctacactattatatgattatagtttctatttttataggaacgcgtacgagaaaatcaaatgtctaatttctaacggtagtgttgataaacgattgttatccgcggatacctcctctatcatgtcgtctattttcttactttgttctattaacttattagcattatatattatttgattataaaacttatattgcttattagcccaatctgtaaatatcggattattaacatatcgtttctttgtaggtttatttaacatgtacatcactgtaagcatgtccttaccatttattttaatttgacgcatatccgcaatttctttttcgcagtcggttataaattctatatatgatggatacatgctacatgtgtacttataatcgactaatatgaagtacttgatacatattttcagtaacgatttattattaccacctatgaataagtacctgtgatcgtctaggtaatcaactgttttcttaatacattcgatggttggtaatttactcagaataatttccaatatcttaatatataattctgctatttctgggatatatttatctgccagtataacacaaatagtaatacatgtaaacccatattttgttattatattaatgtctgcgccattatctattaaccattctactaggctgacactatgcgactcaatacaatgataaagtatactacatccatgtttatctattttgtttatatcatcaatatacggcttacaaagttttagtatcgataacacatccaactcacgcatagagaaggtagggaataatggcataatatttattaggttatcatcattgtcattatctacaactaagtttccattttttaaaatatactcgacaactttaggatctctattgccaaatttttgaaaatatttatttatatgcttaaatctatataatgtagctccttcatcaatcatacatttaataacattgatgtatactgtatgataagatacatattctaacaatagatcttgtatagaatctgtatatcttttaagaattgtggatattaggatattattacataaactattacacaattctaaaatataaaacgtatcacggtcgaataatagttgatcaactatataattatcgattttgtgatttttcttcctaaactgtttacgtaaatagttagatagaatattcattagttcatgaccactatagttactatcgaataacgcgtcaaatatttcccgtttaatatcgcatttgtcaagataataatagagtgtggtatgttcacgataagtataataacgcatctctttttcgtgtgaaattaaatagtttattacgtccaaagatgtagcataaccatcttgtgacctagtaataatataataatagagaactgttttacccattctatcatcataatcagtggtgtagtcgtaatcgtaatcgtctaattcatcatcccaattataatattcaccagcacgtctaatctgttctattttgatcttgtatccatactgtatgttgctacatgtaggtattcctttatccaataatagtttaaacacatctacattgggatttgatgttgtagcgtatttttctacaatattaataccatttttgatactatttatttctatacctttcgaaattagtaatttcaataagtctatattgatgttatcagaacatagatattcgaatatatcaaaatcattgatatttttatagtcgactgacgacaataacaaaatcacaacatcgtttttgatattattatttttcttggtaacgtatgcctttaatggagtttcaccatcatactcatataatggatttgcaccactttctatcaatgattgtgcactgctggcatcgatgttaaatgttttacaactatcatagagtatcttatcgttaaccatgattggttgttgatgctatcgcattttttggtttctttcatttcagttatgtatggatttagcacgtttgggaagcatgagctcatatgatttcagtactgtagtgtcagtactattagtttcaataagatcaatctctagatctatagaatcaaaacacgataggtcagaagataatgaatatctgtacgcttcttgttgtactgtaacttctggttttgttagatggttgcatcgtgctttaacgtcaatggtacaaattttatcctcgctttgtgtatcatattcgtccctactataaaattctatattcagattatcatgcgatgtgtatacgctaacggtatcaataaacggagcacaccatttagtcataaccgtaatccaaaaatttttaaagtatatcttaacgaaagaagttgtatcattgtctacggtgtatggtactagatcctcataagtgtatatatctagagtaatgtttaatttattaaatggttgataatatggatcgtcgtggcaatttcctaagatggaaatgagatatagacacgcaataaatctaatcgaagacatggttactccttaaaaaaatacgaataatcaccttggctatttagtaagtgtcatttaacactatactcatattaatccatggactcataatctctatacgggattaacggatgttctatatacggggatgagtagttctcttctttaactttatactttttactaatcatatttagactgatgtatgggtaatagtgtttgaagagctcgttctcatcatcagaataaatcaatatctctgtttttttgttatacagatgtattacagcctcatatattacgtaatagaacgtgtcatctaccttattaactttcaccgcatagttgtttgcaaatacggttaatcctttgacctcgttgatttccgaccaatctgggcgtataatgaatctaaactttaatttcttgtaatcattcgaaataatttttagtttgcatccgtagttatcccctttatgtaactgtaaatttctcaacgcgatatctccattaataatgatgtcgaattcgtgctgtatacccatactgaatggatgaacgaataccgacggcgttaatagtaatttactttttcatctttacatattgggtactagttttactatcataagtttataaattccacaagctactatggaataagccaaccatcttagtataccacacatgtcttaaagtttattaattaattacatgttgttttatatatatcgctacgaatttaaacagagaaatcagtttaggaaaaaaaaaattatctatctacatcatcacgtctctgtattctacgatagagtgctactttaagatgagacatatccgtgtcatcaaaaatatactccattaaaatgattattccggcagcgaacttgatattggatatatcacaacctttgttaatatctacgacaatagacagcagtcccatggttccataaacagtgagtttatctttctttgaagagatattttgtagagatcttataaaactgtcgaatgacatcgcatttatatctttagctaaatcgtatatgttaccatcgtaatatctaaccgcgtctatcttaaacgtttccatcgctttaaagacgtttccgatagatggtctcatttcatcagtcatactgagccaacaaatataatcgtgtataacatctttgatagaatcagactctaaagaaaacgaatcggctttattatacgcattcatgataaacttaatgaaaaatgtttttcgttgtttaagttggatgaatagtatgtcttaataattgttattatttcattaattaatatttagtaacgagtacactctataaaaacgagaatgacataactaatcataactagttatcaaagtgtctaggacgcgtaattttcatatggtatagatcctgtaagcattgtctgtattctggagctattttctctatcgcattagtgagttcagaatatgttataaatttaaatcgaataacgaacataactttagtaaagtcgtctatattaactcttttattttctagccatcgtaataccatgtttaagatagtatattctctagttactacgatctcatcgttgtctagaatatcacatactgaatctacatccaattttagaaattggtctgtgttacatatctcttctatattattgttgatgtattgtcgtagaaaactattacgtagaccattttctttataaaacgaatatatagtactccaattatctttaccgatatatttgcacacataatccattctctcaatcactacatctttaagattttcgttgttaagatatttggctaaactatataattctattagatcatcaacagaatcagtatatatttttctagatccaaagacgaactctttggcgtcctctataatattcccagaaaagatattttcgtgttttagtttatcgagatctgatctgttcatatacgccatgattgtacggtacgttatgataaccgcataaaataaaaatccattttcatttttaaccaatactattcataattgagattgatgtaatactttgttactttgaacgtaaagacagtacacggatccgtatctccaacaagcacgtagtaatcaaatttggtgttgttaaacttcgcaatattcatcaatttagatagaaacttatactcatcatctgttttaggaatccatgtattattaccactttccaacttatcattatcccaggctatgtttcgtccatcatcgttgcgcagagtgaataattcttttgtattcggtagttcaaatatatgatccatgcatagatcggcaaagctattgtagatgtgatttttcctaaatctaatataaaactcgtttactagcaaacactttcctgatttatcgaccaagacacatatggtttctaaatctatcaagtggtggggatccatagttatgacgcagtaacatatattattacattcttgactgtcgctaatatctaaatatttattgttatcgtattggattctgcatatagatggcttgtatgtcaaagatatagaacacataaccaatttatagtcgcgctttacattctcgaatctaaagttaagagatttagaaaacattatatcctcggatgatgttatcactgtttctggagtaggatatattaaagtctttacagatttcgtccgattcaaataaatcactaaataatatcccacattatcatctgttagagtagtatcattaaatctattatattttatgaaagatatatcactgctcacctctatatttcgtacatttttaaactgtttgtataatatctctctgatacaatcagatatatctattgtgtcggtagacgataccgttacatttgaattaatggtgttccattttacaacttttaacaagttgaccaattcatttctaatagtatcaaactctccatgattaaatattttaatagtatccattttatatcactacggacacaaagtagctgacataaaccattgtataatttttatgttttatgtttattagcgtacacattttggaagttccggcttccatgtatttcctggagagcaagtagatgatgaggaaccagatagtttatatccgtacttgcacttaaagtctacattgtcgttgtatgagtatgatcttttaaacccgctagacaagtatccgtttgatattgtaggatgtggacatttaacaatctgacacgtgggtggatcggaccattctcctcctgaacacaggacactagagttaccaatcaacgaatatccactattgcaactataagttacaacgctcccatcggtataaaaatcctcgtatccgttatgtcttccgttggatatagatggaggggattggcatttaacagattcacaaataggtgcctcgggattccataccatagatccagtagatcctaattcacaatacgatttagattcaccgatcaactgatatccgctattacaagagtacgttatactagagccaaagtctactccaccaatatcaagttggccattatcgatatctcgaggcgatgggcatctccgtttaatacattgattaaagagtgtccatccagtacctgtacatttagcatatataggtcccattttttgctttctgtatccaggtagacatagatattctatagtgtctcctatgttgtaattagcattagcatcagtctccacactattcttaaatttcatattaatgggtcgtgacggaatagtacagcatgatagaacgcatcctattcccaacaatgtcaggaacgtcacgctctccaccttcatatttatttatccgtaaaaatgttatcctggacatcgtacaaataataaaaagcccatatatgttcgctattgtagaaattgtttttcacagttgctcaaaaacgatggcagtgacttatgagttacgttacactttggagtctcatctttagtaaacatatcataatattcgatattacgagttgacatatcgaacaaattccaagtatttgattttggataatattcgtattttgcatctgctataattaagatataatcaccgcaagaacacacgaacatctttcctacatggttaaagtacatgtacaattctatccatttgtcttccttaactatatatttgtatagataattacgagtctcgtgagtaattccagtaattacatagatgtcgccgtcgtactctacagcataaactatactatgatgtctaggcatgggagacttttttatccaacgatttttagtgaaacattccacatcgtttaatactacatatttctcatacgtggtataaactccacccattacatatatatcatcgtttacgaataccgacgcgcctgaatatctaggagtaattaagtttggaagtcttatccatttcgaagtgccgtgtttcaaatattctgccacacccgttgaaatagaaaattctaatcctcctattacatataactttccatcgttaacacaagtactaacttctgattttaacgacgacatattagtaaccgttttccattttttcgttttaagatctacccgcgatacggaataaacatgtctattgttaatcatgccgccaataatgtatagacaattatgtaaaacatttgcattatagaattgtctatctgtattaccgactatcgtccaatattctgttctaggagagtaatgggttattgtggatatataatcagagtttttaatgactactatattatgttttataccatttcgtgtcactggctttgtagatttggatatagttaatcccaacaatgatatagcattgcgcatagtattagtcataaacttgggatgtaaaatgttgatgatatctacatcgtttggatttttatgtatccactttaataatatcatagctgtaacatcctcatgatttacgttaacgtcttcgtgggataagatagttgtcagttcatcctttgataattttccaaattctggatcggatgtcaccgcagtaatattgttgattatttctgacatcgacgcattatatagttttttaattccatatcttttagaaaagttaaacatccttatacaatttgtgaaattaatattatgaatcatagtttttacacatagatctactacaggcggaacatcaattattatggcagcaactagtatcatttctacattgtttatggtgatgtttatcttcttccagcgcatatagtctaatagcgattcaaacgcgtgatagtttataccattcaatataatcgcttcatcctttagatggtgatcctgaatgcgtttaaaaaaattatacggagacgccgtaataatttccttattcacttgtataatttccccattgatagaaaatattacgctttccattcttaaagtactataagtaattatagtataatgtaaacgtttatatattcaatatttttataaaaatcattttgacattaattcctttttaaatttccgtctatcatctatagaaacgtattctatgaatttataaaatgcttttacgtgtcctatcgtaggcgatagaaccgctaaaaagcctatcgaatttctacaaaagaatctgttatatggtatagggagagtataaaacattaaatgtccgtacttattaaagtattcagtagccaatcctaactctttcgaatacttattaatggctcttgttctgtacgaatctatttttttgaacaacggacctagtggtatatcttgttctatgtatctaaaataatgtctgactagatccgttagtttaatatccgcagtcatcttgtctagaatggcaaatctaactgcgggtttaggctttagtttagtttctatatctacatctatgtctttatctaacaccaaaaatataatagctaatattttattacaatcatccggatattcttctacgatctcactaactaatgtttctttggttatactagtatagtcactatcggacaaataaagaaaatcagatgatcgatgaataatacatttaaattcatcatctgtaagatttttgagatgtctcattagaatattattagggttagtactcattatcattcggcagctattacttattttattatttttcaccatatagatcaatcattagatcatcaaaatatgtttcaatcatcctaaagagtatggtgaatgactcttcccatctaatttctgaacgttcaccaatgtctctagccactttggcactaatagcgatcattcgcttagcgtcttctatattattaactggttgatttaatctatctagcaatggaccgtcggacagcgtcattctcatgttcttaatcaatgtacatacatcgccgtcatctaccaattcatccaacaacataagctttttaaaatcatcattataataggtttgatcgttgtcatttctccaaagaatatatctaataagtagagtcctcatgcttagttaacaactattttttatgttaaatcaattagtacaccgctatgtttaatacttattcatattttagtttttaggattgagaatcaatacaaaaaattaatgcatcattaattttagaaatacttagtttccacgtagtcaatgaaacatttgaactcatcgtacaggacgttctcgtacaggacgtaactataaaccggtttatatttgttcaagatagatacaaatccgataactttttttacgaattctacgggatccactttaaaagtgtcataccgggttctttttatttttttaaacagatcaatggtgtgatgttgattaggtcttttacgaatttgatatagaatagcgtttacatatcctccataatggtcaatcgccatttgttcgtatgtcataaattctttaattatatgacactgtgtattatttagttcatccttgttcattgttaggaatctatccaaaatggcaattatactagaactataggtgcgttgtatacacatattgatgtgtctgtttatacaatcaatgctactaccttcgggtaaaattgtagcatcatataccatttctagtactttaggttcattattatccattgcagaggacgtcatgatcgaatcataaaaaaatatattatttttatgttattttgttaaaaataatcatcgaatacttcgtaagatactccttcatgaacataatcagttacaaaacgtttatatgaagtaaagtatctacgatttttacaaaagtccggatgcataagtacaaagtacgcgataaacggaataataatagatttatctagtctatctttttctatagctttcatagttagatacatggtctcagaagtaggattatgtaacatcagcttcgataaaatgactgggttatttagtcttacacattcgctcatacatgtatgaccgttaactacagagtctacactaaaatgattgaacaatagatagtctaccattgtttcgtattcagatagtacagcgtagtacatggcatcttcacaaattatatcattgtctaatagatatttgacgcatcttatggatcccacttcaacagccatcttaaaatcggtagaatcatattgctttcctttatcattaataatttctagaacatcatctctatcataaaagatacaaatattaactgtttgatccgtaataacattgctagtcgatagcaatttgttaataagatgcgctgggctcaatgtcttaataagaagtgtaagaggactatctccgaatttgttttgtttattaacatccgttgatggaagtaaaagatctataatgtctacattcttgactgttttagagcatacaatatggagaggtgtatttccatcatgatctggttttgagggactaattcctagtttcatcatccatgagattgtagaagcttttggattgtctgacataagatgtctatgaatatgatttttgccaaatttatccactatcctggcttcgaatccgatggacattatttttttaaacactctttctgaaggatctgtacacgccaacaacggaccacatccttcttcatcaaccgagttgttaatcttggctccatactgtaccaataaatttattctctctatgacttcatcatctgttcccgagagataatatagaggcgttttatgctgtttatcacacgcgtttggatctgcgccgtgcgtcagcagcatcgcgactattctattattattaattttagaagctatatgcaatggataatttccatcatcatccgtctcatttggagagtatcctctatgaagaagttcttcgacaaatcgttcatctagtcctttaattccacaatacgcatgtagaatgtgataattatttccagaaggttcgatagcttgtagcatattcctaaatacatctaaatttttactattatatttggcataaagagatagataatactcggccgacataatgttgtccattgtagtataaaaattaatatttctatttctgtatatttgcaacaatttactctctataacaaatatcataacttagttcttttatgtcaagaaggcactggtttagttcatctataaatgtcacgccataactaccacgcatgccatactcagaattatgataaagatatttatccttggggtgtaggtaatggggattaatctttgttggatcagtctctaagttaacacatgtcacacatgatccatttatagttatatcacacgatgatgatttatgaattgattccggaagatcgctatcgtattttgtggttccacaattcatttccatacatgttattgtcacactaatattatgatgaactttatctagccgctgagtggtaaacaacagaacagatagtttattatctttaccaacaccctcagccgctgccacaaatctctgatccgtatccatgatggtcatgtttatttctagtccgtatccagtcaacactatgttagcatttctgtcgatatagctttcactcatatgacactcaccaataatagtagaattaatgtcgtaatttacaccaatagtgagttcggcggcaaagtaccaataccggtaatcttgtcgaggaggacatatagtattcttgtattctaccgaatacccgagagatgcgatacaaaagagcaagactaatttgtaaaccatcttactcaaaatatgtaacaatagtacgatgcaatgagtaagacaataggaaatctatcttatatacacataattattctatcaattttaccaattagttagtgtaatgttaacaaaaatgtgggagaatctaattagtttttctttacacaattgacgtacatgagtctgagttccttgtttttgctaattatttcatccaatttattattcttgacgatatcgagatcttttgtataggagtcaaacttgtattcaacatgcttttctataatcattttagctatttcggcatcatccaatagtacattttccagattagcagaatagatattaatgtcgtatttgaacagagcctgtaacatctcaatgtctttattatctatagccaatttaatgtccggaatgaagagaagggaattattggtgtttgtcgacgtcatatagtcgagcaagagaatcatcatatccacgtgtccattttttatagtgatgtgaatacaactaaggagaatagccagatcaaaagtagatggtatctctgaaagaaagtaggaaacaatacttacatcattaagcatgacggcatgataaaatgaagttttccatccagttttcccatagaacatcagtctccaatttttcttaacaaacagttttaccgtttgcatgttaccactatcaaccgcataatacaatgcggtgtttcccttgtcatcaaattgtgaatcatccagtccactgaatagcaaaatctttactattttggtatcttccaatgtggctgcctgatgtaatggaaattcattctctagaagatttttcaatgctccagcgttcaacaacgtacatactagacgcacgttattatcagctattgcataatacaaggcactatgtccatggacatccgccttaaatgtatctttactagagagaaagcttttcagctgcttagacttccaagtattaattcgtgacagatccatgtctgaaacgagacgctaattagtgtatattttttcattttttataattttgtcatattgcaccagaattaataatatctttaatagatctgattagtagatacatggctatcgcaaaacaacatatacacatttaataaaaataatatttattaagaaaattcagatttcacgtacccatcaatataaataaaataatgattccttacaccgtacccatattaaggagattccaccttacccataaacaatataaatccagtaatatcatgtctgatgatgaacacaaatggtgtattaaattccagtttttcaggagatgatctcgccgtagctaccataatagtagatgcctctgctacagttccttgttcgtcgacatctatctttgcattctgaaacattttataaatatataatgggtccctagtcatatgtttaaacgacgcattatctggattaaacatactaggagccatcatttcggctatcgacttaatatccctcttattttcgatagaaaatttagggagtttaagattgtacactttattccctaattgagacgaccaatagtctaattttgcagccgtgatagaatctgtgaaatgggtcatattatcacctattgccaggtacatactaatattagcatccttatacggaaggcgtaccatgtcatattctttgtcatcgattgtgattgtatttccttgcaatttagtaactacgttcatcatgggaaccgttttcgtaccgtacttattagtaaaactagcattgcgtgttttagtgatatcaaacggatattgccatatacctttaaaatatatagtattaatgattgcccatagagtattattgtcgagcatattagaatctactacattagacataccggatctacgttctactatagaattaattttattaaccgcatctcgtctaaagtttaatctatataggccgaatctatgatattgttgataatacgacggtttaatgcacacagtattatctacgaaactttgataagttagatcagtgtacgtatatttagatgttttcagcttagctaatcctgatattaattctgtaaatgctggacccagatctctttttctcaaatccatagtcttcaataattctattctagtattacctgatgcaggcaatagcgacataaacatagaaaacgaataaccaaacggtgagaagacaatattatcatcttgaatatttttatacgctactataccggcattggtaaatccttgtagacgataggcggacgctgaacacgctaacgatagtatcaataacgcaatcatgattttatggtattaataattaaccttatttttatgttcggtataaaaaaattattgatgtctacacatccttttgtaattgacatctatatatccttttgtataatcaactctaatcactttaacttttacagttttccctaccagtttatccctatattcaacatatctatccatatgcatcttaacactctctgccaagatagcttcagagtgaggatagtcaaaaagataaatatatagagcataatcattctcgtatactctgccctttattacatcacccgcattgggcaacgaataacaaaatgcaagcatcttgttaacgggctcgtaaattgggataaaaattatgtttttattgtcttatatctattttattcaagagaatattcaggaatttctttttccggttgtatctcgtcgcagtatatatcatttgtacattgtttcatattttttaatagtttacaccttttagtaggactagtatcgtacaattcatagctgtattttgaattccaatcacgcataaaaatatcttccaattgttgacgaagacctaatccatcatccggtgtaatattaatagatgctccacatgtatccgtaaagtaatttcctgtccaatttgaggtacctatataggccgttttatcggttaccatatatttggcatggtttaccctagaatacggaatgggaggatcagcatctggtacaataaatagctttacttctatatttatgtttttagattttagcatagcgatagatcttaaaaagtttctcatgataaacgaagatcgttgccagcaactaatcaatagcttaacggatacttgtctgtctatagcggatcttcttaattcatcttctatataaggccaaaacaaaattttacccgccttcgaataaataatagggataaagttcataacagatacataaacgaatttactcgcatttctaatacatgacaataaagcggttaaatcattggttctttccatagtacatagttgttgcggtgcagaagcaataaatacagagtgtggaacgccgcttacgttaatactaagaggatgatctgtattataatacgacggataaaagtttttccaattatatggtagattgttaactccaagataccagtatacctcaaaaatttgagtgagatccgctgccaagttcctattattgaagatcgcaatacccaattccttgacctgagttagtgatctccaatccatgttagcgcttcctaaataaatatgtgtattatcagatatccaaaattttgtatgaagaactcctcctaggatatttgtaatatctatgtatcgtacttcaactccggccatttgtagtctttcaacatcctttaatggtttgttagatttattaacggctactctaactcgtactcctcttttgggtaattgtacaatctcgtttaatattatcgtgccgaaattcgtacccacttcatccgataaactccaataaaaagatgatatatctagtgtttttgtggtattggatagaatttccctccacatgttaaatgtagacaaatatactttatcaaattgcatacctataggaatagtttctgtaatcactgcgattgtattatccggattcattttatttgttaaaagaataatcctatatcacttcactctattaaaaatccaagtttctatttctttcatgactgattttttaacttcatccgtttccttatgaagatgatgtttggcaccttcataaatttttatttctctattacaatttgcatgttgcatgaaataatatgcacctaaaacatcgctaatcttattgtttgttccctggagtatgagagtcgggggggtgttaatcttggaaattatttttctaaccttgttggtagccttcaagacctgactagcaaatccagccttaattttttcatgattgactaatgggtcgtattggtatttataaactttatccatatctctagatactgattctggacatagctttccgactggcgcatttggtgtgatggttcccataagtttggcagctagcagattcagtcttgaaacagcatctgcattaactagaggagacattagaatcattgctgtaaacaagtttggattatcgtaagaggctagctcccatggaatgacccaataagtagatttaatagttaccacgtgctgtaccaaagtcatcaatcatcattttttcaccattacttcttccatgtccaatatgatcatgtgagaatactaaaattcctaacgatgatatgttttcagctagttcgtcataacgtccagaatgtttaccagctccatgacttatgaatactaatgccttaggatatgtaataggtttccaatatttacaatatatgtaatcattgtccagattgaacatacagtttgcactcatgattcacgttatataactatcaatattaacagttcgtttgatgatcatattatttttatgttttattgataattgtaaaaacatacaattaaatcaatatagaggaaggagacggctactgtcttttgtaagatagtcatggcgactaaattagattatgaggatgctgttttttactttgtggatgatgataaaatatgtagtcgcgactccatcatcgatctaatagatgaatatattacgtggagaaatcatgttatagtgtttaacaaagatattaccagttgtggaagactgtacaaggaattgatgaagttcgatgatgtcgctatacggtactatggtattgataaaattaatgagattgtcgaagctatgagcgaaggagaccactacatcaattttacaaaagtccatgatcaggaaagtttattcgctaccataggaatatgtgctaaaatcactgaacattggggatacaaaaagatttcagaatctagattccaatcattgggaaacattacagatttgatgaccgacgataatataaacatcttgatactttttctagaaaaaaaattgaattgatgatataggggtcttcataacgcataattattacgttagcattctatatccgtgttaaaaaaaattatcctatcatgtatttgagagttttatatgtagcaaacatgatagctgtgatgccaataagctttagatattcacgcgtgctagtgttagggatggtattatctggtggtgaaatgtccgttatataatctacaaaacaatcatcgcatatagtatgcgatagtagagtaaacatttttatagtttttactggattcatacatcgtctacccaattcggttataaatgaaattgtcgccaatcttacacccaaccccttgttatccattagcatagtattaacttcgttatttatgtcataaactgtaaatgattttgtagatgccatatcatacatgatattcatgtccctattataatcattactaactttatcacaatatatgttgataatatctatatatgatctagtctttgtgggcaactgtctatacaagtcgtctaaacgttgtttactcatatagtatcgaacagccatcattacatggtcccgttccgttgatagataatcgagtatgttagtggacttgtcaaatctatataccatattttctggaagtggatatacatagtcgtgatcaacattattgctagcctcatcttctatatcctgtactataccattatctatatcatctacataatctatgatattattacacataaacatcgacaacatactattgtttattatctaagtcctgttgatccaaacccttgatctcctctatttgtactatctagagattgtacttcttccagttctggataatatatacgttgatagattagctgagctattctatctccagtatttacattaaacgtacattttccattattaataagaatgactcctatgtttcccctataatcttcgtctattacaccacctcctatatcaatgccttttagtgacagaccagacctaggagctattctaccatagcagaacttaggcatggacatactaatatctgtcttaattaactgtctttctcctggagggatagtataatcgtaagcgctatacaaatcatatccggcagcacccggcgattgcctagtaggagatttagctctgttagtttccttaacaaatctaactggtgagttaatattcatgttgaacataaaactaatattttatttcaaaattatttaccatcccatatattccatgaataagtgtgatgattgtacacttctatagtatctatatacgatccacgataaaatcctcctatcaatagcagtttattatccactatgatcaattctggattatccctcggataaataggatcatctatcagagtccatgtattgctggattcacaataaaattccgcatttctaccaaccaagaataaccttctaccgaacactaacgcgcatgatttataatgaggataataagtggatggtccaaactgccactgatcatgattgggtagcaaatattctgtagttgtatcagtttcagaatgtcctcccattacgtatataacattgtttatggatgccactgctggattacatctaggtttcagaagactcggcatattaacccaagcagcatccccgtggaaccaacgctcaacagatgtgggatttggtagacctcctactacgtataatttattgttagcgggtatcccgctagcatacagtctggggctattcatcggaggaattggaatccaattgtttgatatataatttaccgctatagcattgttatgtatttcattgttcatccatccaccgatgagatatactacttctccaacatgagtacttgtacacatatggaatatatctataatttgatccatgttcataggatactctatgaatggatacttgtatgatttgcgtggttgtttatcacaatgaaatattttggtacagtctagtatccattttacattatttatacctctgggagaaagataatttgacctgattacatttttgataaggagtagcagatttcctaatttatttcttcgctttatataccacttaatgacaaaatcaactacataatcctcatctggaacatttagttcatcgctttctagaataagtttcatagatagataatcaaaattgtctatgatgtcatcttccagttccaaaaagtgtttggcaataaagtttttagtatgacataagagattggatagtccgtattctatacccatcatgtaacactcgacacaatattcctttctaaaatctcgtaagataaagtttatacaagtgtagatgataaattctacagaggttaatatagaagcacgtaataaattgacgacgttatgactatctatatatacctttccagtatacgagtaaataactatagaagttaaactgtgaatgtcaaggtctagacaaaccctcgtaactggatctttatttttcgtgtatttttgacgtaaatgtgtgcgaaagtaaggagataactttttcaatatcgtagaattgactattatattgcctcctatggcatcaataattgttttgaatttcttagtcatagacaatgctaatatattcttacagtacacagtattgacaaatatcggcatttatgtttctttaaaagtcaacatctagagaaaaatgattatctttttgagacataactcccattttttggtattcacccacacgtttttcgaaaaaattagtttttccttccaatgatatattttccatgaaatcaaacggattggtaacattataaatttttttaaatcccaattcagaaatcaatctatccgcgacgaattctatatatgttttcatcatttcacaattcattcctataagtttaactggaagagccgcagtaagaaattcttgttcaatggatactgcatctgttataatagatctaacggtttcttcactcggtggatgcaataaatgtttaaacatcaaacatgcgaaatcgcagtgcagaccctcgtctctactaattagttcgttggaaaacgtgagtccgggcattaggccacgctttttaagccaaaatatggaagcgaatgatccggaaaagaagattccttctactgcagcaaaggcaataagtctctctccataaccggcgctgtcatgtatccacttttgagcccaatcggccttcttttttacacaaggcatcgtttctatggcattaaagagatagtttttttcattactatctttaacataagtatcgatcaaaagactatacatttccgaatgaatgttttcaatggccatctgaaatccgtagaaacatctagcctcggtaatctgtacttctgtacaaaatcgttccgccaaattttcattcactattccgtcactggctgcaaaaaacgccaatacatgttttataaaatatttttcgtctggtgttagtttattccaatcattgatatctttagatatatctacttcttccactgtccaaaatgatgcctctgcctttttatacatgttccagatgtcatgatattggattgggaaaataacaaatctatttggatttggtgcaaggatgggttccataactaaattaacaataacaataaattttttttcagttatctatatgcctgtacttggattttttgtacatcgatatcgccgcaatcactacaataattacaagtattattgatagcattgttattagtactatcataattaaattatctacattcatgggtgctgaataatcgttattatcatcattatcattttgtaattgtgacatcatactagataaatcgtttgcgagattgttgtgggaagcgggcatggaggatgcattatcattattatttaacgccttccatttggattcacaaatgttacgcacattcaacattttatggaaactataattttgtgaaaacaaataacaagaaaactcgtcatcgttcaaatttttaacgatagtaaaccgattaaacgtcgagctaatttctaacgctagcgactctgttggatatgggtttccagatatatatcttttcagttcccctacgtatctataatcatctgtaggaaatggaagatatttccatttatctactgttcctaatatcatatgtggtggtgtagtagaaccattaagcgcgaaagatgttatttcgcatcgtattttaacttcgcaataatttctggttagataacgcactctaccagtcaagtcaatgatattagcctttacagatatattcatagtagtcgtaacgatgactccatcttttagatgcgatactcctttgtatgtaccagaatcttcgtacctcaaactcgatatatttaaacaagttaatgagatattaacgcgttttatgaatgatgatatataaccagaagttttatcctcggtggctagcgctataaccttatcattataataccaactagtgtgattaatatgtgacacgtcagtgtgggtacaaatatgtacattatcgtctacgtcgtattcgatacatccgcatacagccaacaaatataaaatgacaaatactctaacgccgttcgtacccatcttgatgcggtttaataaatgttttgatttcaatttattgtaaaaaaagattcggttttatactgttcgatattctcattgcttatattttcatctatcatctccacacagtcaaatccgtggttagcatgcacctcatcaaccggtaaaagactatcggactcttctatcattataactctagaatatttaatttggtcattattaatcaagtcaattatcttatttttaacaaacgtgagtattttactcattttttataaaaacttttagaaatatacagactctatcgtgtgtctatatcttctttttatatccaatgtatttatgtctgatttttcttcatttatcatatataatggtccaaattctacacgtgcttcggattcatccagatcattaaggttcttataattgtaacatccttctcttccctcttctacatcttccttcttattcttattcttagcgtcacagaatctaccacagcaggatcccatgacgagcgtcatattaaactaatccattttcaattataatatatgattagtaatgaccattaaaataaaaaatattcttcataaccggcaagaaagtgaaaagttcacattgaaactatgtcagtagtatacatcatgaaatgatgatatatatatactctattttggtggaggattatatgatataattcgtggataatcatttttaagacacatttctttattcgtaaatcttttcacgttaaatgagtgtccatattttgcaatttcttcatatgatggcggtgtacgtggacgaggctgctcctgttcttgttgtggtcgccgactgtcgtgtctgcgtttagatccctccattatcgcgattgcgtagatggagtactattttataccttgtaattaaatttttttattaattaaacgtataaaaacgttccgtatctgtatttaagagccagatttcgtctaatagaacaaatagctacagtaaaaataactagaataattgctacacccactagaaaccacggatcgtaatacggcaatcggttttcgataataggtggaacgtatattttatttaaggacttaacaattgtctgtaaaccacaatttgcttccgcggatcctgtattaactatctgtaaaagcatatgttgaccgggcggagccgaacattctccgatatctaatttctgtatatctataatattattaacctccgcatacgcattacagttcttttctagcttggataccgcactaggtacatcgtctagatctattcctatttcctcagcgatagctcttctatccttttccggaagcaatgaaatcacttcaataaatgattcaaccatgagtgtgaaactaagtcgagaattactcatgcatttgttagttattcggagcgcgcaatttttaaactgtcctataacctctcctatatgaatagcacaagtgacattagtagggatagaatgttgagctaatttttgtaaataactatctataaaaagattatacaaagttttaaactctttagtttccgccatttatccagtctgagaaaatgtctctcataataaatttttccaagaaactaattgggtgaagaatggaaacctttaatctatatttatcacagtctgttttggtacacatgatgaattcttccaatgccgtactaaattcgatatctttttcgatttctggatatgtttttaataaagtatgaacaaagaaatggaaatcgtaataccagttatgtttaactttgaaattgttttttattttcttgttaatgattccagccacttgggaaaagtcaaagtcgtttaatgccgatttaatacgttcattaaaaacaaactttttatcctttagatgaattattattggttcattggaatcaaaaagtaagatattatcgggtttaagatctgcgtgtaaaaagttgtcgcaacagggtagttcgtagattttaatgtataacagagccatctgtaaaaagataaactttatgtattgtaccaaagatttaaatcctaatttgatagctaactcggtatctactttatctgccgaatacagtgctaggggaaaaattataatgtttcctctttcatattcgtagttagttctcttttcatgttcgaaaaagtgaaacatgcggttaaaatagtttataacattaatattactgttaataactgccggataaaagtgggatagtaatttcacgaatttgatactgtcctttctctcgttaaacgcctttaaaaaaactttagaagaatatctcaatgagagttcctgaccatccatagtttgtatcaataatagcaacatatgaagaacacgtttatacagagtatgtaaaaatgttaatttatagtttaatcccatggcccacgcacacacgattaattttttttcatctccctttagattgttgtatagaaatttgggtactgtgaactccgccgtagtttccatgggactatataattttgtggcctcgaatacaaattttactacatagttatctatcttaaagactataccatatcctcctgtagatatgtgataaaaatcgtcgtttataggataaaatcgtttatccttttgttggaaaaaggatgaattaatgtaatcattctcttctatctttagtagtgtttccttattaaaattcttaaaataatttaacaatctaactgacggagcccaattttggtgtaaatctaattgggacattatattgttaaaatacaaacagtctcctaatataacagtatctgataatctatggggagacatccattgatattcaggggatgaatcattggcaacacccatttattgtacaaaaagccccaatttacaaacgaaagtccaggtttgatagagacaaacaattaactattttgtctctgtttttaacacctccacagtttttaatttctttagtaatgaaattattcacaatatcagtatcttctttatctaccagagattttactaacttgataaccttggctgtctcattcaatagggtagtaatatttgtatgtgtgatattgatatctttttgaattgtttcttttagaagtgattctttgatggtgccagcatacgaattacaataatgcagaaactcggttaacatgcaggaattatagtaagccaattccaattgttgcctgtgttgtattagagtgtcaatatgagcaatggtgtccttgcgtttctctgatagaatgcgagcagcgattttggcgttatcatttgacgatatttctggaatgacgaatcctgtttctactaactttttggtaggacaaagtgaaacaatcaagaagatagcttctcctcctatttgtggaagaaattgaactcctctagatgatctactgacgatagtatctccttgacagatattggaccgaattacagaagtacctggaatgtaaagccctgaaaccccctcattttttaagcagattgttgccgtaaatcctgcactatgcccaagatagagagctcctttggtgaatccatctctatgtttcagtttaaccaagaaacagtcagctggtctaaaatttccatctctatctaatacagcatctaacttgatgtcaggaactatgaccggtttaatgttatatgtaacattgagtaaatccttaagttcataatcatcactgtcatcagttatgtacgatccaaacaatgtttctaccggcatagtggatacgaagatgctatccatcagaatgtttccctgattagtattttctatatagctattcttctttaaacgattttccaaatcagtaactatgttcatttttttaggagtaggacgcctagccagtatggaagaggattttctagatcctctcttcaacatctttgatctcgatggaatgcaaaaccccatagtgaaacaaccaacgataaaaataatattgtttttcactttttataattttaccatctgactcatggattcattaatatctttataagagctactaacgtataattctttataactgaactgagatatatacaccggatctatggtttccataattgagtaaatgaatgctcggcaataactaatggcaaatgtatagaacaacgaaattatactagagttgttaaagttaatattttctatgagctgttccaataaattatttgttgtgactgcgttcaagtcataaatcatcttgatactatccagtaaaccgtttttaagttctggaatattatcatcccattgtaaagcccctaattcgactatcgaatatcctgctctgatagcagtttcaatatcgacggacgtcaatactgtaataaaggtggtagtattgtcatcatcgtgataaactacgggaatatggtcgttagtaggtacggtaactttacacaacgcgatatataactttccttttgtaccatttttaacgtagttgggacgtcctgcagggtattgttttgaagaaatgatatcgagaacagatttgatacgatatttgttggattcctgattattcactataatataatctagacagatagatgattcgataaatagagaaggtatatcgttggtaggataatacatccccattccagtattctcggatactctattgatgacactagttaagaacatgtcttctattctagaaaacgaaaacatcctacatggactcattaaaacttctaacgctcctgattgtgtctcgaatgcctcgtacaaggatttcaaggatgccatagattctttgaccaacgatttagaattgcgtttagcatctgatttttttattaaatcgaatggtcggctctctggtttgctaccccaatgataacaatagtcttgtaaagataaaccgcaagaaaatttatacgcatccatccaaataaccctagcaccatcggatgatattaatgtattattatagattttccatccacagttattgggccagtatactgttagcaacggtatatcgaatagattactcatgtaacctactagaatgatagttcgtgtactagtcataatatctttaatccaatctaagaaatttaaaattagattttttacactgttaaagttaacaaaggtattacccggatacgtggatatcatatatggcattggtccattatcagtaatagctccataaactgatacggcgatggtttttatatgtgtttgatctaacgaggaagaaattcgcgcccacaattcatctctagatatgtatttaatatcaaacggtaacacatcaatttcgggacgcgtatatgtttctaaatttttaatccaaatataatgatgacctatatgccctattatcatactgtcaactatagtacacctagagaacttacgatacatctgtttcctgtaatcgttaaattttacaaatctataacatgctaaaccttttgacgacagccattcattaatttctgatatggaatctgtattctcgataccgtatcgttctaaagccagtgctatatctccctgttcgtgggaacgctttcgtataatatcgatcaacggataatctgaagtttttggagaataatatgactcatgatctatttcgtccataaacaatctagacataggaattggaggcgatgatcttaattttgtgcaatgagtcgtcaatcctataacttctaatcttgtaatattcatcatcgacataatactatctatgttatcatcgtatattagtataccatgaccttcttcatttcgtgccaaaatgatatacagtcttaaatagttacgcaatatctcaatagtttcataattgttagctgttttcatcaaggtttgtatcctgtttaacatgatggcgttctataacgtctctattttctatttttaattttttaaatttttaacgatttactgtggctagatacccaatctctctcaaatatttttttagcctcgcttacaagctgtttatctatactattaaaactgacgaatccgtgattttggtaatgggttccgtcgaaatttgccgaagtgatatgaacatattcgtcgtcgactatcaacaattttgtattattctgaatagtgaaaaccttcacagatagatcattttgaacacacaacgcatctagacttttggcggttgccatagaatatacgtcgttcttatcccaattaccaactagaagtctgatcttaactcctctattaatggctgcttctataatggagttgtaaatgtcgggccaatagtagctattaccgtcgacacgtgtagtgggaactatggccaaatgttcaatatctatactagtcttagctgacctgagtttatcaataactacatcggtatctagatctctagaatatcccaataggtgttccggagaatcagtaaagaacactccacctataggattcttaatatgatacgcagtgctaactggcaaacaacaagccgcagagcataaattcaaccatgaattttttgcgctattaaaggctttaaaagtatcaaatcttctacgaagatctgtggccagcgggggataatcagaatatacacctaacgttttaatcgtatgtatagatcctccagtaaatgacgcgtttcctacataacatctttcatcatctgacacccaaaaacaaccgagtagtagtcccacattattttttttatctatattaacggttataaaatttatatccgggcagtgactttgtagctctcccagatttcttttccctcgttcatctagcaaaactattattttaatccctttttcagatgcctcttttagtttatcaaaaataagcgctcccctagtcgtactcagaggattacaacaaaaagatgctatgtatatatatttcttagctagagtgataatttcgttaaaacattcaaatgttgttaaatgatcggatctaaaatccatattttctggtagtgtttctaccagcctacattttgctcccgcaggtaccgatgcaaatggccacatttagttaacataaaaacttatacatcctgttctatcaacgattctagaatatcatcggctatatcgctaaaattttcatcaaagtcgacatcacaacctaactcagtcaatatattaagaagttccatgatgtcatcttcgtctatttctatatccgtatccattgtagattgttgaccgattatcgagtttaaatcattactaatactcaatccttcagaatacaatctgtgtttcattgtaaatttataggcggtgtatttaagttggtagattttcaattatgtattaatatagcaacagtagttcttgctcctccttgattctagcatcctcttcattattttcttctacgtacataaacatgtccaatacgttagacaacacaccgacgatggcggccgctacagacacgaatatgactaaaccgatgaccatttaaaaacccctctctagctttcacttaaactgtatcgatcattcttttagcacatgtataatataaaaacattattctatttcgaatttaggcttccaaaaatttttcatccgtaaaccgataataatatatatagacttgttaatagtcggaataaatagattaatgcttaaactatcatcatctccacgattagagatacaatatttacattctttttgctgtttcgaaactttatcaatacacgttaatacaaacccaggaaggagatattgaaactgaggctgttgaaaatgaaacggtgaatacaataattcagataatgtaaaatcatgattccgtattctgatgatattagaactgctaatggatgtcgatggtatgtatctaggagtatctattttaacaaagcatcgatttgctaatatacaattatccttttgattaattgttattttattcatattcttaaaaggtttcatatttatcaattcttctacattaaaaatttccatttttaatttatgtagccccgcaatactcctcattacgtttcattttttgtctataatatccattttgttcatctcggtacatagattatccaattgagaagcgcatttagtagttttgtacattttaagtttattgacgaatcgtcgaaaactagttatagttaacattttattatttgataccctgatattaatacccctgccgttactattatttataactgatgtaatccacgtaacattggaattaactatcgatagtaatgcatcgacgcttccaaaattgtctattataaactcaccgataatttttttattgcatgttttcatattcattaggattatcaaatctttaatcttattacgattgtatgcgttgatattacaagacgtcattctaaaagacggaggatctccatcaaatgccagacaatcacgtacaaagtacatggaaataggttttgttctattgcgcatcatagatttatatagaacacccgtagaaatactaatttgttttactctataaaatactaatgcatctatttcatcgttttgtataacgtctttccaagtgtcaaattccaaatttttttcattgatagtaccaaattcttctatctctttaactacttgcatagataggtaattacagtgatgcctacatgccgttttttgaaactgaatagatgcgtctagaagcgatgctacgctagtcacaatcaccactttcatatttagaatatatatatgtaaaaatatagtagaatttcattttgtttttttctatgctataaatgaattctcattttgcatctgctcatactccgttttatattaataccaaagaaggaagatatctggttctaaaagccgttaaagtatgcgatgttagaactgtagaatgcgaaggaagtaaagcttcctgcgtactcaaagtagataaaccctcatcgcccgcgtgtgagagaagaccttcgtccccgtccagatgcgagagaatgaataaccctggaaaacaagttccgtttatgaggacggacatgctacaaaatatgttcgcggctaatcgcgataatgtagcttctagacttttgtcctaaaatactattatatccttttcgatattaataaatccgtgtcgtccaggttttttatctctttcagtatgtgaatagataggtattttatctctattcatcatcgaatttaagagatccgataaacattgtttgtattctccagatgtcagcatctgatacaacaatatatgtgcacataaacctctggcacttatttcatgtaccttccccttatcactaaggagaatagtatttgagaaatatgtatacatgatattatcatgaattagatatacagaatttgtaacactctcgaaatcacacgatgtgtcggcgttaagatctaatatatcactcgataacacattttcatctagatacactagacattttttaaagctaaaatagtctttagtagtaacagtaactatgcgattattttcatcgatgatacatttcatcggcatattattacgcttaccatcaaagactataccatgtgtatatctaacgtattctagcatggttgccatacgcgcattaaacttttcaggatctttggatagatcttccaatctatctatttgagaaaacatttttatcatgttcaatagttgaaacgtcggatccactatatagatattatctataaagattttaggaactacgttcatggtatcctggcgaatattaaaactatcaatgatatgattatcgttttcatcttttatcaccatatagtttctaagatatgggattttacttaatataatattatttcccgtgataaattttattagaaaggccaaatctataagaaaagtcctagaattagtctgaagaatatctatatcgccgtatagtatatttggattaattagatatagagaatatgatccgtaacatatacaacttttattatggcgtctaagatattcttccatcaacttattaacatttttgactagggaagatacattatgacgtcccattacttttgccttgtctattactgcgacgttcatagaatttagcatatctcttgccaattcttccattgatgttacattataagaaattttagatgaaattacatttggagctttaatagtaagaactcctaatatgtccgtgtatgtggtcactaatacagattgtagttctataatcgtaaataatttacctatattatatgtttgagtctgtttagaaaagtagctaagtatacgatcttttatttctgatgcagatgtattaacatcggaaaaaaatctttttttattcttttttactaaagatacaaatatgtctttgttaaaaacagttattttctgaatatttctagcttgtaattttaacatatgatattcgttcacactaggtactctgcctaaataggtttctataatctttaatgtaatattaggaaaagtattctgatcaggattcctattcattttgaggatttaaaactctgattattgtctaatatggtctctacgcaaactttttcacagagcgatagagtttttgataactcgtttttcttaagaaatataaaactactgtctccagagctcgctctatcttttattttatctaattcgatacaaactcctgatactggttcagaaagtaattcattaattttcagtcctttatagaagatatttaatatagataatacaaaatcttcagtttttgatatcgatctgattgatcctagaactagatatattaataacgtgctcattaggcagtttatggcagcttgataattagatatagtatattccagttcatatttattagataccgcattgcccagattttgatattctatgaattcctctgaaaataaatccaaaataactagacattctattttttgtggattagtgtactctcttccctctatcatgttcactactggtgtccacgatgataaatatctagagggaatataatatagtccataggatgccaatctagcaatgtcgaataactgtaattttattcttcgctcttcattatgaattgattcttgaggtataaacctaacacaaattatattattagacttttcgtatgtaatgtctttcatgttataagtttttaatcctggaatagaatctattttaatgaggcttttaaacgcagagttctccaacgagtcaaagcataatactctgttgtttttcttatatacgatgttacgattttcttctttgaatggaataggtttttgaattagtttataattacaacataatagataaggaagtgtgcaaatagtacgcggaaaaaacataatagctcccctgttttcatccatggttttaagtaaatgatcactggcttctttagtcaatggatattcgaacattaaccgtttcatcatcattggacagaatccatatttcttaatgtaaagagtgatcaaatcattgtgtttattgtaccatcttgttgtaaatgtgtattcggttatcggatctgctcctttttctattaaagtatcgatgtcgatctcgtctaagaattcaactatatcgacatatttcatttgtatacacataaccattactaacgtagaatgtataggaagagatgtaacgggaacagggtttgttgattcgcaaactattctaatacataattcttctgttaatacgtcttgcacgtaatctattatagatgccaagatatctatataattattttgtaagatgatgttaactatgtgatctatataagtagtgtaataattcatgtatttcgatatatgttccaactctgtctttgtgatgtctagtttcgtaatatctatagcatcctcaaaaaatatattcgcatatattcccaagtcttcagttctatcttctaaaaaatcttcaacgtatggaatataataatctattttacctcttctgatatcattaatgatatagtttttgacactatcttctgtcaattgattcttattcactatatctaagaaacggatagcgtccctaggacgaactactgccattaatatctctattatagcttctggacataattcatctattataccagaattaatgggaactattccgtatctatctaacatagttttaagaaagtcagaatctaagacttgatgttcatatattggttcatacatgaaatgatctctattgatgatagtgactatttcattctctgaaaattggtaactcattctatatatgctttccttgttgatgaaggatagaatatactcaatagaatttgtaccaacaaactgttctcttatgaatcgtatatcatcatctgaaataatcatgtaaggcatacatttaacaattagagacttgtctcctgttatcaatatactattcttgtgataatttatgtgtgaggcaaatttgtccacgttctttaattttgttatagtagatatcaaatccaatggagctacagttcttggcttaaacagatatagtttttctggaacaaattctacaacattattataaaggactttgggtaaataagtgggatgaaatcctattttaattaatgcgatagccttgtcctcgtgcagatatccaaacgcttttgtgatagtatggcattcattgtctagaaacgctctacgaatatctgtgacagatatcatctttagagaatatactagtcgcgttaatagtactacaatttgtattttttaatctatctcaataaaaaaattaatatgtatgattcaatgtataactaaactactaactgttattgataactagaatcagaatctaatgatgacgtacccaagaagtttatctactgccaatttagctgcattatttttagcatctcgtttagattttccatctgccttatcgaatactcttccgtcgatatctacacaggcataaaatgtaggagagttactaggcccaactgattcaatacgaaaagaccaatctctcttagttatttggcagtactcattaataacggtgacagggttagcatctttccaatcaataatttttttagccggaataacatcatcaaaagacttatgatcctctctcattgatttttcgcgggatacatcatctattatgacgtcagccataacatcagcatccggcttatccgcctccgttgtcataaaccaacgaggaggaatatcgtcggagctgtacaccatagcactacgttgaagatcgtacagagctttattaacttctcgcttctccatattaagttgtctagttagttgtgcagcagtagctccttcgattccaatggttttaatagcctcacacacaatctctgcgttagaacgttcgtcgatatagattttagacatttttagagagaactaacacaaccagcaataaaactgaacctactttatcatttttttattcatcatcctctggtggttcgtcgttcctatcaaatgtagctctgattaacccgtcatctataggtgatgctggttctggagattctggaggagatggattattatctggaagaatctctgttatttccttgttttcatgtatcgattgcgttgtaacattaagattgcgaaatgctctaaatttgggaggcttaaagtgttgtttgcaatctctacacgcgtgtctaactagtggaggttcgtcagctgctctagtttgaatcatcatcggcgtagtattcctacttttacagttaggacacggtgtattgtatttctcgtcgagaacgttaaaataatcgttgtaactcacatcctttattttatctatattgtattctactcctttcttaatgcattttataccgaataagagatagcgaaggaattctttttcggtgccgctagtacccttaatcatatcacatagtgttttatattccaaatttgtggcaatagacggtttatttctatacgatagtttgtttctggaatcctttgagtattctataccaatattattctttgattcgaatttagtttcttcgatattagattttgtattacctatattcttgatgtagtactttgatgatttttccatggcccattctattaagtcttccaagttggcatcatccacatattgtgatagtaattctcggatatcagtagcggctaccgccattgatgtttgttcattggatgagtaactactaatgtatacattttccatttataacacttatgtattaactttgttcatttatattttttcattattatgttgatattaacaaaagtgaatatatatatatgttaataattgtattgtggttatacggctacaattttataatgagtgaaagtcagtgtccgatgatcaatgacgatagctttactctgaaaagaaagtatcaaatcgatagtgcggagtcaacaataaaaatggataagaagaggataaagtttcagaatagagccaaaatggtaaaagaaataaatcagacaataagagcagcacaaactcattacgagacattgaaactaggatacataaaatttaagagaatgattaggactactactctagaagatatagcaccatctattccaaataatcagaaaacttataaactattctcggacatttcagccatcggcaaagcatcacagaatccgagtaagatggtatatgctctgctgctttacatgtttcccaatttgtttggagatgatcatagattcattcgttatagaatgcatccaatgagtaaaatcaaacacaagatcttctctcctttcaaacttaatcttattagaatattagtggaagaaagattctataataatgaatgcagatctaataaatggaaaataattggaacacaagttgataaaatgttgatagctgaatctgataaatatacaatagatgcaaggtataacctaaaacccatgtatagaatcaagggagaatctgaagaagataccctcttcatcaaacagatggtagaacaatgtgtgacatcccaggaattggtggaaaaagtgttgaagatactgtttagagatttgttcaagagtggagaatacaaagcgtacagatacgatgatgatgtagaaaatggattcattggattggatacactaaaattaaacattgttcatgatatagttgaaccatgtatgcctgttcgtaggccagtggctaagatactgtgtaaagaaatggtaaataaatactttgagaatccgctacatattattggtaaaaatcttcaagagtgcattgactttgttagtgaataggcatttcatctttctccaatactaattcaaattgttaaattaataatggatagtataaatagttattagttataagatagtaaaaataattattagaataagagtgtagtatcatagataactctcttctataaaaatggattttattcgtagaaagtatcttatatacacagtagaaaataatatagattttttaaaggatgatacattaagtaaagtaaacaattttaccctcaatcatgtactagctctcaagtatctagttagcaattttcctcaacacgttattactaaggatgtattagctaataccaatttttttgttttcatacatatggtacgatgttgtaaagtgtacgaagcggttttacgacacgcatttgatgcacccacgttgtacgttaaagcattgactaagaattatttatcgtttagtaacacaatacaatcgtacaaggaaaccgtgcataaactaacacaagatgaaaaatttttagaggttgccgaatacatggacgaattaggagaacttataggcgtaaattatgacttagttcttaatccattatttcacggaggggaacccatcaaagatatggaaatcatttttttaaaactgtttaagaaaacagacttcaaagttgttaaaaaattaagtgttataagattacttatttgggcatacctaagcaagaaagatacaggcatagagtttgcggataatgatagacaagatatatatactctatttcaacaaactggtagaatcgtccatagcaatctaacagaaacgtttagagattatatctttcccggagataagactagctattgggtgtggttaaacgaaagtatagctaatgatgcggatatcgttcttaatagacacgccattaccatgtatgataaaattcttagttatatatactctgagataaaacaaggacgcgttaataaaaacatgcttaagttagtttatatctttgagcctgaaaaagatatcagagaacttctgctagaaatcatatatgatattcctggagatatcctatctattattgatgcaaaaaacgacgattggaaaaaatattttattagtttttataaagctaattttattaacggtaatacatttattagtgatagaacgtttaacgaggacttattcagagttgttgttcaaatagatcccgaatatttcgataatgaacgaattatgtctttattctctacgagtgctgcggacattaaacgatttgatgagttagatattaataacagttatatatctaatataatttatgaggtgaacgatatcacattagatacaatggatgatatgaagaagtgtcaaatctttaacgaggatacgtcgtattatgttaaggaatacaatacatacctgtttttgcacgagtcggatcccatggtcatagagaacggaatactaaagaaactgtcatctataaaatccaagagtagacggctgaacttgtttagcaaaaacattttaaaatattatttagacggacaattggctcgtctaggtcttgtgttagatgattataaaggagacttgttagttaaaatgataaaccatcttaagtctgtggaggatgtatccgcattcgttcgattttctacagataaaaaccctagtattcttccatcgctaatcaaaactattttagctagttataatatttccatcatcgtcttatttcaaaggtttttgagagataatctatatcatgtagaagaattcttggataaaagcatccatctaaccaagacggataagaaatatatacttcaattgataagacacggtagatcatagaacagaccaaatatattattaataatttggtatatacatagatataattatcacacatttttgataaatgggaactgctgcaacaattcagactcccaccaaattaatgaataaagaaaatgcagaaatgattttggaaaaaattgttgatcatatagttatgtatattagtgacgaatcaagtgattcagaaaataatcctgaatatattgattttcgtaacagatacgaagactatagatctctcattataaaaagtgatcacgagtttgtaaagctatgtaaaaatcatgcggagaaaagttctccagaaacgcaacaaatgattatcaaacacatatacgaacaatatcttattccagtatctgaagtactattaaaacctataatgtccatgggtgacataattacatataacggatgtaaagacaatgaatggatgctagaacaactctctaccctaaactttaacaatctccgcacatggaactcatgtagcataggcaatgtaacgcgtctgttttatacattttttagttatctgatgaaagataaactaaatatataagtataatcccattctaatactttaacctgatgtattagcatcttattagaatattaacctaactaaaagacataacataaaaactcattacatagttgataaaaagcggtaggatataaatattatggctgccaccgttccgcgttttgacgacgtgtacaaaaatgcacaaagaagaattctagatcaagaaacattttttagtagaggtctaagtagaccgttaatgaaaaacacatatctatttgataattacgcgtatggatggataccagaaactgcaatttggagtagtagatacgcaaacttagatgcaagtgactattatcccatttcgttgggattacttaaaaagttcgagtttctcatgtctctatataaaggtcctattccagtatacgaagaaaaagtaaatactgaattcattgctaatggatctttctccggtagatacgtatcatatcttagaaagttttctgctcttccaacaaacgagtttattagttttttgttactgacttccattccaatctataatatcttgttctggtttaaaaatactcagtttgatattactaaacacacattattcagatacgtctatacagataatgccaaacacctggcgttggctaggtatatgtatcaaacaggagactataagcctttgtttagtcgtctcaaagagaattatatatttaccggtcccgttccaatatgtatcaaagatatagatcaccctaatcttagtagagcaagaagtccatccgattatgagacattagctaatattagtactatattgtactttaccaagtatgatccggtattaatgtttttattgttttacgtacctgggtattcaattactacaaaaattactccagccgtagaatatctaatggataaactgaatctaacaaagagcgacgtacaactgttgtaaattattttatgcttcgtaaaatgtaggttttgaaccaaacattctttcaaagaatgagatgcataaaactttattatccaatagattgactatttcggacgtcaatcgtttaaagtaaacttcgtaaaatattctttgatcactgccgagtttaaaacttctatcgataattgtttcatatgttttaatatttacaagttttttggtccatggtccattaggacaaatatatgcaaaataatatcgttctccaagttctatagtctctggattatttttattatattcagtaaccaaatacatattagggttatctgcggatttataatttgagtgatgcattcgactcaacataaataattctagaggagacgatctactatcaaattcggatcgtaaatctgtttctaaagaacggagaatatctatacatacctgattagaattcatccgtccttcagacaacatctcagacagtctggttttgtacatcttaatcatattcttatgaaacttggaaacatctcttctagtttcactagtacctttattaattctctcaggtacagattttgaattcgacgatgctgagtatttcatcgttgtatatttcttcttcgattgcataatcagattcttatataccgcctcaaactctattttaaaattattaaacaatactctattattaatcagtcgttctaactctttcgctatttctatagacttatctacatcttgactgtctatctctgtaaacacggagtcggtatctccatacacgctacgaaaacgaaatctgtaatctataggcaacgatgttttcacaatcggattaatatctctatcgtccatataaaatggattacttaatggattggcaaaccgtaacataccgttagataactctgctccatttagtaccgattctagatacaagatcattctacgtcctatggatgtgcaactcttagccgaagcgtatgagtatagagcactatttctaaatcccatcagaccatatactgagttggctactatcttgtacgtatattgcatggaatcatagatggccttttcagttgaactggtagcctgttttagcatctttttatatctggctctctctgccaaaaatgttcttaatagtctaggaatggttccttctatcgatctatcgaaaattgctatttcagagatgaggttcggtagtctaggttcacaatgaaccgtaatatatctaggaggtggatatttctgaagcaatagctgattatttatttcttcttccaatctattggtactaacaacgacaccgactaatgtttccggagatagatttccaaagatacacacattaggatacagactgttataatcaaagattaatacattattactaaacattttttgttttggagcaaataccttaccgccttcataaggaaacttttgttttgtttctgatctaactaagatagttttagtttccaacaatagctttaacagtggacccttgatgactgtactcgctctatattcgaataccatggattgaggaagcacatatgttgacgcacccgcgtctgtttttgtttctactccataatactcccacaaatactgacacaaacaagcatcatgaatacagtatctagccatatctaaagctatgtttagattataatccttatacatctgagctaaatcaacgtcatcctttccgaaagataatttatatgtatcattaggtaaagtaggacataatagtacgactttaaatccattttcccaaatatctttacgaattactttacatataatatcctcatcaacagtcacataattacctgtggttaaaacctttgcaaatgcagcggctttgcctttcgcgtctgtagtatcgtcaccgatgaacgtcatttctctaactcctctatttaatactttacccatgcaactgaacgcgttcttggatatagaatccaatttgtacgaatccaatttttcaaatttttgaatgaatgaatatagatcgaaaaatatagttccattattgttattaacgtgaaacgtagtattggccatgccgcctactcccttatgactagactgatttctctcataaatacagagatgtacagcttcctttttgtccggagatctaaagataattttctctcctgttaataactctagacgattagtaatatatctcagatcaaagttatgtccgttaaaggtaacgacgtagtcgaacgttagttccaacaattgtttagctattcgtaacaaaactatttcagaacatagaactagttctcgttcgtaatccatttccattagtgactgtatcctcaaacatcctctatcgacggcttcttgtatttcctgttccgttaacatctcttcattaatgagcgtaaacaataatcgtttaccacttaaatcgatataacagtaacttgtatgcgagattgggttaataaatacagaaggaaacttcttatcgaagtgacactctatatctagaaataagtacgatcttgggatatcgaatctaggtatttttttagcgaaacagttacgtggatcgtcacaatgataacatccattgttaatctttgtcaaatattgctcgtccaacgagtaacatccgtctggagatatcccgttagaaatataaaaccaactaatattgagaaattcatccatggtggcattttgtatgctgcgtttctttggctcttctatcaaccacatatctgcgacggagcattttctatctttaatatctagattataacttattgtctcgtcaatgtctatagttctcatctttcccaacggcctcgcattaaatggaggaggagacaatgactgatatatttcgtccgtcactacgtaataaaagtaatgaggaaatcgtataaatacggtctcaccatttcgacatctggatttcagatataaaaatctgttttcaccgtgactttcaaaccaattaatgcaccgaacatccatttatagaatttagaaatatattttcatttaaatgaatcccaaacattggggaagagccgtatggaccattatttttatagtactttcgcaagcgggtttagacggcaacatagaagcgtgtaaacgaaaactatatactatagttagcactcttccatgtcctgcatgtagacggcacgcgactatcgctatagaggacaataatgtcatgtctagcgatgatctgaattatatttattattttttcatcagattatttaacaatttggcatctgatcccaaatacgcgatcgatgtgacaaaggttaaccctttataaacttaacccattataaaacttatgattagtcacaactgaaataaccgcgtgattattttttggtataattctacacggcatggtttctgtgactatgaattcaacccccgttacattagtgaaatctttaacaaacagcaagggttcgtcaaagacataaaactcattgtttacaatcgaaatagaccccctatcacacttaaaataaaaaatatccttatcctttaccaccaaataaaattctgattggtcaatgtgaatgtattcacttaacagttccacaaatttatttattaactccgaggcacatacatcgtcggtattttttatggcaaactttactcttccagcatccgtttctaaaaaaatattaacgagttccatttatatcatccaatattattgaaatgacgttgatggacagatgatacaaataagaaggtacggtacctttgtccaccatctcctccaattcatgctctattttgtcattaactttaatgtatgaaaacagtacgccacatgcttccatgacagtgtgtaacactttggatacaaaatgtttgacattagtataattgttcaagactgtcaatctataatagatagtagctataatatattctatgatggtattgaagaagatgacaaccttggcatattgatcatttaacacagacatggtatcaacagatagcttgaatgaaagagaatcagtaattggaataagcgtcttctcgatagagtgtccgtataccaacatgtctgatattttgatgtattccattaaattatttagttttttctttttattctcgttaaacagcatttctgtcaacggaccccaacatcgttgaccgattaagttttgattgatttttccgtgtaaggcgtatctagtcagatcgtatagcctatccaataatccatcatctgtgcgtagatcacatcgtacactttttaattctctatagaagagcgacagacatctggagcaattacagacagcaatttctttattctctacagatgtaagatacttgaagacattcctatgatgatgcagaattttggataacacggtattgatggtatctgttaccataattcctttgatggctgatagtgtcagagcacaagatttccaatctttgacaatttttagcaccattatctttgttttgatatctatatcagacagcatggtgcgtctgacaacacagggattaagacggaaagatgaaatgattctctcaacatcttcaatagataccttgctattttttctggcattatctatatgtgcgagaatatcctctagagaatcagtatcctttttgatgatagtggatctcaatgacatgggacgtttaaaccttcttattctatcaccagattgcatggtgatttgtcttctttcttttatcataatgtaatctctaaattcatcggcaaattgtctatatctaaaatcataatatgagatgtttacctctacaaatatctgttcgtccaatgttagagtatttacatcagttttgtattccaaattaaacatggcaacggatttaattttatattcctctattaagtcctcgtcgataataacagaatgtagataatcatttaatccatcgtacatggttggaagatgcttgttgacaaaatctttaattgtcttgatgaaggtgggactatatctaacatcttgattaataaaatttataacattgtccataggatactttgtaactagttttatacacatctcttcatcggtaagtttagacagaatatcgtgaacaggtggtatattatattcatcagatatacgaagaacaatgtccaaatctatattgtttaatatattatatagatgtagcgtagctcctacaggaatatctttaactaagtcaatgatttcatcaaccgttagatctattttaaagttaatcatataggcattgatttttaaaaggtatgtagccttgactacattctcattaattaaccattccaagtcactgtgtgtaagaagattatattctatcataagcttgactacatttggtcccgataccattaaagaattcttatgatataaggaaacagcttttaggtactcatctactctacaagaattttggagagccttaacgatatcagtgacgtttattatttcaggaggaaaaaacctaacattgagaatatcggaattaatagcttccagatacagtgattttggcaatagtccgtgtaatccataatccagtaacacgagctggtgcttgctagacaccttttcaatgtttaatttttttgaaataagctttgataaagccttcctcgcaaattccggatacatgaacatgtcggcgacatgattaagtattgttttttcattattttctcaataccccaatagatgatagaatatcacccaatgcgtccatgttgtctatttccaacaggtcgctatatccaccaatagaagtttttccaaaaaagattctaggaacagttctaccaccagtaatttgttcaaaatagtcacgcaattcattttcgggtttaaattctttaatatcgacaatttcatacgctcctcttttgaaactaaacttatttagaatatccagtgcatttctacaaaaaggacatgtatacttgacaaaaattgtcactttgttattggccaacctttgttgtacaaattcctcggccattttaatatttaagtgatataaaactatctcgacttatttaactctttagtcgagatatatggacgcagatagctatatgatagccaactacagaaggcaaacgctataaaaaacataattacgacgagcatatttataaatatttttattcagcattacttgatatagtaatattaggcacagtcaaacattcaaccactctcgatacattaactctctcattttctttaacaaattctgcaatatcttcgtaaaaagattcttgaaactttttagaatatctatcgactctagatgaaatagcgttcgtcaacatactatgttttgtatacataaaggcgcccattttaacagtttctagtgacaaaatgctagcgatcctaggatcctttagaatcacatagattgacgattcgtctctcttagtaactctagtaaaataatcatacaatctagtacgcgaaataatattatccttgacttgaggagatctaaacaatctagttttgagaacatcgataagttcatcgggaatgacatacatactatctttaatagaactcttttcatccagttgaatggattcgtccttaaccaactgattaatgagatcttctattttatcattttccagatgatatgtatgtccattaaagttaaattgtgtagcgcttctttttagtctagcagccaatactttaacatcactaatatcgatatacaaaggagatgatttatctatggtattaagaattcgtttttcgacatccgtcaaaaccaattcctttttgcctgtatcatccagttttccatcctttgtaaagaaattattttctactagactattaataagactgataaggattcctccataattgcacaatccaaactttttcacaaaactagactttacaagatctacaggaatgcgtacttcaggttttttagcttgtgattttttcttttgcggacattttctagtaaccaactcatctaccatttcattgattttagcagtgaaataagctttcaatgcacgggcactgatactattgaaaacgagttgatcttcaaattccgccatttaagttcaccaaacaacttttaaatacaaatatatcaatagtagtagaataagaactataaaaaaaataataattaaccaataccaaccccaacaaccggtattattagttgatgtgactgttttctcatcacttagaacagatttaacaatttctataaagtctgtcaaatcatcttccggagaccccataaatacaccaaatatagcggcgtacaacttatccatttatacattgaatattggcttttctttatcgctatcttcatcatattcatcatcaatatcaacaagtcccagattacgagccagatcttcttctacattttcagtcattgatacacgttcactatctccagagagtccgataacgttagccaccacttctctatcaatgattagtttcttgagcgcgaaagtaatttttgtttccgttccggatctatagaagacgataggtgtgataattgccttagccaattgtctttctcttttactgagtgattctagttcaccttctatagatctgagaatggatgattctccagtcgaaacatattctaccatggatccgtttaatttgttgatgaagatggattcatccttaaatgttttctctgtaatagtttccaccgaaagactatgcaaagaatttggaatgcgttccttgtgcttaatgtttccatagacggcttctagaagttgatacaacataggactagccgcggtaacttttatttttagaaagtatccatcgcttctatcttgtttagatttatttttataaagtttagtctctccttccaacataataaaagtggaagtcatttgactagataaactatcagtaagttttatagagatagacgaacaattagcgtattgagaagcatttagtgtaacgtattcgatacattttgcattagatttactaatcgattttgcatactctataacacccgcacaagtctgtagagaatcgctagatgcagtaggtcttggtgaagtttcaactctcttcttgattaccttactcatgattaaacctaaataattgtactttgtaatataatgatatatattttcactttatctcatttgagaataaaaatgtttttgtttaaccactgcatgatgtacagatttcggaatcgcaaaccaccagtggttttattttatccttgtccaatgtgaattgaatgggagcggatgcgggtttcgtacgtagatagtacattcccgtttttagaccgagactccatccgtaaaaatgcatactcgttagtttggaataactcggatctgctatatggatattcatagattgactttgatcgatgaaggctcccctgtctgcagccatttttatgatcgtcttttgtggaatttcccaaatagttttataaactcgcttaatatcttctggaaggtttgtattctgaatggatccaccatctgccataatcctattcttgatctcatcattccataattttctctcggttaaaactctaaggagatgcggattaactacttgaaattctccagacaatactctccgagtgtaaatattactggtatacggttccaccgactcattatttcccaaaatttgagcagttgatgcagtcggcataggtgccaccaataaactatttctaagaccgtatgttctgattttatcttttagaggttcccaattccaaagatccgacggtacaacattccaaagatcatattgtagaataccgttactggcgtacgatcctacatatgtatcgtatggtccttccttctcagctagttcacaactcgcctctaatgcaccgtaataaatggtttcgaagatcttcttatttagatcttgtgcttccaggctatcaaatggataatttaagagaataaacgcgtccgctaatccttgaacaccaataccgataggtctatgtctcttattagagatttcagcttctggaataggataataattaatatctataattttattgagatttctgacaattactttgaccacatccttcagtttgagaaaatcaaatcgcccatctattacaaacatgttcaaggcaacagatgccagattacaaacggctacctcattagcatccgcatattgtattatctcagtgcaaagattactacacttgatagttcctaaattttgttgattactctttttgttacacgcatccttataaagaatgaatggagtaccagtttcaatctgagattctataatcgctttccagacgactcgagcctttattatagatttgtatctcctttctctttcgtatagtgtatacaatcgttcgaactcgtctccccaaacattgtccaatccaggacattcatccggacacatcaacgaccactctccgtcatccttcactcgtttcataaagagatcaggaatccaaagagctataaatagatctctggttctatgttcctcgtttcctgtattctttttaagatcgaggaacgccataatatcagaatgccacggttccaagtatatggccataactccaggccgtttgtttcctccctgatctatgtatctagcggtgttattataaactctcaacattggaataataccgtttgatataccattggtaccggagatatagcttccactggcacgaatattactaattgatagacctattccccctgccattttagagattaatgcgcatcgttttaacgtgtcatagataccctctatgctatcatcgatcatgttaagtagaaaacagctagacatttggtgacgactagttcccgcattaaataaggtaggagaagcgtgcgtaaaccatttttcagaaagtagattgtacgtctcaatagctgagtctatatcccattgatgaattcctactgcgacacgcattaacatgtgctgaggtctttcaacgatcttgttgtttattttcaacaagtaggatttttccaaagttttaaaaccaaaatagttgtatgaaaagtctcgttcgtaaataataaccgagttgagtttatccttatatttgttaactatatccatggtgatacttgaaataatcggagaatgtttcccatttttaggattaacatagttgaataaatcctccatcacttcactaaatagtttttttgtttccttgtgtagatttgatacggctattctggcggctagaatggcataatccggatgttgtgtagtacaagtggctgctatttcggctgccagagtgtccaattctaccgttgttactccattatatattccttgaataaccttcatagctattttaataggatctatatgatccgtgtttaagccataacataattttctaatacgagacgtgattttatcaaacatgacattttccttgtatccatttcgtttaatgacaaacatttttgttggtgtaataaaaaaattatttaacttttcattaatagggatttgacgtatgtagcgtacaaaatgatcgttcctggtatatagataaagagtcctatatatttgaaaatcgttacggctcgattaaactttaatgattgcatagtgaatatatcattaggatttaactccttgactatcatggcggcgccagaaattaccatcaaaagcattaatacagttatgccgatcgcagttaaaacggttatagcatccaccatttatatctaaaaattagatcaaagaatatgtgacaaagtcctagttgtatactgagaattgacgaaacaatgtttcttacatatttttttcttattagtaactgacttaatagtaggaactggaaagctagacttgattattctataagtatagatacccttccagataatgttctctttgataaaagttccagaaaatgtagaattttttaaaaagttatcttttgctattaccaagattgtgtttagacgcttattattaatatgagtgatgaaatccacaccgcctctagatatcgcctttatttccacattagatggtaaatccaatagtgaaactatctttttaggaatgtatggactcgcgtttagaggagtgaacgtcttgggcgtcggaaaggatgattcgtcaaacgaataaacaatttcacaaatggatgttaatgtattagtaggaaattttttgacgctagtggaattgaagattctaatggatgatgttctacctatttcatccgataacatgttaatttccgacaccaacggttttaatatttcgatgatatacggtagtctctctttcggacttatatagcttattccacaatacgagtcattatatactccaaaaaacaaaataactagtataaaatctgtatcgaatgggaaaaacgaaattatcgacataggtatagaatccggaacattgaacgtattaatacttaattctttttctgtggtaagtaccgataggttattgacattgtatggttttaaatattctataacttgagacttgatagatattagtgatgaattgaaaattatttttatcaccacgtgtgtttcaggatcatcgtcgacgcccgtcaaccaaccgaatggagtaaaataaatatcattaatatatgctctagatattagtatttttattaatcctttgattatcatcttctcgtaggcgaatgattccatgatcaagagtgatttgagaacatcctccggagtattaatgggcttagtaaacagtccatcgttgcaataataaaagttatccaagttaaaggatattatgcattcgtttaaagatatcacctcatctgacggagacaattttttggtaggttttagagactttgaagctacttgtttaacaaagttattcatcgtcgtctactattctatttaattttgtagttaatttatcacatatcacattaattgactttttggtccatttttccatacgtttatattcttttaatcctgcgttatccgtttccgttatatccagggatagatcttgcaagttaaatagaatgctcttaaataatgtcattttcttatccgctaaaaatttaaagaatgtataaacctttttcagagatttgaaactcttaggtggtgtcctagtacacaatatcataaacaaactaataaacattccacattcagattccaacagctgattaacttccacattaatacagcctattttcgctccaaatgtacattcgaaaaatctgaataaaacatcgatgtcacaatttgtattatccaatacagaatgtttgtgattcgtgttaaaaccatcggagaaggaatagaaataaaaattattatagtggtggaattcagttggaatattgcctccggagtcataaaaggatactaaacattgttttttatcataaattacacatttccaatgagacaaataacaaaatccaaacattacaaatctagaggtagaacttttaattttgtctttaagtatatacgataagatatgtttattcataaacgcgtcaaatttttcatgaatcgctaaggagtttaagaatctcatgtcaaattgtcctatataatccacttcggatccataagcaaactgagagactaagttcttaatacttcgattgctcatccaggctcctctctcaggctctattttcatcttgacgacctttggattttcaccagtatgtattcctttacgtgataaatcatcgattttcaaatccatttgtgagaagtctatcgccttagatactttttcccgtagtcgaggtttaaaaaaatacgctaacggtatactagtaggtaactcaaagacatcatatatagaatggtaacgcgtctttaactcgtcggttaactctttcttttgatcgagttcgtcgctactattgggtctgctcaggtgccccgactctactagttccaacatcataccgataggaatacaagacactttgccggcggttgtagatttatcatatttttccactacatatccgttacaatttgttaaaaatttagatacatctatattgctacataatccagctagtgaatatatatgacataataaattggtaaatcctagttctggtattttactaattactaaatctgtatatctttccatttatcatggaaaagaatttaccagatatcttcttttttccaaactgcgttaatgtattctcttacaaatattcacaagatgaattcagtaatatgagtaaaacggaacgtgatagtttctcattggccgtgtttccagttataaaacatagatggcataacgcacacgttgtaaaacataaaggaatatacaaagttagtacagaagcacgtggaaaaaaagtatctcctccatcactaggaaaacccgcacacataaacctaaccgcgaagcaatatatatacagtgaacacacaataagctttgaatgttatagttttctaaaatgtataacaaatacagaaatcaattcgttcgatgagtatatattaagaggactattagaagctggtaatagtttacagatattttccaattccgtaggtaaacgaacagatactataggtgtactagggaataagtatccatttagcaaaattccattggcctcattaactcctaaagcacaacgagagatattttcagcgtggatttctcatagacctgtagttttaactggaggaaccggagtgggtaagacgtcacaggtacccaagttattgctttggtttaattatttatttggtggattctctactctagataaaattactgactttcacgaaagaccagtcattctatctcttcctaggatagctttagttagattgcatagcaataccattttaaaatcattgggatttaaggtactagatggatctcctatttctttacggtacggatctataccggaagaattaataaacaaacaaccaaaaaaatatggaattgtattttctacccataagttatctctaacaaaactatttagttatggcactcttattatagacgaagttcatgagcatgatcaaataggagatattattatagcagtagcgagaaagcatcatacgaaaatagattctatgtttttaatgactgccacattagaggatgaccgagaacggctaaaagtatttttacctaatcccgcatttatacatattcctggagatacactgtttaaaattagcgaggtatttattcataataagataaatccatcttccagaatggcatacatagaagaagaaaagagaaatttagttactgctatacagatgtatactcctcctgatggatcatccggtatagtctttgtggcatccgttgcacagtgtcacgaatataaatcatatttagaaaaaagattaccgtatgatatgtatattattcatggtaaggtcttagatatagacgaaatattagaaaaagtgtattcatcacctaatgtatcgataattatttctactccttatttggaatccagcgttactatacgcaatgttacacacatttatgatatgggtagagtttttgtccccgctccttttggaggatcgcaacaatttatttctaaatctatgagagatcaacgaaaaggaagagtaggaagagttaatcctggtacatacgtctatttctatgatctgtcttatatgaagtctatacagcgaatagattcagaatttctacataattatatattgtacgctaataagtttaatctaacactccccgaagatttgtttataatccctacaaatttggatattctatggcgtacaaaggaatatatagactcgttcgatattagtacagaaacatggaataaattattatccaattattatatgaagatgatagagtatgctaaactttatgtactaagtcctattctcgctgaggagttggataactttgagaggacgggagaattaactagtattgtacgagaagccattttatctctaaatttacgaattaagattttaaattttaaacataaagatgatgatacgtatatacacttttgtaaaatattattcggtgtctataacggaacaaacgctactatatattatcatagacctctaacgggatatatgaatatgatttcagatactatatttgttcctgtagataataactaaaaatcaaactctaatgaccacatctttttttagagatgaaaaattttccacatctccttttgtagacacgactaaacattttgcagaaaaaagtttattagtgtttagataatcgtatacttcatcagtgtagatagtaaatgtgaacagataaaaggtattcttgctcaatagattggtaaattccatagaatatattaatcctttcttcttgagatcccacatcatttcaaccagagacgttttatccaatgatttacctcgtactataccacatacaaaactagattttgcagtgacgtcgtacctggtattcctaccaaacaaaattttacttttagttcttttagaaaattctaaggtagaatctctatttgccaatatgtcatctatggaattaccactagcaaaaaatgatagaaatatatattgatacatcgcagctggttttgatctactatactttaaaaacgaatcagattccataattgcctgtatatcatcagctgaaaaactatgttttacacgtattccttcggcatttctttttaatgatatatcttgtttagacaatgataaagttatcatgtccatgagagacgcgtctccgtatcgtataaatatttcattagatgttagacgcttcattaggggtatacttctataaggtttcttaatcagtccatcattggttgcgtcaagaactactatcggatgttgttgggtatctctagtgttacacatggccttactaaagtttgggtaaataactatgatatctctattaattatagatgcatatatttcattcgtcaaggatattagtatcgacttgctatcgtcattaatacgtgtaatgtaatcatataaatcatgcgatagccaaggaaaatttaaatagatgttcatcatataatcgtcgctataattcatattaatacgttgacattgactaatttgtaatatagcctcgccacgaagaaagctctcgtattcagtttcatcgataaaggataccgttaaatataactggttgccgatagtctcatagtctattaagtggtaagtttcgtacaaatacagaatccctaaaatattatctaatgttggattaatctttaccataactgtataaaatggagacggagtcataactattttaccgtttgtacttactggaatagatgaaggaataatctccggacatgctggtaaagacccaaatgtctgtttgaagaaatccaatgttccaggtcctaatctcttaacaaaaattacgatattcgatcccgatatcctttgcattctatttaccagcatatcacgaactatattaagattatctatcatgtctattctcccaccgttatataaatcgcctccgctaagaaacgttagtatatccatacaatggaatacttcatttctaaaatagtattcgttttctaattctttaatgtgaaatcgtatactagaaagggaaaaattatctttgagttttccgttagaaaagaaccacgaaactaatgttctgattgcgtccgattccgttgctgaattaatggatttacaccaaaaactcatataacttctagatgtagaagcattcgctaaaaaattagtagaatcaaaggatataagtagatgttccaacaagtgagcaattcccaagatttcatctatatcattctcgaatccgaaattagaaattcccaagtagatatcctttttcatccgatcgttgatgaaaatacgaactttattcggtaagacaatcatttactaaggagtaaaataggaagtaatgttcgtatgtcgttatcatcgtataaattaaaggtgtgttttttaccattaagtgacattataattttaccaatattggaattataatataggtgtatttgcgcactcgcgacggttgatgcatcggtaaatatagctgtatctaatgttctagtcggtatttcatcatttcgctgtctaataatagcgttttctctatctgtttccattacagctgcctgaagtttattggtcggataatatgtaaaataataagaaatacatacgaataacaaaaataaaataagatataataaagatgccatttagagatctaattttgtttaacttgtccaaattcctacttacagaagatgaggaatcgttggagatagtgtcttccttatgtagaggatttgaaatatcttataatgacttgataacttactttccagataggaaataccataaatatatttataaagtatttgaacatgtagatttatcggaggaattaagtatggaattccatgatacaactctgagagatttagtctatcttagattgtacaagtattccaagtgtatacggccgtgttataaattaggagataatctaaaaggcatagttgttataaaggacaggaatatttatattagggaagcaaatgatgacttgatagaatatctcctcaaggaatacactcctcagatttatacatattctaatgagcgcgtccccataactggttcaaaattaattctttgtggattttctcaagttacatttatggcgtatacaacgtcgcatataacaacaaataaaaaggtagatgttctcgtttccaaaaaatgtatagatgaactagtcgatccaataaattatcaaatacttcaaaatttatttgataaaggaagcggaacaataaacaaaatactcaggaagatattttattcggtaacaggtggccaaactccataggtagctttttctatttcggattttagaatttccaaattcaccagcgatttatcggttttggtgaaatccaaggatttattaatgtccacaaatgccatttgttttgtctgtggattgtatttgaaaatggaaacgatgtagttagatagatgcgctgcaaagtttcctattagggttccgcgctttacgtcacccagcatacttgaatcaccatcctttaaaaaaaatgataagatatcaacatggagtatatcatactcggattttaattcttctactgcatcactgacattttcacaaatactacaatacggtttaccgaaaataatcagtacgttcttcatttatgggtatcaaaaacttaaaatcgttactgctggaaaataaatcactgacgatattagatgataatttatacaaagtatacaatggaatatttgtggatacaatgagtatttatatagccgtcgccaattgtgtcagaaacttagaagagttaactacggtattcataaaatacgtaaacggatgggtaaaaaagggagggcatgtaaccctttttatcgatagaggaagtataaaaattaaacaagacgttagagacaagagacgtaaatattctaaattaaccaaggacagaaaaatgttagaattagaaaagtgtacatccgaaatacaaaatgttaccggatttatggaagaagaaataaaggcagaaatgcaattaaaaatcgataaactcacatttcaaatatatttatctgattctgataacataaaaatatcattgaatgagatactaacacatttcaacaataatgagaatgttacattattttattgtgatgaacgagacgcagaattcgttatgtgtctcgaggctaaaacacatttctctaccacaggagaatggccgttgataataagtaccgatcaggatactatgctatttgcatctgctgataatcatcctaagatgataaaaaacttaactcaactgtttaaatttgttccctcggcagaggataactatttagcaaaattaacggcgttagtgaatggatgtgatttctttcctggactctatggggcatctataacacccaccaacttaaacaaaatacaattgtttagtgattttacaatcgataatatagtcactagtttggcaattaaaaattattatagaaagactaactctaccgtagacgtgcgtaatattgttacgtttataaacgattacgctaatttagacgatgtctactcgtatattcctccttgtcaatgcactgttcaagaatttatattttccgcattagatgaaaaatggaatgaatttaaatcatcttatttagaaagcgtgccgttaccctgccaattaatgtacgcgttagaaccacgcaaggagattgatgtttcagaagttaaaactttatcatcttatatagatttcgaaaatactaaatcagatatcgatgttataaaatctatatcctcgatcttcggatattctaacgaaaactgtaacacgatagtattcggcatctataaggataatttactactgagtataaataattcattttactttaacgatagtctgttaataaccaatactaaaagtgataatataataaatataggttactagattaaaaatggtgttccaactcgtgtgctctacatgcggtaaagatatttctcacgaacgatataaattgattatacgaaaaaaatcattaaaggatgtactcgtcagtgtaaagaacgaatgttgtaggttaaaattatctacacaaatagaacctcaacgtaacttaacagtgcaacctctattggatataaactaatatggatccggttaattttatcaagacatatgcgcctagaggttctattatttttattaattataccatgtcattaacaagtcatttgaatccatcgatagaaaaacatgtgggtatttattatggtacgttattatcggaacacttggtagttgaatctacctatagaaaaggagttcgaatagtcccattggatagtttttttgaaggatatcttagtgcaaaagtatacatgttagagaatattcaagttatgaaaatagcagctgatacgtcattaactttattgggtattccgtatggatttggtcataatagaatgtattgttttaaattggtagctgactgttataaaaatgccggtattgatacatcgtctaaacgaatattgggcaaagatatttttctgagccaaaacttcacagacgataatagatggataaagatatatgattctaataatttaacattttggcaaattgattaccttaaagggtgagttaatatgcataactactcctccgttgttttttccctcgttctttttcttaacgttgtttgccatcactctcataatgtaaagatattctaaaatggtaaacttttgcatatcggacgcagaaattggtataaatgttgtaattgtattatttcccgtcaatggactagtcacagctccatcagttttatatcctttagagtatttctcactcgtgtctaacattctagagcattccatgatctgtttatcgttgatattggccggaaagatagattttttattttttattatattactattggcaattgtagatataacttctggtaaatatttttctaccttttcaatctcttctattttcaagccggctatatattctgctatattgttgctagtatcaataccttttctggctaagaagtcatatgtggtattcactatatcagttttaactggtagttccattagcctttccacttctgcagaataatcagaaattggttctttaccagaaaatccagctactataataggctcaccgatgatcattggcaaaatcctatattgtaccagattaatgagagcatatttcatttccaataattctgctagttcttgagacattgatttatttgatgaatctagttggttctctagatactctaccatttctgccgcatacaataacttgttagataaaatcagggttatcaaagtgtttagcgtggctagaatagtgggcttgcatgtattaaagaatgcggtagtatgagtaaaccgttttaacgaattatatagtctccagaaatctgtggcgttacatacatgagccgaatgacatcgaagattgtccaatatttttaatagctgctctttgtccattatttctatatttgactcgcaacaattgtagataccattaatcaccgattcctttttcgatgccggacaatagcacaattgtttagctttggactctatgtattcagaattaatagatatatctctcaatacagattgcactatacattttgaaactatgtcaaaaattgtagaacgacgctgttctgcagccatttaactttaaataatttacaaaaatttaaaatgagcatccgtataaaaatcgataaactgcgccaaattgtggcatatttttcagagttcagtgaagaagtgtctataaatgtagactcgacggatgagttaatgtatatttttgccgccttgggcggatctgtaaacatttgggcaattatacctctaagtgcatcagtgttttaccgaggagccgaaaatattgtgtttaatcttcctgtgtccaaggtaaaatcgtgtttgtgtagttttcacaatgatgccatcatagatatagaacctgatctggaaaataatctagtaaaactttctagttatcatgtagtaagtgtcgattgtaacaaggaactgatgcctattaggacagatactactatttgtctaagtatagatcaaaagaaatcttacgtgtttaattttcacaagtatgaagaaaaatgttgtggtagaaccgtcattcatctagaatggttgttgggctttatcaagtgtattagtcagcatcagcatctggctattatgtttaaagatgacaatattattatgaagactcctggtaatactgatgcgttttccagggaatattctatgactgaatgttctcaagaactacaaaagttttctttcaaaatagctatctcgtctctcaacaaactacgaggattcaaaaagagagtcaatgtttttgaaactagaatcgtaatggataatgacgataacattttaggaatgttgttttcggatagagttcaatcctttaagatcaacatctttatggcgtttttagattaatactttcaatgagataaatatgggtggcggagtaagtgttgagctccctaaacgggatccgcctccgggagtacccactgatgagatgttattaaacgtggataaaatgcatgacgtgatagctcccgctaagcttttagaatatgtgcatataggaccactagcaaaagataaagaggataaagtaaagaaaagatatccagagtttagattagtcaacacaggacccggtggtctttcggcattgttaagacaatcgtataatggaaccgcacccaattgctgtcgcacttttaatcgtactcattattggaagaaggatggaaagatatcagataagtatgaagagggtgcagtattagaatcgtgttggccagacgttcacgacactggaaaatgcgatgttgatttattcgactggtgtcagggggatacgttcgatagaaacatatgccatcagtggatcggttcagcctttaataggagtaatagaactgtagagggtcaacaatcgttaataaatctgtataataagatgcaaacattatgtagtaaagatgctagtgtaccaatatgcgaatcatttttgcattatttacgcgcacacaatacagaagatagcaaagagatgatcgattatattctaagacaacagtctgcggactttaaacagaaatatatgagatgtagttatcccactagagataagttagaagagtcattaaaatatgcggaacctcgagaatgttgggatccagagtgttcgaatgccaatgttaatttcttactaacacgtaattataataatttaggactttgcaatattgtacgatgtaataccagcgtgaacaacttacagatggataaaacttcctcattaagattgtcatgtggattaagcaatagtgatagattttctactgttcccgtcaatagagcaaaagtagttcaacataatattaaacactcgttcgacctaaaattgcatttgatcagtttattatctctcttggtaatatggatactaattgtagctatttaaatgggtgccgcggcaagcatacagacgacggtgaatacactcagcgaacgtatctcgtctaaattagaacaagaagcgaacgctagtgctcaaacaaaatgtgatatagaaatcggaaatttttatatccgacaaaaccatggatgtaacctcactgttaaaaatatgtgctctgcggacgcggatgctcagttggatgctgtgttatcagccgctacagaaacatatagtggattaacaccggaacaaaaagcatacgtgccagctatgtttactgctgcgttaaacattcagacgagtgtaaacactgttgttagagattttgaaaattatgtgaaacagacttgtaattctagcgcggtcgtcgataacaaattaaagatacaaaacgtaatcatagatgaatgttacggagccccaggatctccaacaaatttggaatttattaatacaggatctagcaaaggaaattgtgccattaaagcgttgatgcaattgacgactaaggccactactcaaatagcacctagacaagttgctggtacaggagttcagttttatatgattgttatcggtgttataatattggcagcgttgtttatgtactatgccaagcgtatgttgttcacatccaccaatgataaaatcaaacttattttagccaataaggaaaacgtccattggactacttacatggacacattctttagaacttctccgatggttattgctaccacggatatgcaaaactgaaaatatattgataatattttaatagattaacatggaagttatcgctgatcgtctagacgatatagtgaaacaaaatatagcggatgaaaaatttgtagattttgttatacacggtctagagcatcaatgtcctgctatacttcgaccattaattaggttgtttattgatatactattatttgttatagtaatttatatttttacggtacgtctagtaagtagaaattatcaaatgttgttggtggtgctagtcatcacattaactattttttattactttatactataatagtactagactgacttctaacaaacatctcacctgccataaataaatgcttgatattaaagtcttctatttctaacactattccatctgtggaaaataatactctgacattatcgctaattgacacatcggtgagtgatatgcctataaagtaataatcttctttgggcacatataccagtgtaccaggttctaacaacctatttactggtgctcctgtagcatactttttctttaccttgagaatatccatcgtttgcttggtcaatagcgatatgtgattttttatcaaccactcaaaaaagtaattggagtgttcatatcctctacgggctattgtctcatggccgtgtatgaaatttaagtaacacgactgtggtagatttgttctatagagccgattgccgcaaatagatagaactaccaatatgtctgtacaaatgttaaacattaattgattaacagaaaaaacaatgttcgttctgggaatagaaaccagatcaaaacaaaattcgttagaatatatgccacgtttatacatggaatataaaataactacagtttgaaaaataacagtatcatttaaacatttaacttgcggggttaatctcacaactttactgtttttgaactgttcaaaatatagcatcgatccgtgagaaatacgtttagccgcctttaatagaggaaatcccaccgcctttctggatctcaccaacgacgatagttctgaccagcaactcatttcttcatcatccacctgttttaacatataataggcaggagatagatatccgtcattgcaatattccttctcgtaggcacacaatctaatattgataaaatctccattctcttctctgcatttattatcttgtctcggtggctgattaggctgtggtcttggtttaggccttggtctatcgttgttgaatctattttggtcattaaatctttcatttcttcctggtatatttttatcacctcgtttggttggatttttgtctatattatcgtttgtaacatcggtacgggtattcatttatcacaaaaaaaacttctctaaatgagtctactgctagaaaacctcatcgaagaagataccatattttttgcaggaagtatatctgagtatgatgatttacaaatggttattgccggcgcaaaatccaaatttccaagatctatgctttctatttttaatatagtacctagaacgatgtcaaaatatgagttggagttgattcataacgaaaatatcacaggagcaatgtttaccacaatgtataatataagaaacaatttgggtctaggagatgataaactaactattgaagccattgaaaactatttcttggatcctaacaatgaagttatgcctcttattattaataatacggatatgactgccgtcattcctaaaaaaagtggtaggagaaagaataagaacatggttatcttccgtcaaggatcatcacctatcttgtgcattttcgaaactcgtaaaaagattaatatttataaagaaaatatggaatccgcgtcgactgagtatacacctatcggagacaacaaggctttgatatctaaatatgcgggaattaatgtcctgaatgtgtattctccttccacatccataagattgaatgccatttacggattcaccaataaaaataaactagagaaacttagtactaataaggaactagaatcgtatagttctagccctcttcaagaacccattaggttaaatgattttctgggactattggaatgtgttaaaaagaatattcctctaacagatattccgacaaaggattgattactataaatggagaatgttcctaatgtatactttaatcctgtgtttatagagcccacgtttaaacattctttattaagtgtttataaacacagattaatagttttatttgaagtattcgttgtattcattctaatatatgtattttttagatctgaattaaatatgttcttcatgcctaaacgaaaaatacccgatcctattgatagattacgacgtgctaatctagcgtgtgaagacgataaattaatgatctatggattaccatggatgacaactcaaacatctgcgttatcaataaatagtaaaccgatagtgtataaagattgtgcaaagcttttgcgatcaataaatggatcacaaccagtatctcttaacgatgttcttcgcagatgatgattcattttttaagtatttggctagtcaagatgatgaatcttcattatctgatatattgcaaatcactcaatatctagactttctgttattattattgatccaatcaaaaaataaattagaagctgtgggtcattgttatgaatctctttcagaggaatacagacaattgacaaaattcacagactttcaagattttaaaaaactgtttaacaaggtccctattgttacagatggaagggtcaaacttaataaaggatatttgttcgactttgtgattagtttgatgcgattcaaaaaagaatcctctctagctaccaccgcaatagatcctgttagatacatagatcctcgtcgtgatatcgcattttctaacgtgatggatatattaaagtcgaataaagtgaacaataattaattctttattgtcatcatgaacggcggacatattcagttgataatcggccccatgttttcaggtaaaagtacagaattaattagacgagttagacgttatcaaatagctcaatataaatgcgtgactataaaatattctaacgataatagatacggaacgggactatggacgcatgataagaataattttgaagcattggaagcaactaaactatgtgatgtcttggaatcaattacagatttctccgtgataggtatcgatgaaggacagttctttccagacattgtttaattctgtgagcgtatggcaaacgaaggaaaaatagttatagtagccgcactcgatgggacatttcaacgtaaaccgtttaataatattttgaatcttattccattatctgaaatggtggtaaaactaactgctgtgtgtatgaaatgctttaaggaggcttccttttctaaacgattgggtgaggaaaccgagatagagataataggaggtaatgatatgtatcaatcggtgtgtagaaagtgttacgtcggctcataatattatattttttatctaaaaaactaaaaataaacattgattaaattttaatataatacttaaaaatggatgttgtgtcgttagataaaccgtttatgtattttgaggaaattgataatgagttagattacgaaccagaaagtgcaaatgaggtcgcaaaaaaactgccgtatcaaggacagttaaaactattactaggagaattattttttcttagtaagttacagcgacacggtatattagatggtgccaccgtagtgtatataggatcggctcctggtacacatatacgttatttgagagatcatttctataatttaggagtgatcatcaaatggatgctaattgacggccgccatcatgatcctattttaaatggattgcgtgatgtaactctagtgactcggttcgttgatgaggaatatctacgatccatcaaaaaacaactgcatccttctaagattattttaatttctgatgtgagatccaaacgaggaggaaatgaacctagtacggcggatttactaagtaattacgctctacaaaatgtcatgattagtattttaaaccccgtggcgtctagtcttaaatggagatgcccgtttccagatcaatggatcaaggacttttatatcccacacggtaataaaatgttacaaccttttgctccttcatattcagctgaaatgagattattaagtatttataccggtgagaacatgagactgactcgagttaccaaattagacgctgtaaattatgaaaaaaagatgtactaccttaataagatcgtccgtaacaaagtagttgttaactttgattatcctaatcaggaatatgactattttcacatgtactttatgctgaggaccgtgtactgcaataaaacatttcctactactaaagcaaaggtactatttctacaacaatctatatttcgtttcttaaatattccaacaacatcaactgaaaaagttagtcatgaaccaatacaacgtaaaatatctagcaaaaattctatgtctaaaaacagaaatagcaagagatccgtacgcggtaataaatagaaacgtactactgagatatactaccgatatagagtataatgatttagttactttaataaccgttagacataaaattgattctatgaaaactgtgtttcaggtatttaacgaatcatccataaattatactccggttgatgatgattatggagaaccaatcattataacatcgtatcttcaaaaaggtcataacaagtttcctgtaaattttctatacatagatgtggtaatatctgacttatttcctagctttgttagactagatactacagaaactaatatagttaatagtgtactacaaacaggcgatggtaaaaagactcttcgtcttcccaaaatgttagagacggaaatagttgtcaagattctctatcgccctaatataccattaaaaattgttagatttttccgcaataacatggtaactggagtagagatagccgatagatctgttatttcagtcgctgattaatcaattagtagagatgagataagaacattataataatcaataatatatcttatatcttatatcttatatcttatatcttgtttagaaaaatgctaatattaaaatagctaacgctagtaatccaatcggaagccatttgatatctataatagggtatctaatttcctgatttaaatagcggacagctatattctcggtagctactcgtttggaatcacaaacattatttacatctaatttactatctgtaatggaaacgtttcccaatgaaatggtacaatccgatacattgcattttgttatatttttttttaaagaggctggtaacaacgcatcgcttcgtttacatggctcgtaccaacaataatagggtaatcttgtatctattcctatccgtactatgcttttatcaggataaatacatttacatcgtatatcgtctttgttagcatcacagaatgcataaatttgttcgtccgtcatgataaaaatttaaagtgtaaatataactattatttttatagttgtaataaaaagggaaatttaattgtatactttcggttctttaaaagaaactgacttgataaaaatggctgtaatctctaaggttacgtatagtctatatgatcaaaaagagattaatgctacagatattatcattagtcatgttaaaaatgacgacgatatcggtaccgttaaagatggtagactaggtgctatggatggggcattatgtaagacttgtgggaaaacggaattggaatgtttcggtcactggggtaaagtaagtatttataaaactcatatagttaagcctgaatttatttcagaaattattcgtttactgaatcatatatgtattcactgcggattattgcgttcacgagaaccgtattccgacgatattaacctaaaagagttatcgggacacgctcttaggagattaaaggataaaatattatccaagaaaaagtcatgttggaacagtgaatgtatgcaaccgtatcaaaaaattactttttcaaagaaaaaggtttgtttcgtcaacaagttggatgatattaacgttcctaattctctcatctatcaaaagttaatttctattcatgaaaagttttggccattattagaaattcatcaatatccagctaacttattttatacagactactttcccatccctccgttgattattagaccggctattagtttttggatagatagtatacccaaagagaccaatgaattaacttacttattaggtatgatcgttaagaattgtaacttgaatgctgatgaacaggttatccagaaggcggtaatagaatacgatgatattaaaattatttctaataacactaccagtatcaatttatcatatattacatccggcaaaaataatatgattagaagttatatcgtcgcccgacgaaaagatcagaccgctagatctgtaattggtcccagtacatctatcaccgttaatgaggtaggaatgcccgcatatattagaaatacacttacagaaaagatatttgttaatgcctttacagtggataaagttaaacaactattagcgtcaaaccaagttaaattttactttaataaacgattaaaccaattaacaagaatacgccaaggaaagtttattaaaaataaaatacatttattgcctggtgattgggtagaagtagctgttcaagaatatacaagtattatttttggaagacagccgtctctacatagatacaacgtcatcgcttcatctatcagagctaccgaaggagatactatcaaaatatctcccggaattgccaactctcaaaatgctgatttcgacggggatgaggaatggatgatattagaacaaaatcctaaagctgtaattgaacaaagtattcttatgtatccgacgacgttactcaaacacgatattcatggagcccccgtttatggatctattcaagatgaaatcgtagcagcgtattcattgtttaggatacaagatctttgtttagatgaagtattgaacatcttggggaaatatggaagagagttcgatcctaaaggtaaatgtaaattcagcggtaaagatatctatacttacttgataggtgaaaagattaattatccgggtctcttaaaggatggtgaaattattgcaaacgacgtagatagtaattttgttgtggctatgaggcatctgtcattggctggactcttatccgatcataagtcgaacgtggaaggtatcaactttattatcaagtcatcttatgtttttaagagatatctatctatttacggttttggggtgacattcaaagatctgagaccaaattcgacgttcactaataaattggaggccatcaacgtagaaaaaatagaacttatcaaagaagcatacgccaaatatctcaacgatgtaagagacgggaaaatagttccattatctaaagctttagaggcggactatgtggaatccatgttatccaacttgacaaatcttaatatccgagagatagaagaacatatgagacaaacgctgatagatgatccagataataacctcctgaaaatggccaaagcgggttataaagtaaatcccacagaactaatgtatattctaggtacgtatggacaacaaaggattgatggtgaaccagcagagactcgagtattgggtagagttttaccttactatcttccagactctaaggatccagaaggaagaggttatattcttaattctttaacaaaaggattaacgggttctcaatattacttttcgatgctggttgcaagatctcaatctactgatatcgtctgtgaaacatcacgtaccggaacactggctagaaaaatcattaaaaagatggaggatatggtggtcgacggatacggacaagtagttataggtaatacgctcatcaagtacgccgccaattataccaaaattctaggctcagtatgtaaacctgtagatcttatctatccagatgagtccatgacttggtatttggaaattagtgctctgtggaataaaataaaacagggattcgtttactctcagaaacagaaacttgcaaagaagacattggcgccgtttaatttcctagtattcgtcaaacccaccactgaggataatgctattaaggttaaggatctgtacgatatgattcataacgtcattgatgatgtgagagagaaatacttctttacggtatctaatatagattttatggagtatatattcttgacgcatcttaatccttctagaattagaattacaaaagaaacggctatcactatctttgaaaagttctatgaaaaactcaattatactctaggtggtggaactcctattggaattatttctgcacaggtattgtctgagaagtttacacaacaagccctgtccagttttcacactactgaaaaaagtggtgccgtcaaacaaaaacttggtttcaacgagtttaataacttgactaatttgagtaagaataagaccgaaattatcactctggtatccgatgatatctctaaacttcaatctgttaagattaatttcgaatttgtatgtttgggagaattaaatccagacatcactcttcgaaaagaaacagataggtatgtagtagatataatagtcaatagattatacatcaagagagcagaaataaccgaattagtcgtcgaatatatgattgaacgatttatctcctttagcgtcattgtaaaggaatggggtatggaaacattcattgaggatgaggataatattagatttactgtctacctaaatttcgttgaaccggaagaattgaatcttagtaagtttatgatggttcttccgggtgccgccaacaagggaaagattagtaaattcaagattcctatctctgactatacgggttatgacgacttcaatcaaacaaaaaagctcaataagatgactgtagaactcatgaatctaaaagaattgggttctttcgatttggaaaacgtcaacgtgtatcctggagtatggaatacatacgatatcttcggtatcgaggccgctcgtgaatacttgtgcgaagccatgttaaacacctatggagaagggttcgattatctgtatcagccttgtgatcttctcgctagtttactatgtgctagttacgaaccagaatcagtgaataaattcaagttcggcgcagctagtactcttaagagagctacgttcggagacaataaagcattgttaaacgcggctcttcataaaaagtcagaacctattaacgataatagtagctgccacttttttagcaaggtccctaatataggaactggatattacaaatactttatcgacttgggtcttctcatgagaatggaaaggaaactatctgataagatatcttctcaaaagatcaaggaaatggaagaaacagaagacttttaattcttatcaataacatatttttctatgatctgtcttttaaacgatggattttccacaaatgcgcctctcaagtccctcatagaatgatacacgtataaaaaatatagcataggcaatgactccttatttttagacattagatatgccaaaatcatagccccgcttctatttactcccgcagcacaatgaaccaacacgggctcgtttcgttgatcacatttagataaaaaggcggttacgtcgtcaaaatatttactaatatcggtagttgtatcatctaccaacggtatatgaataatattaatattagagttaggtaatgtatatttatccatcgtcaaatttaaaacatatttgaacttaacttcagatgatggtgcatccatagcatttttataatttcccaaatacacattattggttacccttgtcattatagtgggagatttggctttgtgcatatctccagttgaacgtagtagtaagtatttatacaaacttttcttatccatttataacgtacaaatggataaaactactttatcggtaaacgcgtgtaatttagaatacgttagagaaaaggctatagtaggcgtacaagcagccaaaacatcaacacttatattctttgttattatattggcaattagtgcgctattactctggtttcagacgtctgataatccagtctttaatgaattaacgagatatatgcgaattaaaaatacggttaacgattggaaatcattaacggatagcaaaacaaaattagaaagtgatagaggtagacttctagccgctggtaaggatgatatattcgacttcaaatgtgtggatttcggcgcctattttatagctatgcgattggataagaaaacatatctgccgcaagctattaggcgaggtactggagacgcgtggatggttaaaaaggcggcaaaggtcgatccatctgctcaacaattttgtcagtatttgataaaacacaagtctaataatgttattacttgtggtaatgagatgttaaatgaattaggttatagcggttattttatgtcaccgcattggtgttccgattttagtaatatggaatagtgttagataaatgcggtaacgaatgttcctgtaaggaaccataacagcttagatttaacgttaaagatgagcataaacataataaacaaaattacaatcaaacttataacattaatatcaaacaatccaaaaaatgaaatcagtggagtagtaaacgcgtacataactcctggataacgtttagcagctgccgttcctattctagaccaaaaatttggtttcatgttttcgaaacggtattctgcaacaagtcggggatcgtgttctacatatttggcggcattatccagtatctgcctattgatcttcatttcgttttcgattctggctatttcaaaataaaatcccgatgatagacctccagactttataatttcatctacgatgttcagcgccgtagtaactctaataatataggctgataagctaacatcataccctcctgtatatgtgaatatggcatgatttttgtccattacaagctcggttttaactttattgcctgtaataatttctctcatctgtaggatatctatttttttgtcatgcattgccttcaagacgggacgaagaaacgtaatatcctcaataacgttatcgttttctacaataactacatattctacctttttattttctaactcggtaaaaaaattagaatcccatagggctaaatgtctagcgatatttcttttcgtttcctctgtacacatagtgttacaaaaccctgaaaagaagtgagtatacttgtcatcatttctaatgtttcctccagtccactgtataaacgcataatccttgtaatgatctggatcatccttgactaccacaacatttcttttttctggcataacttcgttgtcctttacatcatcgaacttctgatcattaatatgctcatgaacattaggaaatgtttctgatggaggtctatcaataactggcacaacaataacaggagttttcaccgccgccatttagttattgaaattaatcatatacaactctttaatacgagttatattttcgtctatccattgtttcacatttacatatttcgacaaaaagatataaaatgcgtattccaatgcttctctgtttaatgaattactaaaatatacaaacacgtcactgtctggcaataaatgatatcttagaatattgtaacaatttattttgtattgcacatgttcgtgatctatgagttcttcttcgaatggcataggatctccgaatctgaaaacgtataaataggagttagaataataatatttgagagtattggtaatatataaactctttagcggtataattagtttttttctctcaatttctatttttagatgtgatggaaaaatgactaattttgtagcattagtatcatgaactctaatcaaaatcttaatatcttcgtcacacgttagctctttgaagtttttaagagatgcatcagttggttctacagatggagtaggtgcaacaattttttgttctacacatgtatgtactggagccattgttttaactataatggtgcttgtatcgaaaaactttaatgcagatagcggaagctcttcgccgcgactttctacgtcgtaattgggttctaacgccgatctctgaatggatactagttttctaagttctaatgtgattctctgaaaatgtaaatccaattcctccggcattatagatgtgtatacatcggtaaataaaactatagtatccaacgatcccttctcgcaaattctagtcttaaccaaaaaatcgtatataaccacggagatggcgtatttaagagtggattcttctaccgttttgttcttggatgtcatataggaaactataaagtccgcactactgttaagaatgattactaacgcaactatatagttcaaattaagcattttggaaacataaaataactctgtagacgatacttgactttcgaataagtttgcagacaaacgaagaaagaacagacctctcttaatttcagaagaaaactttttttcgtattcctgacgtctagagtttatatcaataagaaagttaagaattagtcggttaatgttgtatttcattacccaagtttgagatttcataatattatcaaaagacatgataatattaaagataaagcgctgactatgaacgaaatagctatatggttcgctcaagaatatagtcttgttaaacgtggaaacgataactgtatttttaatcacgtcagcggcatctaaattaaatataggtatatttattccacacactctacaatatgccacaccatcttcataataaataaattcgttagcaaaattattaattttagtgaaatagttagcgtcaactttcatagcttccttcaatctaatttgatgctcacacggtgcgaattccactctaacatcccttttccatgcctcaggttcatcgatctctataatatctagttttttgcgtttcacaaacacaggctcgtctctcgcgatgagatctgtatagtaactatgtaaatgataactagatagaaagatgtagctatatagatgacgatcctttaagagaggtataataactttaccccaatcagatagactgttgttatggtcttcggaaaaagaatttttataaatttttccagtattttccaaatatacgtacttaacatctaaaaaatccttaatgataataggaatggataatccgtctattttataaagaaatacatatcgcacattatacttttttttggaaatgggaataccgatgtgtctacataaatatgcaaagtctaaatattttttagagaatcttagttggtccaaattcttttccaagtacggtaatagatttttcatattgaacggtatcttcttaatctctggttctagttccgcattaaatgatgaaactaagtcactatttttataactaacgattacatcacctctaacatcatcatttaccagaatactgatcttcttttgtcgtaaatacatgtctaatgtgttaaaaaaaagatcatacaagttatacgtcatttcatctgtggtattcttgtcattgaaggataaactcgtactaatctcttctttaacagcctgttcaaatttatatcctatatacgaaaaaatagcaaccagtgtttgatcatccgcgtcaatattctgttctatcgtagtgtataacaatcgtatatcttcttctgtgatagtcgatacgttataaaggttgataacgaaaatatttttatttcgtgaaataaagtcatcgtaggattttggacttatattcgcgtctagtagatatgcttttatttttggaatgatctcaattagaatagtctctttagagtccatttaaagttacaaacaactaggaaattggtttatgatgtataatttttttagtttttatagattctttattctatacttaaaaaatgaaaataaatacaaaggttcttgagggttgtgttaaattgaaagcgagaaataatcataaattatttcattatcgcgatatccgttaagtttgtatcgtaatggcgtggtcaattacgaataaagcggatactagtagcttcacaaagatggctgaaatcagagctcatctaaaaaatagcgctgaaaataaagataaaaacgaggatattttcccggaagatgtaataattccatctactaagcccaaaaccaaacgagccactactcctcgtaaaccagcggctactaaaagatcaaccaaaaaggaggaagtggaagaagaagtagttatagaggaatatcatcaaacaactgaaaaaaattctccatctcctggagtcagcgacattgtagaaagcgtggccgctgtagagctcgatgatagcgacggggatgatgaacctatggtacaagttgaagctggtaaagtaaatcatagtgctagaagcgatctctctgacctaaaggtggctaccgacaatatcgttaaagatcttaagaaaattattactagaatctctgcagtatcgacggttctagaggatgttcaagcagctggtatctctagacaatttacttctatgactaaagctattacaacactatctgatctagtcaccgagggaaaatctaaagttgttcgtaaaaaagttaaaacttgtaagaagtaaatgcgtgcacttttttataaagatggtaaactctttaccgataataattttttaaatcctgtatcagacgataatccagcgtatgaggttttgcaacatgttaaaattcctactcatttaacagatgtagtagtatatgaacaaacgtgggaggaggcgttaactagattaatttttgtgggaagcgattcaaaaggacgtagacaatacttttacggaaaaatgcatgtacagaatcgcaacgctaaaagagatcgtatttttgttagagtatataacgttatgaaacgaattaattgttttataaacaaaaatataaagaaatcgtccacagattccaattatcagttggcggtttttatgttaatggaaactatgttttttattagatttggtaaaatgaaatatcttaaggagaatgaaacagtagggttattaacactaaaaaataaacacatagaaataagtcccgatgaaatagttatcaagtttgtaggaaaggacaaagtttcacatgaatttgttgttcataagtctaatagactatataaaccgctattgaaactgacggatgattctagtcccgaagaatttctgttcaacaaactaagtgaacgaaaggtatatgaatgtatcaaacagtttggtattagaatcaaggatctccgaacgtatggagtcaattatacgtttttatataatttttggacaaatgtaaagtccatatctcctcttccatcaccaaaaaagttaatagcattaactatcaaacaaactgctgaagtggtaggtcatactccatcaatttcaaaaagagcttatatggcaacgactattttagaaatggtaaaggataaaaattttttagatgtagtatctaaaactacgttcgatgaattcctatctatagtcgtagatcacgttaaatcatctacggatggatgatatagatctttacacaaataattacaagaccgataaatggaaatggataagcgtatgaaatctctcgcaatgacagctttcttcggagagctaagcacattagatattatggcattgataatgtctatatttaaacgccatccaaacaataccattttttcagtggataaggatggtcagtttatgattgatttcgaatacgataattataaggcttctcaatatttggatctgaccctcactccgatatctggagatgaatgcaagactcacgcatcgagtatagccgaacaattggcgtgtgtggatattattaaagaggatattagcgaatatatcaaaactactccccgtcttaaacgatttataaaaaaataccgcaatagatcagatactcgcatcagtcgagatacagaaaagcttaaaatagctctagctaaaggcatagattacgaatatataaaagacgcttgttaataagtaaatgaaaaaaaactagtcgtttataataaaacacgatatggatgccaacgtagtatcatcttctactattgcgacgtatatagacgctttagcgaagaatgcttcagaattagaacagaggtctaccgcatacgaaataaataatgaattggaactagtatttattaagccgccattgattactttgacaaatgtagtgaatatctctacgattcaggaatcgtttattcgatttaccgttactaataaggaaggtgttaaaattagaactaagattccattatctaaggtacatggtctagatgtaaaaaatgtacagttagtagatgctatagataacatagtttgggaaaagaaatcattagtgacggaaaatcgtcttcacaaagaatgcttgttgagactatcgacagaggaacgtcatatatttttggattacaagaaatatggatcctctatccgactagaattagtcaatcttattcaagcaaaaacaaaaaactttacgatagactttaagctaaaatattttctaggatccggtgcccaatctaaaagttctttgttgcacgctattaatcatccaaagtcaaggcctaatacatctctggaaatagaattcacacctagagacaatgaaacagttccatatgatgaactaataaaggaattgacgactctctcgcgtcatatatttatggcttctccagagaatgtaattctttctccgcctattaacgcgcctataaaaacctttatgttgcctaaacaagatatagtaggtttggatctggaaaatctatatgccgtaactaagactgacggcattcctataactatcagagttacatcaaacgggttgtattgttattttacacatcttggttatattattagatatcctgttaagagaataatagattccgaagtagtagtctttggtgaggcagttaaggataagaactggaccgtatatctcattaagctaatagagcctgtgaatgcaatcaatgatagactagaagaaagtaagtatgttgaatctaaactagtggatatttgtgatcggatagtattcaagtcaaagaaatacgaaggtccgtttactacaactagtgaagtcgtcgatatgttatctacatatttaccaaagcaaccagaaggtgttattctgttctattcaaagggacctaaatctaacattgattttaaaattaaaaaggaaaatactatagaccaaactgcaaatgtagtatttaggtacatgtccagtgaaccaattatctttggagaatcgtctatctttgtagagtataagaaatttagcaacgataaaggctttcctaaagaatatggttctggtaagattgtgttatataacggcgttaattatctaaataatatctattgtttggaatatattaatacacataatgaagtgggtattaagtccgtggttgtacctattaagtttatagcagaattcttagttaatggagaaatacttaaacctagaattgataaaaccatgaaatatattaactcagaagattattatggaaatcaacataatatcatagtcgaacatttaagagatcaaagcatcaaaataggagatatctttaacgaggataaactatcggatgtgggacatcaatacgccaataatgataaatttagattaaatccagaagttagttattttacgaataaacgaactagaggaccgttgggaattttatcaaactacgtcaagactcttcttatttctatgtattgttccaaaacatttttagacgattccaacaaacgaaaggtattggcgattgattttggaaacggtgctgacctggaaaaatacttttatggagagattgcgttattggtagcgacggatccggatgctgatgctatagctagaggaaatgaaagatacaacaaattaaactctggaattaaaaccaagtactacaaatttgactacattcaggaaactattcgatccgatacatttgtctctagtgtcagagaagtattctattttggaaagtttaatatcatcgactggcagtttgctatccattattcttttcatccgagacattatgctaccgtcatgaataacttatccgaactaactgcttctggaggcaaggtattaatcactaccatggacggagacaaattatcaaaattaacagataaaaagacttttataattcataagaatttacctagtagcgaaaactatatgtctgtagaaaaaatagctgatgatagaatagtggtatataatccatcaacaatgtctactccaatgactgaatacattatcaaaaagaacgatatagtcagagtgtttaacgaatacggatttgttcttgtagataacgttgatttcgctacaattatagaacgaagtaaaaagtttattaatggcgcatctacaatggaagatagaccgtctacaaaaaactttttcgaactaaatagaggagccattaaatgtgaaggtttagatgtcgaagacttacttagttactatgttgtttatgtcttttctaagcggtaaataataatatggtatgggttctgatatccccgttctaaatgcattaaataattccaatagagcgatttttgttcctataggaccttccaactgtggatactctgtattgttaatagatatattaatacttttgtcgggtaacagaggttctacgtcttctaaaaataaaagttttataacatctggcctgttcataaataaaaacttggcgattctatatatactcttattatcaaatctagccattgtcttatagatgtgagctactgtaggtgtaccatttgattttctttctaatactatatatttctctcgaagaagttcttgcacatcatctgggaataaaatactactgttgagtaaatcagttattttttttatatcgatattgatggacatttttatagttaaggataataagtatcccaaagtcgataacgacgataacgaagtatttatacttttaggaaatcacaatgactttatcagattaaaattaacaaaattaaaggagcatgtatttttttctgaatatattgtgactccagatacatatggatctttatgcgtcgaattaaatgggtctagttttcagcacggtggtagatatatagaggtggaggaatttatagatgctggaagacaagttagatggtgttctacatccaatcatatatctaaagatatacccgaagatatgcacactgataaatttgtcatttatgatatatacacttttgacgctttcaagaataaacgattggtattcgtacaggtacctccgtcgttaggagatgatagtcatttgactaatccgttattgtctccgtattatcgtaattcagtagccagacaaatggtcaataatatgatttttaatcaagattcatttttaaaatatttattagaacatctgattagaagccactatagagtttctaaacatataacaatagttagatacaaggataccgaagaattaaatctaacgagaatatgttataatagagataagtttaaggcgtttgtattcgcttggtttaacggcgtttcggaaaatgaaaaggtactagatacgtataaaaaggtatctaatttgatataatgaattcagtgactgtatcacacgcgccatatactattacttatcacgatgattgggaaccagtaatgagtcaattggtagagttttataacgaagtagccagttggctgctacgagacgagacgtcgcctattcctgataagttctttatacagttgaaacaaccgcttagaaataaacgagtatgtgtgtgcggtatagatccgtatccgaaagatggaactggtgtaccgttcgaatcaccaaattttacaaaaaaatcaattaaggagatagcttcatctatatctagattaaccggagtaattgattataaaggttataaccttaatataatagacggggttataccctggaattattacttaagttgtaaattaggagaaacaaaaagtcacgcgatctactgggataagatttccaagttactgctgcagcatataactaaacacgttagtgttctttattgtttgggtaaaacagatttctcgaatatacgggcaaagttagaatccccggtaactaccatagtcggatatcatccagcggctagagaccgccaattcgagaaagatagatcatttgaaattatcaacgttttactggaattagacaacaaggcacctataaattgggctcaagggtttatttattaatgctttagtgaaattttaacttgtgttctaaatggatgcggctattagaggtaatgatgttatctttgttcttaagactataggtgtcccgtcagcgtgcagacaaaatgaagatccaagatttgtagaagcatttaaatgcgacgagttagaaagatatattgagaataatccagaatgtacactattcgaaagtcttagggatgaggaagcatactctatagtcagaattttcatggatgtagatttagacgcgtgtctagacgaaatagattatttaacggctattcaagattttattatcgaggtgtcaaactgtgtagctagattcgcgtttacagaatgcggtgccattcatgaaaatgtaataaaatccatgagatctaatttttcattgactaagtctacaaatagagataaaacaagttttcatattatctttttagacacgtataccactatggatacattgatagctatgaaacgaacactattagaattaagtagatcatctgaaaatccactaaccagatcgatagacactgccgtatataggagaaaaacaactcttcgggttgtaggtactaggaaaaatccaaattgcgacactattcatgtaatgcaaccaccgcatgataatatagaagattacctattcacttacgtggatatgaacaacaatagttattacttttctctacaacaacgattggaggatttagttcctgataagttatgggaaccagggtttatttcattcgaagacgctataaaaagagtttcaaaaatattcattaattctataataaactttaatgatctcgatgaaaataattttacaacggtaccactggtcatagattacgtaacaccttgtgcattatgtaaaaaacgatcgcataaacatccgcatcaactatcgttggaaaatggtgctattagaatttacaaaactggtaatccacatagttgtaaagttaaaattgttccgttggatggtaataaactgtttaatattgcacaaagaattttagacactaactctgttttattaaccgaacgaggagaccatatagtttggattaataattcatggaaatttaacagcgaagaacccttgataacaaaactaattttgtcaataagacatcaactacctaaggaatattcaagcgaattactctgtccgaggaaacgaaagactgtagaagctaacatacgagacatgttagtagattcagtggagaccgatacctatccggataaacttccgtttaaaaatggtgtattggacctggtagacggaatgttttactctggagatgatgctaaaaaatatacgtgtactgtatcaaccggatttaaatttgacgatacaaagttcgtcgaagacagtccagaaatggaagagttaatgaatatcattaacgatatccaaccattaacggatgaaaataagaaaaatagagagctatatgaaaaaacattatctagttgtttatgcggtgctaccaaaggatgtttaacattcttttttggagaaactgcaactggaaagtcgacaaccaaacgtttgttaaagtctgctatcggtgacctgtttgttgagacgggtcaaacaattttaacagatgtattggataaaggacctaatccatttatcgctaacatgcatttgaaaagatctgtattctgtagcgaactacctgattttgcatgtagtgggtcaaagaaaatcagatctgataatattaaaaagttgacagaaccttgtgtcattggaagaccgtgtttctccaataaaattaataatagaaaccatgcgacaatcattatcgatactaattacaaacctgtttttgataggatagataacgcattaatgagaagaattgccgtcgtgcgattcagaacacacttttctcaaccttctggtagagaggctgctgaaaataatgacgcgtacgataaagtcaaactattagacgaggggttagatggtaaaatacaaaataatagatatagattcgcatttctatacttgttggtgaaatggtacagaaaatatcatgttcctattatgaaactatatcctacacccgaagagattcctgactttgcattctatctcaaaataggtactctgttagtatctagctctgtaaagcatattccattaatgacggacctctccaaaaagggatatatattgtacgataatgtggttactcttccgttgactactttccaacagaaaatatccaagtattttaattctagactatttggacacgatatagagagcttcatcaatagacataagaaatttgccaatgttagtgatgaatatctgcaatatatattcatagaggatatttcatctccgtaaatatatgctcatatatttatagaagatatcacatatctaaatgaataccggaatcatagatttatttgataatcatgttgatagtataccaactatattacctcatcagttagctactctagattatctagttagaactatcatagatgagaacagaagcgtgttattgttccatattatgggatcaggtaaaacaataatcgctttgttgttcgccttggtagcttccagatttaaaaaggtttacattctagtgccgaacatcaacatcttaaaaattttcaattataatatgggtgtagctatgaacttgtttaatgacgaattcatagctgagaatatctttattcattccacaacaagtttttattctcttaattataacgataacgtcattaattataacggattatctcgctacaataactctatttttatcgttgatgaggcacataatatctttgggaataatactggagaacttatgaccgtgataaaaaataaaaacaagattccttttttactattgtctggatctcccattactaacacacctaatactctgggtcatattatagatttaatgtccgaagagacgatagattttggtgaaattattagtcgtggtaagaaagtaattcagacacttcttaacgaacgcggtgtgaatgtacttaaggatttgcttaaaggaagaatatcatattacgaaatgcctgataaagatctaccaacgataagatatcacggacgtaagtttctagatactagagtagtatattgtcacatgtctaaacttcaagagagagattatatgattactagacgacagctatgttatcatgaaatgtttgataaaaatatgtataacgtgtcaatggcagtattgggacaacttaatctgatgaataatttagatactttatttcaggaacaggataaggaattgtacccaaatctgaaaataaataatggcgtgttatacggagaagaattggtaacgttaaacattagttccaaatttaaatactttattaatcggatacagacactcaacggaaaacattttatatacttttctaattctacatatggcggattggtaattaaatatatcatgctcagtaatggatattctgaatataatggttctcagggaactaatccacatatgataaacggcaaaccaaaaacatttgctatcgttactagtaaaatgaaatcgtctttagaggatctattagatgtgtataattctcctgaaaacgatgatggtagtcaattgatgtttttgttttcatcaaacattatgtccgaatcctatactctaaaagaggtaaggcatatttggtttatgactatcccagatactttttctcaatacaaccaaattcttggacgatctattagaaaattctcttacgccgatatttctgaaccagttaatgtatatcttttagccgccgtatattccgatttcaatgacgaagtgacgtcattaaacgattacacacaggatgaattaattaatgttttaccatttgacatcaaaaagctgttgtatctaaaatttaagacgaaagaaacgaatagaatatactctattcttcaagagatgtctgaaacgtattctcttccaccacatccatcaattgtaaaagttttattgggagaattggtcagacaatttttttataataattctcgtattaagtataacgataccaagttacttaaaatggttacatcagttataaaaaataaagaagacgctaggaattacatagatgatattgtaaacggtcacttctttgtatcgaataaagtatttgataaatctcttttatacaaatacgaaaacgatattattacagtaccgtttagactttcctacgaaccatttgtttggggagttaactttcgtaaagaatataacgtggtatcttctccataaaactgatgagatatataaagaaataaatgtcgagctttgttaccaatggatacctttccgttacattggaaccacacgagctgacgttagacataaaaactaatattaggaatgccgtatataagacgtatctccatagagaaattagtggtaaaatggccaagaaaatagaaattcgtgaagacgtggaattacctctcggcgaaatagttaataattctgtagttataaacgttccgtgtgtaataacctacgcgtattatcacgttggggatatagtcagaggaacattaaacatcgaagatgaatcaaatgtaactattcaatgtggagatttaatctgtaaactaagtagagattcgggtactgtatcatttagcgattcaaagtactgcttttttcgaaatggtaatgcgtatgacaatggcagcgaagtcactgccgttctaatggaggctcaacaaggtatcgaatctagttttgtttttctcgcgaatatcgtcgactcataaaaaagagaatagcggtaagtataaacacgaatactatggcaataattgcgaatgttttattctcttcgatatatttttgataatatgaaaaacatgtctctctcaaatcggacaaccatctcataaaatagttctcgcgcgctggagaggtagttgccgctcgtataatctctccagaataatatacttgcgtgtcgtcgttcaatttatacggatttctatagttctctgttatataatgcggtttgccctcatgattagacgacgacaatagtgttctaaatttagatagttgatcagaatgaatgtttattggcgttggaaaaattatccatacagcgtctgcagagtggttgatagttgttcctagatatgtaaaataatccaacttactaggcagcaaattgtctagataaaatactgaatcaaacggtgcagacgtattggcggatctaatggaatccaattgattaactatcttttgaaaatatacatttttatgatccaatacttgtaagaatatagaaataatgataagtccatcatcgtgtttttttgcctcttcataagaactatattttttcttattccaatgaacaagattaatctctccagagtatttgtacacatctatcaagtgattggatccataatcgtcttcctttccccaatatatatgtagtgatgataacacatattcattggggagaaaccctccacttatatatcctcctttaaaattaatccttactagttttccagtgttctggatagtggttggtttcgactcattataatgtatgtctaacggcttcaatcgcgcgttagaaattgcttttttagtttctatattaataggagatagttgttgcggcatagtaaaaatgaaatgataactgtttaaaaatagctcttagtatgggaattacaatggatgaggaagtgatatttgaaactcctagagaattaatatctattaaacgaataaaagatattccaagatcaaaagacacgcatgtgtttgctgcgtgtataacaagtgacggatatccgttaataggagctagaagaacttcattcgcgttccaggcgatattatctcaacaaaattcagattctatctttagagtatccactaaactattacggtttatgtactacaatgaactaagagaaatctttagacggttgagaaaaggttctatcaacaatatcgatcctcactttgaagagttaatattattgggtggtaaactagataaaaaggaatctattaaagattgtttaagaagagaattaaaagaggaaagtgatgaacgtataacagtaaaagaatttggaaatgtaattctaaaacttacaacacgggataaattatttaataaagtatatataagttattgcatggcgtgttttattaatcaatcgttggaggatttatcgcatactagtatttacaatgtagaaattagaaagattaaatcattaaatgattgtattaacgacgataaatacgaatatctgtcttatatttataatatgctagttaatagtaaatgaacttttacagatctagtataattagtcagattattaagtataatagacgactagctaagtctattatttgcgaggatgactctcaaattattacactcacggcattcgttaaccaatgcctatggtgtcataaacgagtatccgtgtccgctattttattaactactgataacaaaatattagtatgtaacagacgagatagttttctctattctgaaataattagaactagaaacatgtttagaaagaaacgattatttctgaattattccaattatttgaacaaacaggaaagaagtatactatcgtcatttttttctctagatccagctactactgataatgatagaatagatgctatttatccgggtggcatacccaaaaggggtgagaatgttccagagtgtttatccagggaaattaaagaagaagttaatatagacaattcttttgtattcatagacactcggttttttattcatggcatcatagaagataccattattaataaattttttgaggtaatcttctttgtcggaagaatatctctaacgagtgatcaaatcattgatacatttaaaagtaatcatgaaatcaaggatctaatatttttagatccgaattcaggtaatggactccaatacgaaattgcaaaatatgctctagatactgcaaaacttaaatgttacggccatagaggatgttattatgaatcattaaaaaaattaactgaggatgattgattagaaaatataaattaatttaccatcgtgtatttttataacgggattgtccggcatatcatgtagatagttaccgtctacatcgtatactcgaccatctacgcctttaaatcctctatttattgacattaatctattagaattggaataccaaatattagtaccctcaattagtttattggtaatattttttttagacgatagatcgatggctcttgaaaccaaggttttccaaccggactcattgtcgatcggtgagaagtctttttcattagcatgaatccattctaatgatgtatgtttaaacactctaaacaattggacaaattcttttgatttgctttgaatgatttcaaataggtcttcgtctacagtaggcataccattagataatctagccattataaagtgcacgtttacatatctacgttctggaggagtaagaacgtgactattgagacgaatggctcttcctactatctgacgaagagacgcctcgttccatgtcatatctaaaatgaagatatcattaattgagaaaaaactaataccctcgcctccactagaagagaatacgcatgttttaatgcattctccgttagtgtttgattcttggttaaactcagccaccgccttgattctagtatcttttgttctagatgagaactctatattagagataccaaagactttgaaatatagtaataagatttctattcctgactgattaacaaatggttcaaagactagacatttaccatgggatgctaatattcccaaacatacatctataaatttgacgcttttctcttttaattcagtaaatagagagatatcagccgcactagcatcccctttcaatagttctccctttttaaaggtatctaatgcggatttagaaaactctctatctcttaatgaatttttaaaatcattatatagtgttgctatctcttgcgcgtattcgcccggatcacgattttgtctttcaggaaagctatcgaacgtaaacgtagtagccatacgtctcagaattctaaatgatgatatacctgtttttatttcagcgagtttagccttttgataaatttcttcttgctttttcgacatattaacgtatcgcattaatactgttttcttagcgaatgatgcagacccttctacgtcatcaaaaatagaaaactcgttattaactatatacgaacatagtcctcctagtttggagactaattctttttcatcgactagacgtttattctcaaatagtgattggtgttgtaaggatcctggtcgtagtaagttaaccaacatggtgaattcttgcacactattgacgataggtgtagccgataaacaaatcatcttatggttttttaacgcaatggtcttagataaaaaattatatactgaacgagtaggacggatcttaccatcttctttgattaatgatttagaaatgaagttatgacattcatcaatgatgacgcatattctactcttggaattaatagttttgatattagtaaaaaatttatttctaaaattttgatcatcgtaattaataaaaatacaatccttcgttatctctggagcgtatctgagtatagtgttcatccaaggatcttctatcaaagcctttttcaccaataagataatagcccaattcgtataaatatccttaagatgtttgagaatatatacagtagtcattgttttaccgacacccgtttcatggaacaataaaagagaatgcatactgtctaatcctaagaaaactcttgctacaaaatgttgataatccttgaggcgtactacgtccgaccccatcatttcaacgggcatattagtagttctgcgtaaggcataatcgatataggccgcgtgtgatttactcatttatgagtgataagtaataactatgttttaaaaatcacagcagtagtttaactagtcttctctgatgtttgttttcgatactttttgaatcagaagtcatactagaataaagcaacgagtgaacgtaatagagagcttcgtatactctattcgaaaactctaagaacttattaatgaattccgtatccactggattgtttaaaatactaaattgaacactgttcacatccttccaagaagaagacttagtgacggacttaacatgagacataaataaatccaaattttttttacaaacatcactagccaccataatggcgctatctttcaaccagctatcgcttacgcattttagcagtctaacatttttaaagagactacaatatattctcatagtatcgattacacctctaccgaataaagttggaagtttaataatacaatatttttcgtttacaaaatcaaataatggtcgaaacacgtcgaaggttaacatcttataatcgctaatgtatagattgttttcagtgagatgattattagatttaatagcatctcgttcacgtttgaacagtttattgcgtgcgctgaggtcggcaactacggcgtccgctttagtactcctcccataatactttacgctattaatctttaaaatttcatagactttatctagatcgctttctggtaacatgatatcatgtgtaaaaagttttaacatgtcggtcggcattctatttagatcattaactctagaaatctgaagaaagtaattagctccgtattccagactaggtaatgggcttttacctagagacagattaagttctggcaatgtttcataaaatggaagaaggacatgcgttccctcccggatattttttacaatttcatccatttacaactctatagtttgttttcattattattagttattatctcccataatcttggtaatacttaccccttgatcgtaagataccttatacaggtcattacatacaactaccaattgtttttgtacataatagattggatggttgacatccatggtggaataaactactcgaacagatagtttatctttccccctagatacattagccgtaatagttgtcggcctaaagaatatctttggtgtaaagttaaaagttagggttcttgttccattattgctttttgtcagtagttcattataaattctcgagatgggtccgttctctgaatatagaacatcatttccaaatctaacttctagtctagaaataatatcggtcttattcttaaaatctattcccttgatgaagggatcgttaatgaacaaatccttggcctttgattcggctgatctattatctccgttatagacgttacgttgactagtccaaagacttacaggaatagatgtatcgatgatgttgatactatgtgatatgtgagcaaagattgttctcttagtggcatcactatatgttccagtaatggcggaaaactttttagaaatgttatatataaaagaattttttcgtgttccaaacattagcagattagtatgaagataaacactcatattatcaggaacattatcaatttttacatacacatcagcatcttgaatagaaacgataccatcttctggaacctctacgatctcggcagactccggataaccagtcggtgggccatcgctaacaataactagatcatccaacaatctactcacatatgcatctatataatctttttcatcttgtgagtaccctggatacgaaataaatttattatccgtatttccataataaggtttagtataaacagagagagatgttgccgcatgaacttcagttacagtcgccgttggttggtttatttgacctattactctcctaggtttctctataaacgatggtttaatttgtacattcttaaccatatatccaataaagctcaattcaggaacataaacaaattctttgttgaacgtttcaaagtcgaacgaagagtcacgaataacgatatcggatactggattgaaggttaccgttacggtaatttttgaatcggatagtttaagactgctgaatgtatcttccacatcaaacggagttttaatataaacgtatactgtagatggttctttaatagtgtcattaggagttaggccaatagaaatatcattaagttcactagaatatccagagtgtttcaaagcaattgtattattgatacaattattatataattcttcgccctcaatttcccaaataacaccgttacacgaagagatagatacgtgattaatacatttatatccaacatatggtacgtaactgaatcttcccatacctttaacttctggaagttccaaactcagaaccaaatgattaagcgcagtaatatactgatccctaatttcgaagctagcgatagcctgattgtctggaccatcgtttgtcataactccggatagagaaatatattgcggcatatataaagttggaatttgactatcgactgcgaagacattagaccgtttaatagagtcatccccaccgatcaaagaattaatgatagtattattcattttctatttaaaatggaaaaagcttacaataaactccgtagagaaatatctataatttgtgagttttccttaaagtaacagcttccgtaaacgccgtctttatctcttagtaggtttattgtatttatgaccttttccttatcttcatagaatactaaaggcaacaaagaaatttttggttcttctctaagagctacgtgagacttaaccatagaagccaacgaatccctacatattttagaacagaaataccctacttcaccacccttgtatgtctcaatactaataggtctaaaaaccaaatcttgattacaaaaccaacacttatcaattacactatttgtcttaatagacacatctgccatagatttataatactttggtagtatacaagcgagtgcttcttctttagcgggcttaaagactgctttaggtgctgaaataaccacatctggaaggcttactcgcttagccatttaattacggaactatttttttatacttctaatgagcaagtagaaaacctctcatctacaaaaacgtactcgtgtccataatcctctaccatagttacacgttttttagatctcatatgtgctaaaaagttttcccatactaattggttactattatttttcgtataatttttaacagtttgaggttttagatttttagttacagaagtgatatcgaatattttatccaaaaagaatgaataattaattgtcttagaaggagtgttttcttggcaaaagaataccaagtgcttaaatatttctactacttcattaatcttttctgtactcagattcagtttctcatcttttacttgattgattatttcaaagactaacttataatcctttttatttattctctcgttagccttaagaaaactagatacaaaatttgcatctacatcatccgtggatatttgatttttttccatgatatccaagagttccgagataatttctccagaacattgatgagacaataatctccgcaatacatttctcaaatgaataagtttattagacacgtggaagtttgactttttttgtacctttgtacatttttgaaataccgactcgcaaaaaatacaatattcatatccttgttcagatactataccgttatgtctacaaccgctacataatcgtagattcatgttaacactctacgtatctcgtcgtccaatattttatataaaaacattttatttctagacgttgccagaaaatcctgtaatatttttagttttttgggctgtgaataaagtatcgccctaatattgttaccgtcttccgccaatatagtagttaaattatccgcacatgcagaagaacaccgcttaggcggattcagtacaatgttatatttttcgtaccaactcatttaaatatcataatctaaaatagttctgtaatatgtctagcgctaatatattgatcataatcctgtgcataaattaagatacaacaatgtctcgaaatcatcgacatggcttcttccatagttagaagatcgtcgtcaaagttagcaacgtgattcatcaacatttgctgttttgaggcagcaaatactgaaccgtcgccattcaaccattcataaaaaccatcgtctgaatccattgataatttcttgtactggtttttgagagctcgcatcaatctagcatttctagctcccggattgaaaacagaaagaggatcgtacatccagggtccattttctgtaaatagaatcgtataatgtcccttcaagaagatatcagacgatccacaatcaaagaattggtctccgagtttgtaacaaactgcggactttaacctatacatgataccgtttagcataatttctggtgatacgtcaatcggagtatcatctattagagatctaaagccggtgtaacattctccaccaaacatattcttattctgacgtcgttctacataaaacatcattgctccattaacgataacaggggaatgaacagcactacccatcacattagttcccaatggatcaatgtgtgtaactccagaacatcttccatagcctatgttaggaggagcgaacaccactcttccactattgccatcgaatgccatagaataaatatccttggaattgatagaaatcggactgtcggatgttgtgatcatcttcataggattaacaactatgtatggtgccgcctgaagtttcatatcgtaactgatgccgtttataggtctagccacagaaaccaacgtaggtctaaatccaactatagacaaaatagaagccaatatctgttcctcatctgtcataacttgagagcatccagtatgaataatcttcattagatggggatctaccgcatcatcatcgttacaataaaaaattcccattctaatgttcataattgcttttctaatcatggtatgcatgtttgctctctgaatctctgtggaaattagatctgatacacctgtaatcactatcggattatcctccgtaagacgattaaccaacaacatataattataagactttacttttctaaattcataaagttgctggattaggctataggtgtctccatgtacatacgcgttctcgagcgcaggaagtttaataccgaatagtgccatcagaataggatgaatatagtaattagtttctggttttctataaataaaagacaaatcttgtgaactagacatatcggtaaaatgcatggattggaatcgtgtagtcgacagaagaatatgatgattagatggagagtatattttatctaactctttgagttggtcaccgattctaggactagctcgagaatgaataagtactaaaggatgagtacatttcacagaaacactagcattgttcaatgtgctctttacatgggtaaggagttgaaatagctcgtttctatttgttctgacaatatttagtttattcataatgttaagcatatcctgaatagtaaagttagatgtgtcatacttgttagtagttagatatttagcaattgcattcccatcatttctcaatctcgtactccaatcatgcgtggatgctacttcgtcgatggaaaccatacaatcctttttgataggctgttgagattgattatttcctgcacgtttaggtttggtacgttgatttctagcccctgcggatataaagtcatcgtctacaatttgggacaatgaattgcatacactacaagacaaagatttatcagaagtgtgaatatgatcttcatctaccaaagaaagagtttgattagtataactagattttagtcctgcgttagatgttaaaaaaacatcgctattgaccacggcttccattatttatattcgtagtttttactcgaaagcgtgattttaatatccaatcttattacttttggaatcgttcaaaacctttgactaattgtagaatttgatctattgccctacgcgtatactcccttgcatcatatacgttcgtcaccagatcgtttgtttcggcctgaagttggtgcatatctctttcaacattcgacatgagatccttaagggccatatcgtctagattttgttgagatgctgctcctggatttggattttgttgtgctgttgtacatactgtaccaccagtaggtgtaggagtacatacagtggccacaataggaggttgaggaggtgtaaccgttggagtagtacaagaaatatttccatccgattgttgtgtacatgtagttgttggtaacgtctgagaaggttgggtagatggcggtgtcgtcgtcttttgatctttattaaatttagagataatatcctgaacagcattgctcggcgtcaacgctggaaggagtgaactcgccggcgcatcagtatctgcagacagccaatcaaaaagattagacatatcagatgatgtattagtttgttgtcgtggttttggtgtaggagcagtactactaggtagaagaataggagccggtgtagctgttggaaccggctgtggagttatatgaatagttggttgtagcggttggataggctgtctgctggcggccatcatattatctctagctagttgttctcgcaactgtctttgataatacgactcttgagactttagtcctatttcaatcgcttcatcctttttcgtatccggatccttttcttcagaataatagattgacgactttggtgtagaggattctgccagcctctgtgagaacttgttaaagaagtccatttaaggctttaaaattgaattgcgattataagattaaatggcagacacagacgatattatcgactatgaatccgatgatctcaccgaatacgaggatgatgaagaagaggaagaagatggagagtcactagaaactagtgatatagatcccaaatcttcttataagattgtagaatcagcatccactcatatagaagatgcgcattccaatcttaaacatatagggaatcatatatctgctcttaaacgacgctatactagacgtataagtctatttgaaatagcgggtataatagcagaaagctataacttgcttcaacgaggaagattacctctagtttcagaattttctgacgaaacgatgaagcaaaatatgctacatgtaattatacaagagatagaggagggttcttgtcctatagtcatcgaaaagaacggagaattgttgtcggtaaacgattttgacaaagatggtctaaaattccatctagactatattatcaaaatttggaaacttcaaaaacgatattagaatttatacgaatatcgttctctaaatgtcacaatcaagtctcgcatgttcagcaatttattgtcgtactttatatcgtgttcattaacgatattttgcaaaatagtaatgattctatcttccttcgatagatattcttcagagattattgtcttatattctttcttgttatccgatatgaatttgataagactttgaacattattgatacccgtctgtttaattttttctacagatattttagttttggcagattctatcgtatctgtcaatagacatccaacatcgacattcgacgtcaattgtctataaatcaacgtataaattttagaaataacattagcgaattgttgtgcattgatgtcgttattctgaaacagtatgattttaggtagcattttcttaacaaagagaacgtatttattgttactcagttgaacagatgatatatccagattactaacgcatctgattccgtataccaaactttcagaagaaatggtatacaattgtttgtattcattcaatgtctctttttcagaaattagtttagagtcgaatactgcaataattttcaagagatagttttcatcagataagattttatttagtgtagatatgataaaactattgttttgttggagaacttgatacgccgcgttctctgtagtcgacgctctcaaatgggaaacaatctccattatttttttggaatcggatactatatcttcggtatcttgacgcagtctagtatacatagagttaagagagattagagtttgtacattaagcaacatgtctctaaatgtggctacaaacttttcctttttcacatcatctagtttattatataccgatttcacaacggcaccagatttaaggaaccagaatgaaaaactctgataactacaatatttcatcatagttacgattttatcatcttctatagttggtgtaatagcgcatacctttttctccaagactggaaccaacgtcataaaaatgtttaaatcaaaatccatatcaacatctgatgcgctaagaccagtctcgcgttcaagattatctttactaatggtgacgaactcatcgtataaaactctaagtttgtccattatttatttacagatttagttgtttaatttatttgtgctcttccagagttgggatagtatttttctaacgtcggtattatattattaggatctacgttcatatgtatcataatattaatcatccacgttttgataaatctatctttagcttctgaaataacgtatttaaacaaaggagaaaaatatttagctacggcatcagacgcaataacattttttgtaaatgtaacgtatttagacgacagatcttcgttaaaaagttttccatctatgtagaatccatcggttgttaacaccattcccgcgtcagattgaataggagtttgaatagtttgttttggaaatagatccttcaataacttatagttgggtgggaaaaaatcgattttatcactagactctttcttttttactatcattacctcatgaactatttcttgaatgagtatatgtattttctttcctatatcggacgcgttcattggaaaatataccatgtcgttaactataagaatatttttatcctcgtttacaaactgaataatatcagatgtagttcgtaaacgaactatatcatcaccagcacaacatctaactatatgatatccactagtttcctttagccgtttattatcttgttccatattagcagtcattccatcatttaagaaggcgtcaaagataatagggagaaatgacattttggattctgttacgactttaccaaaattaaggatatacggacttactatctttttctcaacgtcaatttgatgaacacacgatgaaaatgtgcttctatgagattgatcatgtagaaaacaacaagggatacaatatttccgcatatcatgaaatatattaagaaatcccaccttattatatttccccaaaggatccatgcacgtaaacattatgccgttatcattaataaagacttctttctcatcggatctgtaaaagttgttactgatttttttcattccaggatctagataattaataatgatgggttttctattcttattctttgtattttggcatatcctagaccagtaaacagtttccactttggtaaaatcagcagacttttgaacgctattaaacatggcattaatggcaataactaaaaatgtaaaatatttttctatgttaggaatatggtttttcactttaatagatatatggtttttggccaaaatgatagatatttttttatccgaggatagtaaaatattattagtcgccgtctctataaaaatgaagctagtctcgatatccaattttattctagaattgataggagtcgccaaatgtaccttatacgttatatctcccttgatgcgttccatttgtgtatctatatcggacacaagatctgtaaatagttttacgttattaatcatcacggtatcgccgtcgctagataacgctaatgtaccatccaagtcccaaatggagagatttaactgttcatcgtttagaataaaatgattaccggtcatattaataaagtgttcatcgtatctagataacaacgacttataattaatgtccaagtcttgaactcgctgaatgatcttttttaacccagttagttttagattggtacgaaatatattgttaaactttgattctacagtaatgtccaaatctagttgtggaaatacttccatcaacattgtttcaaacttgataatattattatctacatcttcgtacgatccaaattccggaatagatgtatcgcacgctctggccacccagataaccaaaaagtcacacgctccaggatatacattgtataaaaagctatcgttttttagtagggtttttttctgcgtgtatacgaagggattaaaaatagtattatcaacgtaactatattccaaattattcttatgagaatagataataatatcgtccttaatatctaacaaatttcctaaatatccctttaattgagtcattcgaagcgtcaatagaatatgtctcttaactatttccggctgttgtatatttaaatgacttcgtaaaaaataatatatgggcgacttctcatctatgtaatcatatggagtgagatatagggctcgttctacctcctgccccttacccacctgtaataccaattgcggacttactatatatcgcatatttatatcgtggggtaaagtgaaaatctactaccgatgatgtaagtcttacaatgttcgaaccagtaccagatcttaatttggaggcctccgtagaactaggggaggtaaatatagatcaaacaacacctatgataaaggagaatagcggttttatatcccgcagtagacgtctattcgcccatagatctaaggatgatgagagaaaactagcactacgattctttttacaaagactttattttttagatcatagagagattcattatttgttcagatgcgttgacgctgtaaaagacgtcactattaccaaaaaaaataacattatcgtggcgccttatatagcacttttaactatcgcatcaaaaggatgcaaacttacagaaacaatgattgaagcattctttccagaactatataatgaacatagtaagaaatttaaattcaactctcaagtatccatcatccaagaaaaactcggataccagtttggaaactatcacgtttatgattttgaaccgtattactctacagtagctctggctattcgagatgaacattcatctggcatttttaatatccgtcaagagagttatctggtaagttcattatctgaaataacatatagattttatctaattaatctaaaatctgatcttgttcaatggagtgctagtacgggcgctgtaattaatcaaatggtaaatactgtattgattacagtgtatgaaaagttacaactggtcatagaaaatgattcacaatttacatgttcattggctgtggaatcaaaacttccaataaaattacttaaagatagaaatgaattatttacaaaattcattaacgagttaaaaaagaccagttcattcaagataagcaaacgcgataaggatacgctactaaaatattttacttaggactggagttagaatttatagacgactcatttcgtttatcattgttactattattactattactatcattattagtgttggcattattagtattcttcttgtcatcttgttcagaaatatacagcaatgctatacctaatactaaatacattatcatgctcgcaatggctctaacaacaacgaaccaaaatgaatttggtcgtagcttttgttcacaaaaatacataaagaaatgtctacataaatctatggcgccattggctacttgaaatagcgccagtcctcctacagattttaatatagctgtataacatgacatttattcatcatcaaaagagacagagtcaccatctgtcatatttagattttttttcatgtgttcaaagtatcctctactcatttcattataatagtttatcatacttagaattttaggacggatcaatgagtaagacttgactagatcgtcagtagtaatttgtgcatcgtctattctgcatccgcttcgtcgaataatgtatagcatcgctttgagattctccatagctatcaagtctttatacaatgacatggaaatatctgtgaatactttatacttctccaacatcgatgccttaacatcatcgcctactttagcattgaaaatacgttctattgtgtagatggatgtagcaagatttttaaacaacaatgccatcttacacgatgattgcctcaagtctccaatcgtttgtttagaacgattagctacagagtccaatgcttggctgactagcatattattatctttagaaattgtattcttcaatgaggcgtttatcatatctgtgatttcgttagtcatattacagtctgactgggttgtaatgttatccaacatatcacctatggatacggtacacgtaccagcatttgtaataatcctatctaagatgttgtatggcattgcgcagaaaatatcttctcctgtaatatctccactctcgataaatctactcagattattcttaaatgccttattctctggagaaaagatatcagtgtccatcatttcattaatagtatacgcagaaaagataccacgagtatcaattctatccaagatacttatcggttccgagtcacagataatggtttcctctccttcgggagatcctgcatagaaatatctaggacaatagtttctatactgtctgtaactctgataatctctaaagtcactaactgataccatgaaattgagaagatcaaacgctgaagtaattaatttttctgcctcgtttttactacaactagttttcatcaatgtagtgacgatgtattgtttagttacttttggtctaatactgatgatagagatattattgcttcccataatggatcttctagtagtcaccttaaagcccattgatgcgaatagcagatagataaagtcttggtatgactcctttctaatatagtacggactacctttgtcacccaactttatacccacataagccataacaacctctttaatagccgtttcatgaggtttatcagccatgagcctgagtagttggaagaatctcatgaatcccgtctcagaaagtcctatatgcatgatagatttatctttcctgggaaactctcgtatagtcatagatgaaatactctttaaagtttctgaaataagattagtaacagtcttacctccgactactctaggtaacaaacaaactctaataggtgttttctctgcggagataatatcagaaaggatagagcaataagtagtattattgtgattataaagaccgaatacataacaggtagaatttataaacatcatgtcctgaaggtttttagacttgtattcctcgtaatccataccgtcccaaaacatggatttggtaactttgatagccgtagatctttgttccttcgccaacaggttaaagaaattaataaagaatttgttgtttctatttatgtccacaaattgcacgtttggaagcgccacggttacattcactgcagcattttgaggatcgcgagtatgaagtacgatgttattgtttactggtatatctggaaagaaatctaccagtctaggaataagagattgatatcgcatagaaatagtaaagtttataatctcatcatcgaagagcattttgttaccattgtaataaatatccactctgtcatatgtataaatgaagtactgttcaaacatgatgagatgtttatatgttggcatagtagtgagatcgacgtttggtaatggcaatgtattaagattaactccataatgtctagcagcatctgcgatgttataagcgtcgtcaaagcggggtcgatcttgtattgttatatattgtctaacacctataagattatcaaaatcttgtctgcttaatacaccgttaacaatttttgccttgaattcttttattggtgcattaataacatccttatagaggatgttaaacaaataagtgttatcaaagttaagatctggatatttcttttctgctagaacatccattgagtcggagccatctggtttaatataaccaccgataaatctagctctgtattctgtatccgtcaatctaatattaagaaggtgttgagtgaaaggtggaagatcgtaaaagctgtgagtattaatgataggattagtttccgaactaatgttaattggggtattaataatatctatatttccagcgttaagtgtaacattaaacagttttaattcacgtgacgtggtatcaattaaataattaatgcccaatttggatatagcagcctgaagctcatcttgtttagttacggatcctaatgagttattaagcaatatatcgaacggatgaacgaaggttgttttaagttggtcacatactttgtaatctagacatagatgcggaagaacggtagaaactatacgaaataaatattcagagtcctctaattgatcaagagtaactattgacttaataggcatcatttatttagtattaaatgacgaccgtaccagtgacggatatacaaaacgatttaattacagagttttcagaagataattatccatctaacaaaaattatgaaataactcttcgtcaaatgtctattctaactcacgttaacaacgtggtagatagagaacataatgccgccgtagtgtcatctccagaggaaatatcctcacaacttaatgaagatctatttccagatgatgattcaccggccactattatcgaacgagtacaacctcatactactattattgacgatactccacctcctacgtttcgtagagagttattaatatcggaacaacgtcaacaacgagaaaaaagatttaatattacagtatcgaaaaatgctgaagcaataatggaatctagatctatgataacttctataccaacacaaacaccatccttgggagtagtttatgataaagataaaagaattcagatgttagaggatgaagtggttaatcttagaaatcaacgatctaatacaaaatcatctgataatttagataattttaccaaaatactatttggtaagactccgtacaaatcaacagaagttaataagcgtatagccatcgttaattatgcaaatttgaacgggtcccccttatcagtcgaggacttggatgtttgttcggaggatgaaatagatagaatctataaaacgattaaacaatatcacgaaagtagaaaacgaaaaattatcgtcactaacgtgattattattgtcataaacattatcgagcaggcattgctaaaactcggatttgaagaaatcaaaggactgagtaccgatatcacttcagaaattatcgatgtggagatcggagatgactgcgatgctgtagcatctaaactaggaatcggtaacagtccggttcttaatattgtattgtttatactcaagatattcgttaaacgaattaaaattatttaatttaatacattcccatatccagacaacaatcgtctggattaatctgttcctgtcgtctcataccggacgacatattaatctttttattagtgggcatctttttagatggtttctttttcccagcattaactgagtcgatacctagaagatcgtgattgatctctccgaccattccacgaacttctaattggccgtctctgacggtaccataaactattttaccagcattagtaacagcttggacaatctgaccatccatcgcattgtacgatgtagtagtaactgttgttctacgtctaggagcaccagaagtatttttggagcccttggatgttgatgtagaagaagacgaggattttgattttggtttacatgtaatacattttgaactctttgattttgtatcacatgcgccggcagtcacatctgtttgagaattaagattattgttgcctcctttgacggctgcatctccaccgatttgcgctagtagatttttaagctgtggtgtaatcttattaactgtttcgatataatcatcgtaactgcttctaacggctaaattttttttatccgccatttagaagctaaaaatatttttatttatgcagaagatttaactagattatacaatgaactaatatgatccttttccagattatttacaaacttggtattttttggttctggaggaggcgaatttaaattcggacttggattcggattttgtaagttcttgatcttattatacatcgagtataggatggcgacagtaactgctacacaaataccgatcaaaagaagaataccaatcatttattgacaataacttcactattgatcaagtatgcaatatatcatcttttcactaaataagtagtaataatgattcaacaatgtcgagatatatggacgataataatttagttcatggaaatatcgctatgattggtgtgaatgactccgctaactctgtggggtgcgcagtgctttccccacatagaataaattagcattccgactgtgataataataccaagtataaacgccataatactcaatactttccatgtacgagtgggactggtagacttactaaagtcaataaaggcgaagatacacgaaagaatcaaaagaatgattccagcgattagcacgccggaaaaataatttccaatcataagcatcatgtccatttaactaataaaaattttaaatcgccgaatgaacaaagtggaatataaaccatataaaaacaatagtttgtactgcaaaaataatatctatttttgttttcgaagatatggtaaaattaaatagtagtacacagcatgttataactaacagcagcaacggctcgtaattacttatcatttactagacgaaaaggtggtgggatattttcttgctcaaataatacgaatatatcacccatccattttatgcgatgtttatatactctaatctttaatagatctatagacgacgggtttaccaacaatatagattttatcgattcatctaatttaaacccttccttaaacgtgaatgatctattatctggcataacgatgaccctacctgatgaatcggacaatgtactgggccatgtagaataaattatcaacgaattatcgtctacgaacatttatatcatttgttttaattttaggacgcgaataaatggatataaaatagaaaataacagatattacaaccagtgttatggccgcgcccaaccaggtaggcagttttattttatcttttactacaggttctcctggatgtacgtcaccaacggcggacgtagttctagtacaattagacgtaagttccgcttgggaattttttaacgctaaagagttaacgttaatcgtgcacccaacgtatttacatctagttcgttgaacatcttgattataatataaccattttctatctctagattcgtcagtgcactcatgtaaccaacataccctaggtcctaaatatttatctccggaattagattttggataattcgcgcaccaacaatttctatttcctttatgatcgttacaaaagacgtataatgccgtatccccaaaagtaaaataatcaggacgaataattctaataaactcagaacaatatctcgcatccatatgtttggagcaaatatcggaataagtagacatagccggtttccgttttgcacgtaaccattctaaacaattggggtttccaggatcgtttctacaaaatccagtcatgaaatcgtcacaatgttctgtcttgtaattattattaaatatttttggacagtgtttggtatttgtcttagaacaacattttgccacgctatcactatcgcccaggagataatccttttttataaaatgacatcgttgcccggatgctatataatcagtagcgtgttttaaatccttaatatattcaggagttacctcgttctgataatagattaatgatccaggacgaaatttgaaagaactacatggttctccatgaattaatacatattgtttagcaaattcaggaactataaaactactacaatgatctatcgacataccatctatcaaacaaaacttgggtttaatttctcccggagatgtttcataatagtacgtataactttcttctgcaaacttaacagctctattatattcaggataattaaaacctaattccatatatttgtctcgtatatctgctattcctggtgctattttgattctattaagagtaacagctgcccccattcttaataatcgtcagtatttaaactgttaaatgttggtatatcaacatctaccttatttcccgcagtataaggtttgttgcaggtatactgttcaggaatggttacatttatacttcttctatagtcctgtctttcgatgttcatcacatatgcaaagaacagaataaacaaaataatgtaagaaataatattaaatatctgtgaattcgtaaatacattgattgccataataattacagcagctacaatacatacaatagacattcccacagtgttgccattacctccacgatacatttgagttactaagcaataggtaataactaagctagtaagaggcaatagaaaagatgagataaatatcatcaatatagagattagaggagggctatatagagccaagacgaacaaaatcaaaccgagtaacgttctaacatcattatttttgaagattcccaaataatcattcattcctccataatcgttttgcatcatacctccatctttaggcataaacgattgctgctgttcctctgtaaataaatctttatcaagcactccagcacccgcagagaagtcgtcaagcatattgtaatatcttaaataactcatttatatattaaaaaatgtcactattaaagatggagtataatctttatgccgaactaaaaaaaatgacttgtggtcaacccctaagtctttttaacgaagacggggatttcgtagaagttgaaccgggatcatcctttaagtttctgatacctaagggattttacgcctctccttccgtaaagacgagtctagtattcgagacattaacaacgaccgataataaaatcactagtatcaatccaacaaatgcgccaaagttatatcctcttcaacgcaaagtcgtatctgaagtagtttctaatatgaggaaaatgatcgaatcaaaacgtcctctatacattactcttcacttggcgtgtggatttggtaagactattaccacgtgttatcttatggctacacacggtagaaaaaccgtcatttgcgtacccaataaaatgttaatacatcaatggaagacacaggtagaggcagtcggattggaacataagatatccatagatggagtaagtagtctattaaaggaactaaagactcaaagtccggatgtattaatagtagtcagtagacatctgacaaacgatgccttttgtaaatatatcaataagcattatgatttgttcatcttggatgaatcacatacgtataatctgatgaacaatacagcagttacaagatttttagcgtattatcctccgatgatgtgttattttttaactgctacacctagaccatctaaccgaatttattgtaacagtattattaatattgccaagttatccaatctaaaaaaaactatctatgcagtagatagtttttttgagccatattccacagataatattagacatatggtaaaacgactagatggaccatctaataaatatcatatatataccgagaagttattatctgtagacgagcctagaaatcaacttattcttgataccctggtagaagaattcaagtcaggaactattaatcgcattttagttattactaaactacgtgaacatatggtattattctacaaacgattattagattttttcggaccagaggttgtatttataggagacgcccaaaatagacgtactccagatatggtcaaatcaatcaaggaactaaatagatttatattcgtatccaccttattttattccggtactggtttagatattcctagtttggattcgttgttcatttgctcggcagtaatcaacaatatgcaaatagagcaattactagggagggtatgtcgagaaacagaactattagataggacggtatatgtatttcctaacacatccatcaaagaaataaagtacatgataggaaatttcatgcaacgaattattagtctgtctgtagataaactaggatttaaacaaaaaagttatcggaaacatcaagaatccgatcccacttctgcatgtacaacatcatccagagaagaacgtgtattaaatagaatatttaactcgcaaaatcgttaagaagtttaagcgacgatccgcatgctgcgcaggccagtgtattacccctcatagtattaatataatccaatgatacttttgtgatgtcggaaatcttaaccaatttagactgacaggcagaacacgtcatgcaatcatcatcgtcatcgataactgtagtcttgggcttctttttgcgactcttcattccggaacgcacattggtgctatccatttaggtagtaaaaaataagtcagaatatgccctataacacgatcgtgcaaaacctggtatatcgtctctatctttatcacaatatagtgtatcgacatttttattattattgacctcgtttatcttggaacatggaatgggaacatttttgttatcaacggccatctttgccttaattccagatgttgtaaaattataactaaacagtctatcatcgacacaaatgaaattcttgtttagacgtttgtagtttacgtatgcggctcgttcgcgtctcattttttcagatattgcaggtactataatattaaaaataagaatgaaataacataggattaaaaataaagttatcatgacttctagcgctgatttaactaacttaaaagaattacttagtctgtacaaaagtttgagattttcagattctgcggctatagaaaagtataattctttggtagaatggggaacatctacttactggaaaataggcgtgcaaaaggtagctaatgtcgagacgtcaatatctgattattatgatgaggtaaaaaataaaccgtttaatattgatccgggctattacattttcttaccggtatattttgggagcgtctttatttattcgaagggtaaaaatatggtagaacttggatctggaaactcttttcaaataccagatgatatgcgaagtgcgtgtaacaaagtattagacagcgataacggaatagactttctgagatttgttttgttaaacaatagatggataatggaagatgctatatcaaaatatcagtctccagttaatatatttaaactagctagtgagtacggattaaacatacccaaatatttagaaattgaaatagaggaagacacattatttgacgacgagttatactctattatagaacgctctttcgatgataaatttccaaaaatatccatatcgtatattaagttgggagaacttagacggcaagttgtagactttttcaaattctcattcatgtatattgagtccatcaaggtagatcgtataggagataatatttttattcctagcgttataacaaaatcaggaaaaaagatattagtaaaagatgtagaccatttaatacgatccaaggttagagaacatacatttgtaaaagtaaaaaagaaaaacacattttccattttatacgactatgatggaaacggaacagaaactagaggagaagtaataaaacgaattatagacactataggacgagactattatgttaacggaaagtatttctctaaggttggtagtgcaggcttaaagcaattgactaataaattagatattaatgagtgcgcaactgtcgatgagttagttgatgagattaataaatccggaactgtaaaacgaaaaataaaaaaccaatcagcatttgatttaagcagagaatgtttgggatatccagaagcggattttataacgttagttaataacatgcggttcaaaatagaaaattgtaaggttgtaaatttcaatattgaaaatactaattgtttaaataacccgagtattgaaactatatatggaaactttaaccagttcgtctcaatctttaatgtcgtcaccgatgtcaaaaaaagattattcgagtgaaataatatgcgcctttgatataggtgcaaaaaatcctgccagaactgttttagaagtcaaggataactccgttagggtattggatatatcaaaattagactggagttctgattgggaaaggcgcatagctaaagatttgtcacaatatgaatacactacagttcttctagaacgtcagcctagaaggtcgccgtatgttaaatttatctattttattaaaggctttttatatcatacatcggctgccaaagttatttgcgtctcgcctgtcatgtctggtaattcatatagagatcgaaaaaagagatcggtcgaagcatttcttgattggatggacacattcggattgcgagactccgttccggatagacgcaaattagacgatgtagcggatagtttcaatttggctatgagatacgtattagataaatggaatactaattatacaccttataataggtgtaaatctagaaattacataaaaaaaatgtaataacgttagtaacgccattatggataatctatttacctttctacatgaaatagaagatagatatgccagaactatttttaactttcatctaataagttgcgatgaaataggagatatatatggtcttatgaaagaacgcatttccttagaggatatgtttgataatatagtgtataataaagatatacatcctgccattaagaaactagtgtattgcgacatccaacttactaaacacattattaatcagaatacgtatccggtatttaacgattcttcacaagtgaaatgttgtcattatttcgacataaactcagataatagcaatattagctctcgtacagtagagatatttgagagggaaaagtcatctcttgtatcatatattaaaactaccaataagaagagaaaggtcaattacggcgaaataaagaaaactgttcatggaggcactaatgcaaattacttttccggtaaaaagtctgacgagtatctgagtactacagttagatccaacattaatcaaccttggatcaaaaccatctctaagaggatgagagttgatatcattaatcactctatagtaacgcgtggaaaaagctctatattacaaactatagaaattatttttactaatagaacatgtgtgaaaatattcaaggattctactatgcacattattctatccaaggacaaggatgaaaaggggtgtatacacatgattgacaaattattctatgtctattataatttatttctgttgttcgaagatatcatccaaaacgagtactttaaagaagtagctaatgttgtaaaccacgtactcacggctacggcattagatgagaaattattcctaattaagaaaatggctgaacacgatgtttatggagttagcaatttcaaaatagggatgtttaacctgacatttattaagtcgttggatcataccgttttcccctctctgttagatgaggatagcaaaataaagttttttaaggggaaaaagctcaatattgtagcattacgatctctggaggattgtataaattacgtgactaaatccgagaatatgatagaaatgatgaaggaaagatcgactattttaaatagcatagatatagaaacggaatcggtagatcgtctaaaagaattgcttctaaaatgaaaaaaaacactgattcagaaatggatcaacgactcggatataagtttttggtgcctgatcctaaagccggagttttttatagaccgttacatttccaatatgtatcgtattctaattttatattgcatcgattgcatgaaatcttgaccgtcaagcggccactcttatcgtttaagaataatacagaacgaattatgatagaaattagcaatgttaaagtgactcctccagattactcacctataatcgcgagtattaaaggtaagagttatgacgcattagccacgttcactgtaaatatctttaaagaggtaatgaccaaagagggtatatccatcactaaaataagtagttatgagggaaaagattctcatttgataaaaattccgctactaataggatacgggaataaaaatccacttgatacagccaagtatcttgttcctaatgtcataggtggagtctttatcaataaacaatctgtcgaaaaagtaggaattaatctagtagaaaagattacaacatggccaaaatttagggttgttaagccaaactcattcactttctcgttttcctccgtatcccctcctaatgtattaccgacaagatatcgccattacaagatatctctggatatatcacaattggaagcgttgaatatatcatcgacaaagacatttataacggtcaatattgttttgctgtctcaatatttatctagagtgagtctagaattcattagacgtagtttatcatacgatatgcctccagaagttgtctatctagtaaacgcgataatagatagtgctaaacgaattactgaatctattactgactttaatattgatacatacattaatgacctggtggaagctgaacacattaaacaaaaatctcagttaacgattaacgagttcaaatatgaaatgctgcataactttttacctcatatgaactatacacccgatcaactaaagggattttatatgatatctttactaagaaagtttctctactgtatcttccacacttctagatatccagatagagattcgatggtttgtcatcgcatcctaacgtacggcaaatattttgagacgttggcacatgatgaattagagaattacataggcaacatccgaaacgatatcatgaacaatcacaagaacagaggcacttacgcggtaaacattcatgtactaacaactcccggacttaatcacgcgttttctagcttattgagtggaaagttcaaaaagtcagacggtagttatcgaacacatcctcactattcatggatgcagaatatttctattcctaggagtgttggattttatccggatcaagtaaagatttcaaagatgttttctgtcagaaaataccatccaagtcaatatctttacttttgttcatcagacgttccggaaagaggtcctcaggtaggtttagtatctcaattgtctgtcttgagttccattacaaatatactaacgtctgagtatttggatttggaaaagaaaatttgtgagtatatcagatcatattataaagatgatataagttactttgaaacaggatttccaatcactatagaaaatgctctagtcgcatctcttaatccaaatatgatatgtgattttgtaactgactttagacgtagaaaacggatgggattcttcggtaacttggaggtaggtattactttagttagggatcacatgaatgaaattcgcattaatattggagcgggaagattagtcagaccattcttggttgtggataacggagagctcatgatggatgtgtgtccggagttagaaagcagattagacgacatgacattctctgacattcagaaagagtttccgcatgtcatcgaaatggtagatatagaacaatttacttttagtaacgtatgtgaatcggttcaaaaatttagaatgatgtcaaaggatgaaagaaagcaatacgatttatgtgactttcctgccgaatttagagatggatatgtagcatcttcactagtgggaatcaatcacaattctggacccagagctattcttggatgtgctcaagctaaacaagctatctcttgtctgagttcggatatacgaaataaaatagacaatggaattcatttgatgtatccagagaggccaatcgtgattagtaaggctttagaaacttcaaagattgcggctaattgcttcggccaacatgttactatagcattaatgtcgtacaaaggtatcaatcaagaggatggaattatcatcaaaaaacaatttattcagagaggcggtctcgatatagttaccgcaaagaaacatcaagtagaaattccattggaaaactttaataacaaagaaagagataggtctaacgcctattcaaaattagaaagtaatggattagttagactgaatgctttcttggaatccggagacgctatggcacgaaatatctcatcaagaactcttgaagatgattttgctagagataatcagattagcttcgatgtttccgagaaatataccgatatgtacaaatctcgcgttgaacgagtacaagtagaacttactgacaaagttaaggtacgagtattaaccatgaaagaaagaagacccattctaggagacaaatttaccactagaacgagtcaaaagggaacagtcgcgtatgtcgcggatgaaacggaacttccatacgacgaaaatggtatcacaccagatgtcattattaattctacatccatcttctctagaaaaactatatctatgttgatagaagttattttaacagccgcatattctgctaagccgtacaacaataagggagaaaaccgacctgtctgttttcctagtagtaacgaaacatccatcgatacatatatgcaattcgctaaacaatgttatgagcattcaaatccgaaattgtccgatgaagaattatcggataaaatcttttgtgaaaagattctctatgatcctgaaacggataagccttatgcatccaaagtattttttggaccaatttattacttgcgtctgaggcatttaactcaggacaaggcaaccgttagatgtagaggtaaaaagacgaagctcattagacaggcgaatgagggacgaaaacgtggaggaggtatcaagttcggagaaatggagagagactgtttaatagcgcatggtgcagccaatactattacagaagttttgaaagattcggaagaagattatcaagatgtgtatgtttgtgaaaattgtggagacatagcagcacaaatcaagggtattaatacatgtcttagatgttcaaaacttaatctctctcctctcttaacaaaaattgataccacgcacgtatctaaagtatttcttactcaaatgaacgccagaggcgtaaaagtcaaattagatttcgaacgaaggcctccttcgttttataaaccattagataaagttgatctcaagccgtcttttctggtgtaatattctagtttggtagtagatacatatcaatatcatcaaattcgagatccgaattataaaatgggcgtggattgttaactatagaatcggacgtctgatattcgaaaatctgtggagtttcaggttttggtggaggtgtaactgctacttgggatactgaagtctgatattcagaaagctgtggatgttctggttcggcatccaccgatggtgtcacatcactaatcggttcggtaacgtctgtggatggaggtgctacttctacagaacctgtagcctcagttgtcaacggagatacatttttaatgcgagaaaatgtataatttggtaatggtttcttatgtggatctgaagaagaggtaagatatctactagaaagataccgatcacgttctagttctcttttgtagaacttaactttttctttctccgcatctagttgatattccaacctcttcacgttactacgttcagattccaattcacgttcgcatgggttacctccgcagtttttacgagcgatttcacgttcagccttcatgcgtctctccctctctctatcgagtttatcagagcagtctttctgaaggcgatcgaactccataaatttctccaacgctttgattgtttccatagatttccgaagttcagcttttaggactgtgattctttttctttcgaattcacagctggatgtacaaccgtttccattaccgccatctctaagtttcttttctagatcggcaacatttcatccccatgccttttacattcctcgagtctactgtcgtcgaaatatcgttccagctccttttcgacatcaataactttagcacgttgtctctcaagctctcttttgtagttatctgattccctggcacgtttaagatcttcatgcaattgagtcagctcttaacttcctctcttgcttcttcgtcatagtacgcgcaatcactgtgagatccattgttaccacgtctacactcggcgagctcgcgtttaagagattcaatttcccgtttgtattggtccatgtttccattgctaccaccattagatttacaggctgctagttgtcgttcgagatcagaaatacgggttttcttggaattgatttcgtcgatgtacttggcatcgaaacacttattaagttctttttccaattctacgattttatttctttcgcgagtcaattccctcctgtagtaactatctgttttgtcagattcacgctctctacgtagactttcttgcaagttactaatttgttccctagcacgtccgagtttagttttatatgctgaatagagttctgattcatcctttgagcagatctctagcgatcgtttaagattcctaattctagtctttagcctatttacctcctcagaagatgttccgttaccgttgcgtttacactcgttaagctgtctatcaagatccatgattctatctctaagacgttgcatctctctttccatatcagcattgctttcattattacgtctgcagtcactcaactgtctttcaatatctgagattctatctctaagacgtcgcatctctctctgtttcggcattggtttcattattacgtctacagtcgttcaactgtctttcaagatctgatattctagattggagtctgctaatctctgtagcattttcacggcattcactcagttgtctttcaagatctgaaattttagattggagtctgctaatctctgtaagatttcctcctccgctctcgatgcagtcggtcaacttattctctagttctctaatacgcgaacgcagtgcatcaacttcttgcgtgtcttcctggttgcgtgtacattcatcgagtctagattcgagatctctaacgcgtcgtcgttcttcctcaagttctctgcgtactacagaaagcgtgtccctatcttgttgatatttagcaatttctgattctagagtactgattttgcttacgtagttactaatatttgtcttggccttatcaagatcctccttgtatttgtcgcattccttgatatccctacgaagtctggacagttcccattcgacattacgacgtttatcgatttcagctcggagatcgtcatcgcgttgttttagccacatacgactgagttcaagttctcgttgacaagatccatctacttttccattcctaatagtatccagttccttttctagttctgaacgcatttctcgttccctatcaagcgattctctcaattctcggatagtcttcttatcaatttctaataaatctgaaccatcatctgtcccattttgaatatccctgtgttctttgatctcttttgtaagtcggtcgattctttcggttttataaacagaatccctttccaaagtcctaatcttactgagtttatcactaagttctgcattcaattcggtgagttttctcttggcttcttccaactctgttttaaactctccactatttccgcattcttcctcgcatttatctaaccattcaattagtttattaataactagttggtaatcagcgattcctatagccgttcttgtaattgtgggaacataattaggatcttctaatggattgtatggcttgatagcatcatctttatcattattagggggatggacaaccttaattggttggtcctcatctcctccagtagcgtgtggttcttcaataccagtgttagtaataggcttaggcaaatgcttgtcgtacgcgggcacttcctcatccatcaagtatttataatcgggttctacttcagaatattcttttctaagagacgcgacttcgggagttagtagaagaactctgtttctgtatctatcaacgctggaatcaatactcaagttaaggatagcgaatacctcatcgtcatcatccgtatcttctgaaacaccatcatatgacatttcatgaagtctaacgtattgataaatagaatcagatttagtattaaacagatccttaacctttttagtaaacgcatatgtatattttagatctccagatttcataatatgatcacatgccttaaatgtcagtgcttccatgatataatctggaacactaatgggtgacgaaaaagatacagcaccatatgctacgttgataaataaatctgaaccactaagtagataatgattaatgttaagaaagaggaaatattcagtgtataggtatgtcttggcgtcatatcttgtactaaacacgctaaacagtttgttaatgtgatcaatttccaatagattaattagagcagcgggaataccaacaaacatattaccacatccgtattttctatgaatatcacatatcatgttaaaaaatcttgatagaagagcgaatatctcgtctgacttaatgagtcgtagttcagcagcaacataagtcataactgtaaatagaacatactttcctgtagtgttgattctagactccacatcaacaccattattaaaaatagttttatatacatctttaatctgctctccgttaatcgtcgaacgttctagtatacggaaacactttgatttcttatctgtagttaatgacttagtgatatcacgaagaatattacgaattacatttcttgtttttcttgagagacctgattcagaactcaactcatcgttccatagtttttctacctcagtggcgaaatctttggagtgcttggtacatttttcaataaggttcgtgacctccatttattataaaaaatttattcaaaacttaactacaatcgggtaattataaaatcgtagatctcccatgtggcggaatactaccatctatcgcatgtggatggacagtaggtaatggccatgggaacagtaatgtttgcatatttatctttcttgccagtattactgcatattgtcccaatgtttcgatgtgatgttctaacctatcaactgccgctgtatcacaacaatagtgtccgatgaaattaagattatgatccaatgtgtttaatatatgattatcaagtcttatacgatccgcgtcttttttgacaggatcaggttcttctacaggaagaagtttcggcctcttatgatattcatgtctgggaaacggtggtctagggtgaggctccggtatcggagtgggttttggattataatcatcatcgtctatgacatcatcttcgacttcgatatttattttgctatcttgatgatgtcctgtatcagttgcattttcagcactcgactgaatattagcgcattcattgtctattattaccatatttctaaacccaaaatgtatgtgttgaacatcagtactatcgttgatgagtcttatagcatgaattcgcttatcgttatcgggtttatcttctgtcaccttagcaattccttttttattaaactctacataatcatatccatttctattgtttgttctaatataaacgagtatagcatcattgctaaatttttcaatagtatcaaaaacagaatatcctaaaccatataatatatattcaggaacactcaaactaaatgtccaggattctcctaaatacgtaaactttaatagtgcgaaatcattcaaaaatctaccacttatagatagatagtacataaatgcgtatagtagtctacctatctctttattatgaaaaccggcattacgatcatatatgtcgtgatatacctgtgatccgtttacgttaaaccataaatacatgggtgatcctataaacatgaatttatttctaattctcagagctatagttaattgaccgtgtaatatttgcttacatgcatacttgatacgcttattaataagatttttatcattgctcgttatttcagaatcgtatatataaggagtaccatcgtgattcttaccagatattatacaaaatactatatataaaatatattgaccaacgttagtaatcatataaatgtttaacgttttaaattttgtattcaatgatccattatcatacgctagcatggtcttatgatattcattctttaaaatataatattgtgttagccattgcattggggctcctaatggagattttttattctcatccattttaggataggctttcataaagtccctaataacttcgtgaataatgtttctatgttttctactgatgcatgtatttgcttcgatttttttatcccatgtttcatctatcatagatttaaacgcagtaatgctcgcaacattaacatcttgaaccgttggtacaattccgttccataaatttataatgttcgccatttatataactcattttttgaatatacttttaattaacaaaagagttaagttactcatatggacgccgtccagtctgaacatcaatctttttagccagagatatcatagccgctcttagagtttcagcgtgattttccaacctaaatagaacttcatcgttgcgtttacaacacttttctatttgttcaaactttgttgttacattagtaatctttttttccaaattagttagccgttgtttgagagtttcctcattgtcgtctccatcggctttaacaattgcttcgcgtttagcctctggctttttagcagcctttgtagaaaaaaattcagttgctggaattgcaagatcgtcatctccggggaaaagagttccgtccatttaaagtacagattttagaaactgacactctgcgttatttatatttggtacaacacatggattataaatattgatgttaataacatcagaaaatgtaaagtctatacattgttgcatcgtgttaaattttctaatggatctagtattattgggtccaacttctgcctgaaatccaaatatggaagcggatacaaaaccgtttcctggataaaccacacatctccacttttgctttacatcagaaattgtgtcgttgacatcttgaactctcctatctaatgccggtgttccacctatagattttgaatattcgaatgctgcatgagtagcattaaattccttaatattgccataattttcatatattgagtaaccctggataaaaagtaaacacaccgcagccgtcgctaccacaataaaaaaaattgatagagagttcatttataatctattagaagctgacaaaatttttttacacgcatcagacaatgctttaataaatagttcaacatctacttttgtcatatcgaaccgatggtatgattctaacctagaattacatccgaaaaagttgactatgttcatagtcattaagtcattaacaaacaacattccagactctggattataagacgatactgtttcgtcacaattacctaccttaatcatgtgattatgaatattggctattagagcaccttctaagaaatctataatatctttgaaacacgatttaaaatcaaaccacgaatatacttctacgaagaaagttagtttacccataggagaaataactataaatggagatctaaatacaaaatccggatctatgatagttttaacattattatattctctattaaatacctccacatctaaaaatgttaattttgaaactatgtcttcgtttattaccgtacctgaactaaacgctataagctctattgtttgagaactctttaaacgatattcttgaaatacatgtaacaaagtttcctttaactcggtcggtttatctaccatagttacagaatttgtatccttatctataatataataatcaaaatcgtataaagttatataattatcgcgttcagattgggatcttttcaaatagactaaaaaccccatttctctagtaagtatcttatgtatatgtttgtaaaatatcttcatggtgggaatatgctctaccgcagttagccattcctcattgacagcggtagatgtattagacaaaactattccaatgtttaacaagggccattttacgagattattaaatccttgtttgataaatgtagccaatgagggttcgagttcaacgacgattgaattctcttcccgcggatgctgcatgatgaacgacgggatgttgttcgattgatttggaattctttttcgactttttgtttatattaaatattttaaaatttatagcggatagcaattcatgtaccacggataatgtagacgcgtattgcgcatcgatatctttattattagataaatttatcaataaatgtgagaagtttgcctcgttaaggtcttccatttaaatattatataaacatttgtgtttgtaacttattcgtcttttatggaatagttttttactagtaaagctgcaattacacactttgtccgtaaaacataaatataaacaccagcttttatcaatcgttccaaaaagtcgacggcggacatttttaacatggcatctattttaaatacacttaggtttttggaaaaaacatcattttataattgtaacgattcaataactaaagaaaagattaagattaaacataagggaatgtcatttgtattttataagccaaagcattctaccgttgttaaatacttgtctggaggaggtatatatcatgatgatttggttgtattggggaaggtaacaattaataatctaaagatgatgctattttacatggatttatcatatcatggagtgacaagtagtggagcaatttacaaattgggatcgtctatcgatagactttctctaaataggactattgttacaaaagttaataattatgatgatacattttttgacgacgatgattgatcgctattgcacaattttgtttttgtactttctaatatagtgtttaggttctttttcatatgagaatattgatttactaaaatatctatgtttaacttttgttctatgacgtccttatcggcggtatcggtacatatacgtaattcaccttcacaaaatacggagtcttcgataataatagccaatcgattattggatctagctgtctgtatcatattcaacatgtttaatatatcctttcgtttcccctttacaggcatcgatcgtagcatattttccgcgtctgatatggaaatgttaaaactacaaaaatgcgtaatgttagcccgtcctaatattggtacgtgtctataagtttggcatagtagaataatagacgtgtttaaatgccttccaaagtttaagaattctattagagtattgcattttgatagtttatcgcctacatcatcaaaaataagtaaaaagtgtgctgattttttatgattttgtgcgacagcaatacatttttctatgttacttttagttcgtatcagattatattctagagattcctgactactaacgaaattaatatgatttggccaaatgtatccatcataatctgggttataaacgggtgtaaacaagaatatatgtttatattttttaactagtgtagaaaacagagatagtaaatagatagtttttccagatccagatcctcctgttaaaaccattctaaacggcatttttaataaattttctcttgaaaattgtttttcttggaaacaattcataattatatttacagttactaaattaatttgataataaatcaaaatatggaaaactaaggttgttagtagggaggagaacaaagaaggcacatcgtgatataaataacatttattatcatgatgacaccagaaaacgacgaagagcagacatctgtgttctccgctactgtttacggagacaaaattcagggaaagaataaacgcaaacgcgtgattggtctatgtattagaatatctatggttatttcactactatctatgattaccatgtccgcgtttctcatagtgcgcctaaatcaatgcatgtctgctaacgaggctgctattactgacgccgctgttgccgttgctgctgcatcatctactcatagaaaggttgcgtctagcactacgcaatatgatcacaaagaaagctgtaatggtttatattaccagggttcttgttatatattacattcagactaccagttattctcggatgctaaagcaaattgcactgcggaatcatcaacactacccaataaatccgatgtcttgactacctggctcattgattatgttgaggatacatggggatctgatggtaatccaattacaaaaactacatccgattatcaagattctgatgtatcacaagaagttagaaagtatttttgtgttaaaacaatgaactaatatttatttttgtacattaataaatgaaatcgcttaatagacaaactgtaagtaggtttaagaagttgtcggtgccggccgctataatgatgatactctcaaccattattagtggcataggaacatttctgcattacaaagaagaactgatgcctagtgcttgcgccaatggatggatacaatacgataaacattgttatttagatactaacattaaaatgtctacagataatgcggtttatcagtgtcgtaaattacgagctagattgcctagacctgatactagacatctgagagtattgtttagtattttttataaagattattgggtaagtttaaaaaagaccaatgataaatggttagatattaataatgataaagatatagatattagtaaattaacaaattttaaacaactaaacagtacgacggatgctgaagcgtgttatatatacaagtctggaaaactggttaaaacagtatgtaaaagtactcaatctgtactatgtgttaaaaaattctacaagtgacaacaaaaaatgaattaataataagtcgttaacgtacgccgccatggacgccgcgtttgttattactccaatgggtgtgttgactataacagatacattgtatgatgatctcgatatctcaatcatggactttataggaccatacattataggtaacataaaaactgtccaaatagatgtacgggatataaaatattccgacatgcaaaaatgctactttagctataagggtaaaatagttcctcaggattctaatgatttggctagattcaacatttatagcatttgtgccgcatacagatcaaaaaataccatcatcatagcatgcgactatgatatcatgttagatatagaagataaacatcagccattttatctattcccatctattgatgtttttaacgctacaatcatagaagcgtataacctgtatacagctggagattatcatctaatcatcaatccttcagataatctgaaaatgaaattgtcgtttaattcttcattctgcatatcagacggcaatggatggatcataattgatgggaaatgcaatagtaattttttatcataaaagttgtaaagtaaataataaaacaataaatattgaactagtagtacgtatattgagcaatcagaaatgatgctggtacctcttatcacggtgaccgtagttgcgggaacaatattagtatgttatatattatatatttgtaggaaaaagatacgtactgtctataatgacaataaaattatcatgacaaaattaaaaaagataaagagttctaattccagcaaatctagtaaatcaactgatagcgaatcagactgggaggatcactgtagtgctatggaacaaaacaatgacgtagataatatttctaggaatgagatattggacgatgatagcttcgctggtagtttaatatgggataacgaatccaatgttatggcgcctagcacagaacacatttacgatagtgttgctggaagcacgctgctaataaataatgatcgtaatgaacagactatttatcagaacactacagtagtaattaatgaaacggagactgttgaagtacttaatgaagataccaaacagaatcctaactattcatccaatcctttcgtaaattataataaaaccagtatttgtagcaagtcaaatccgtttattacagaacttaacaataaatttagtgagaataatccgtttagacgagcacatagcgatgattatcttaataagcaagaacaagatcatgaacacgatgatatagaatcatcggtcgtatcattggtgtgattagtttcctttttataaaattgaagtaatatttagtattattgctgccgtcacgttgtacaaatggagatattccctgtattcggcatttctaaaattagcaattttattgctaataatgactgtagatattatatagatacagaacatcaaaaaattatatctgatgagatcaatagacagatggatgaaacggtacttcttaccaacatcttaagcgtagaagttgtaaatgacaatgagatgtaccatcttattcctcatagattatcgacgattatactctgtattagttctgtcggaggatgtgttatctctatagataatgacgtcaatggcaaaaatattctaacctttcccattgatcatgctgtaatcatatccccactgagtaaatgtgtcgtagttagcaagggtcctacaaccatattggttgttaaagcggatatacctagcaaacgattggtaacatcgtttacaaacgacatactatatgtaaacaatctgtcactgattaattatttgccgttgtctgtattcattattagacgagtcaccgactatttggatagacacatatgcgatcagatatttgctaataataagtggtattcccttataaccatcgacgataagcaatatcctattccatcaaactgtataggtatgtcctctgccaagtacataaattctagcatcgagcaagatactttaatccatgtttgtaacctcgagcatccgttcgactcagtatacaaaaaaatgcagtcgtacaattctctacctatcaaggaacaaatattgtacggtagaattgataatataaatatgagcattagtatttctgtggattaatagatttctagtatggggatcattaatcatctctaatctctaaatacctcataaaacgaaaaaaaagctattatcaaatactgtacggaatggattcattctcttctctttttatgaaactctgttgtatatctactgataaaactggaagcaaaaaatctgatagaaagaataagaataagatcaaggattatatggaacacgattattataaaataacaatagttcctggttcctcttccacgtctactagctcgtggtattatacacatgcctagtaatagtctctttgcgttgacggaaagcagactagaaataacaggctaaaatgttcagacaccataatagttcccaacccagataataacagagttccatcaacacattcctttaaactcaatcccaaacccaaaaccgttaaaatgtatccggccaattgatagtagataatgaggtgtacagcgcatgataatttacacagtaaccaaaatgaaaacactttagtaattataagaaatatagacggtaatgtcatcatcaacaatccgataatatgcctgagagtaaacattgatggataaaacaaaaatgctccgcataactctatcatggcaataacacaaccaaacacttgtaaaattcctaaattagtagaaaatacaacgaatatcgatgtataagtgatctcgagaaataataagaataaagtaatgcccgtaaagataaacatcaacattgtttggtaatcattaaaccaattagtatgaagttgaactaatttcacagtagattttattccagtgttatcctcgcatgtataagtacctggtaagatatctttatattccataatcaatgagacatcactatctgataacgaatgaagtctagcactagtatgccatttacttaatattgtcgtcttggaagttttattataagttaaaatatcatggttatccaatttccatctaatatactttgtcggattatctatagtacacggaataatgatggtatcattacatgctgtatactctatggtctttgtagttgttataacaaccaacgtatagaggtatatcaacgatattctaactcttgacattttttatttatttaaaatgatacctttgttatttattttattctattttgctaacggtattgaatggcataagtttgaaacgagtgaagaaataatttctacttacttattagacgacgtattatacacgggtgttaatggggcggtatacacattttcaaataataaactaaacaaaactggtttaactaataataattatataacaacatctataaaagtagaggatgcggataaggatacattagtatgcggaaccaataacggaaatcccaaatgttggaaaatagacggttcagacgacccaaaacatagaggtagaggatacgctccttatcaaaatagcaaagtaacgataatcagtcacaacggatgtgtactatctgacataaacatatcaaaagaaggaattaaacgatggagaagatttgacggaccatgtggttatgatttattcacggcggataacgtaattccaaaagatggtttacgaggagcattcgtcgataaagacggtacttatgacaaagtttacattcttttcactgatactatcggctcaaagagaattgtcaaaattccgtatatagcacaaatgtgcctaaacgacgaaggtggtccatcatcattgtctagtcatagatggtcgacgtttctcaaagtcgaattagaatgtgatatcgacggaagaagttatagacaaattattcattctagaactataaaaacagataatgatacgatactatatgtattcttcgatagtccttattccaagtccgcattatgtacctattctatgaataccattaaacaatctttttctacgtcaaaattggaaggatatacaaagcaattgccgtctccagctcctggtatatgtttaccagctggaaaagttgttccacataccacgtttgaagtcatagaacaatataatgtactagatgatattataaagcctttatctaaccaacctatcttcgaaggaccgtctggtgttaaatggttcgatataaaggagaaggaaaatgaacatcgggaatatagaatatacttcataaaagaaaattctatatattcgttcgatacaaaatctaaacaaactcgtagctcgcaagtcgatgcgcgactattttcagtaatggtaactgcgaaaccgttatttatagcagatatagggataggagtaggaatgccacaaatgaaaaaaatacttaaaatgtaatcttaatcgagtacaccacacgacaatgaacaaacataagacagattatgctggttatgcttgctgcgtaatatgcggtctaattgtcggaattatttttacagcgacactattaaaagttgtagaacgtaaattagttcatacaccattaatagataaaacgataaaagatgcatatattagagaagattgtcctactgactggataagctataataataaatgtatccatttatctactgatcgaaaaacctgggaggaaggacgtaatgcatgcaaagctctaaattcaaattcggatctaattaagatagagactccaaacgagttaagttttttaagaagccttagacgaggctattgggtaggagaatccgaaatattaaaccagacaaccccatataattttatagctaagaatgccacgaagaatggaactaaaaaacggaaatatatttgtagcacaacgaatactcccaaactgcattcgtgttacactatataacaattacactacatttttatcataccactacttcggttagatgttttagaaaaaaataaatatcgccgtaccgttcttgtttttataaaaataacaattaacaattatcaaattttttctttaatattttacgtggttgaccattcttggtggtaaaataatctcttagtgttggaatggaatgctgtttaatgtttccacactcatcgtatattttgacgtatgtagtcacatcgtttacgcaatagtcagactgtagttctatcatgcttcctacatcagaaggaggaacagttttaaagtctcttggttttaatctattaccgttagttttcatgaaatcctttgttttatccacttcacattttaaataaatgtccactatacattcttttgttaattttactagatcgtcatgggtcatagaatttataggttccgtagtccatggatccaaactagcaaacttcgcgtatacggtatcgcgattagtgtatacaccaactgtatgaaaattaagaaaacagtttaataaatcaacagaaatatttaatcctccgtttgatacagatgcgccatatttatggatttcggattcacacgttgtttgtctgaggtgttcgtctagtgttgcttctacgtaaacttcgattcccatatattctttattgtcagaatcgcataccgatttatcatcatacactgtttgaaaactaaatggtatacacatcaaaataataaataataacgagtacattctgcaatattgttatcgtaattggaaaaatagtgttcgagtgagttggattatgtgagtattggattgtatattttattttatattttgtaataagaataaaatgctaatgtcaagtttattccaatagatgtcttattaaaaacatatataataaataacaatggctgaatggcataaaattatcgaggatatctcaaaaaataataagttcgaggatgccgccatcgttgattacaagactacaaagaatgttctagctgctattcctaacagaacatttgccaagattaatccgggtgaaattattcctctcatcactaatcgtaatattctaaaacctcttattggtcagaaatattgtattgtatatactaactctctaatggatgagaacacgtatgctatggagttgcttactgggtacgcccctgtatctccgatcgttatagcgagaactcataccgcacttatatttttgatgggtaagccaacaacatccagacgtgacgtgtatagaacgtgtagagatcacgctacccgtgtacgtgcaactggtaattaaaataaaaagtaatattcatatgtagtgtcaattttaaatgatgatgatgaaatggataatatccatattgacgatgtcaataatgccggtattggcatacagttcatcgatttttagatttcattcagaggatgtggaattatgttatgggcatttgtattttgataggatctataatgtagtaaatataaaatataatccgcatattccatatagatataattttattaatcgcacgttaaccgtagatgaactagacgataatgtcttttttacacatggttattttttaaaacacaaatatggttcacttaatcctagtttgattgtctcattatcaggaaacttaaaatataatgatatacaatgctcagtaaatgtatcgtgtctcattaaaaatttggcaacgagtacatctactatattaacatctaaacataagacttattctctacatcggtccacgtgtattactataataggatacgattctattatatggtataaagatataaatgacaagtataatgacatctatgattttactgcaatatgtatgctaatagcgtctacattgatagtgaccatatacgtgtttaaaaaaataaaaatgaactcttaattatgctatgctattagaaatggataaaatcaaaattacggttgattcaaaaattggtaatgttgttaccatatcgtataacttggaaaagataactattgatgtcacacctaaaaagaaaaaagaaaaggatgtattattagcgcaatcagttgctgtcgaagaggcaaaagatgtcaaggtagaagaaaaaaatattatcgatattgaagatgacgatgatatggatgtagaaagcgcgtaatacgatctataaaaataagtatataaatactttttatttactgtactcttactgtgtagtggtgataccctactcgattatttttttaaaaaaaaaatacttattctgattcttctagccatttccgtgttcgtttgaatgccacatcgacgtcaaagataggggagtagttgaaatctagttctgcattgttggtacgcacctcaaatgtagtgttggatatcttcaacgtatagttgttgagtagtgatggttttctaaatagaattctcttcatatcattcttgcacgcgtacatttttagcatccatcttggaatcctagatccttgttctattcccaatggtttcatcaatagaagattaaacatatcgtacgaacacgatggagagtaatcgtagcaaaagtaagcatttcctttaatctcagatcccggatactggatatattttgcagccaacacgtgcatccatgcaacatttcctacatatacccggctatgcaccgcgtcatcatcgactgtacgatacataatgttaccgtgttgcttacattgctcgtaaaagactttcatcaatttgtctccttctccgtaaattccagtgggtcttaggcaacaagtatacaattttgctccattcatgattacggaattattggctttcataaccagttgctcggccatacgtttactttttgcgtatacatgtcctggtgatatatcataaagggtatgctcatggccgatgaatggatcaccgtgtttattgggtcctattgcttccatgctactagtatagatcaaatacttgattcctaggtccacacaagctgccaaaatagtctgtgttccataatagtttactttcatgatttcattatcggtgtattttccaaatacatccactagagcagccgtatgaataatcagatttaccccatctagcgcttctctcaccttatcaaagtcgtttatatcacattgtatatagtttataaccttaactttcgaggttattggttgtggatcttctacaatatctatgactctgatttcttgaacatcatctgcactaattaacagttttactatatacctgcctagaaatccggcaccaccagtaaccgcgtacacggccattgctgccactcataatatcagactacttattctattttactaaataatggctgtttgtataatagaccacgataatatcagaggagttatttactttgaaccagtccatggaaaagataaagttttaggatcagttattggattaaaatccggaacgtatagtttgataattcatcgttacggagatattagtcaaggatgtgattccataggcagtccagaaatatttatcggtaacatctttgtaaacagatatggtgtagcatatgtttatttagatacagatgtaaatatatttacaattattggaaaggcgttatctatttcaaaaaatgatcagagattagcgtgtggagttattggtatttcttacataaatgaaaagataatacattttcttacaattaacgagaatggcgtttgatatatcagttaatgcgtctaaaacaataaatgcattagtttacttttctactcagcaaaataaattagtcatacgtaatgaagttaatgatacacactacactgtcgaatttgatagggacaaagtagttgacacgtttatttcatataatagacataatgacaccatagaaataagaggggtgcttccagaggaaactaatattggttgcgcggttaatacgccggttagtatgacttacttgtataataagtatagttttaaactgattttagcagaatatataagacacagaaatactatatccggcaatatttattcggcattgatgacactagatgatttggctattaaacagtatggagacattgatctattatttaatgagaaacttaaagtagactccgattcgggactatttgactttgtcaactttgtaaaggatatgatatgttgtgattctagaatagtagtagctctatctagtctagtatctaaacattgggaattgacaaataaaaaatataggtgtatggcattagccgaacatatatctgatagtattccaatatctgagctatctagactacgatacaatctatgtaagtatctacgcgggcacactgagagcatagaggatgaatttgattattttgaagacgatgattcgtctacatgttctgccgtaaccgacagggaaacggatgtataatttttttttatagcgtgaaggatatgataaaaaatataattgttgtatttatcccattccaatcaccttatatgattctgtaacacaataaaggagtcttatagatgtatagaggtcagatactggtttgataaactgtttattccacataagtatgtttgactttatggttagacccgcatactttaacaaatcactgaaaattggagttaggtattgacctctcagaatcagttgccgttctggaacattaaatgtattttttatgatatactccaacgcatttatgtgggcatacaacaagtcattactaatggagtattccaagagttttagttgtctagtatttaacaagagaagagatttcaacagactgtttatgaactcgaatgccgcctcattgtcgcttatattgatgatgtcgaattctcccaatatcatcaccgatgagtagctcatcttgttatcgggatccaagttttctaaagatgtcattaaaccctcgatcatgaatggatttatcatcatcgtttttatgttggacatgagcttagtccgtttgtccacatctatagacgacgatttctgaattatttcatatatccctctctttaactccaggaacttgtcaggatggtctactttaatatgttctcgtctaagagatgaaaatctttggatggttgtacgcgacttttctctaaaggatgacgttgcccaagatcctctcttaaatgaatccatcttatccttggacaagatggacagtctattttccttagatggtttaatatttttgttacccatgatctataaaggtagacctaatcgtctcggatgacctatatatttattttcagttttattatacgcataaattgtaaaaaatatgttaggtttacaaaaatgtctcgtggggcattaatcgtttttgaaggattggacaaatctggaaaaacaacacaatgtatgaacatcatggaatctataccggcaaacacgataaaatatcttaactttcctcagagatccactgtcactggaaagatgatagatgactatctaactcgtaaaaaaacctataatgatcatatagttaatctattattttgtgcaaatagatgggagtttgcatcttttatacaagaacaactagaacagggaattactttaatagttgatagatacgcattttctggagtagcgtatgccgccgctaaaggcgcgtcaatgactctcagtaagagttatgaatctggattgcctaaacccgacttagttatattcttggaatctggtagcaaagaaattaatagaaacgtcggcgaggaaatttatgaagatgttacattccaacaaaaggtattacaagaatataaaaaaatgattgaagaaggagatattcattggcaaattatttcttctgaattcgaggaagatgtaaagaaggagttgattaagaatatagttatagaggctatacacacggttactggaccagtggggcaactgtggatgtaatagtgaaattacattttttataaatagatgttagtacagtgttataaatggatgaagcatattactctggcaacttggaatcagtactcggatacgtgtccgatatgcataccgaactcgcatcaatatctcaattagttattgccaagatagaaactatagataatgatatattaaacaaggacattgtaaattttatcatgtgtagatcaaacttggataatccatttatctctttcctagatactgtatatactattatagatcaagagaactatcagactgagttgattaattcattagacgacaatgaaattatcgattgtatagttaataagtttatgagcttttataaggataacctagaaaatatagtagatgctatcattactctaaaatatataatgaataatccagattttaaaactacgtatgcagaagtactcggttccagaatagccgatatagatattaaacaagtgatacgtaagaatatactacaattgtctaatgatatccgcgaacgatatttgtgaaaatattaaaaaaaaatactttttttattaaatgacgtcgcttcgcgaatttagaaaattatgctgtgatatatatcacgcatcaggatataaagaaaaatctaaattaattagagactttataacagatagggatgataaatatttgatcattaagctattgcttcccggattagacgatagaatttataacatgaacgataaacaaattataaaattatatagtataatatttaaacaatctcaggaagatatgctacaagatttaggatacggatatataggagacactattaggactttcttcaaagagaacacagaaatccgtccacgagataaaagcattttaactttagaagaagtggatagttttttaactacgttatcatccgtaactaaagaatcgcatcaaataaaattattgactgatatcgcatccgtttgtacatgtaatgatttaaaatgtgtagtcatgcttattgataaagatctaaaaattaaagcgggtcctcggtacgtacttaacgctattagtcctaatgcctatgatgtgtttagaaaatctaataacttgaaagagataatagaaaatgcatctaaacaaaatctagactctatatctatttctgttatgactccaattaatcccatgttagcggaatcgtgtgattctgtcaataaggcgtttaaaaaatttccatcaggaatgtttgcggaagtcaaatacgatggtgaaagagtacaagttcataaaaataataacgagtttgccttctttagtagaaacatgaaaccagtactctctcataaagtggattatctcaaagaatacataccgaaagcatttaaaaaagctacgtctatcgtattggattctgaaattgttcttgtagacgaacataatgtaccgctcccgtttggaagtttaggaatacacaaaaagaaagaatataaaaactctaacatgtgtttgttcgtgtttgactgtttgtactttgatggattcgatatgacggacattccattgtacgaacgaagatcttttctcaaagatgttatggttgaaatacccaatagaatagtattctcagagttgacgaatattagtaacgagtctcagttaactgacgtattggatgatgcactaacgagaaaattagaaggattggtcttaaaagatattaatggagtatacgaaccgggaaagagaagatggttaaaaataaagcgagactatttgaacgagggttccatggcagattctgccgatttagtagtactaggtgcttactatggtaaaggagcaaagggtggtatcatggcagtctttctaatgggttgttacgacgatgaatccggtaaatggaagacggttaccaagtgttcaggacacgatgataatacgttaagggagttgcaagaccaattaaagatgattaaaattaacaaggatcccaaaaaaattccagagtggttagtagttaataaaatctatattcccgattttgtagtagaggatccgaaacaatctcagatatgggaaatttcaggagcagagtttacatcttccaagtcccataccgcaaatggaatatccattagatttcctagatttactaggataagagaggataaaacgtggaaagaatctactcatctaaacgatttagtaaacttgactaaatcttaatagttacatacaaactgaaaattaaaataacactatttagttggtggtcgccatggatggtgttattgtatactgtctaaacgcgctagtaaaacatggcgaggaaataaatcatataaaaaatgatttcatgattaaaccatgttgtgaaagagtttgtgaaaaagtcaagaacgttcacattggcggacaatctaaaaacaatacagtgattgcagatttgccatatctggataatgcggtatccgatgtatgcaattcactgtataaaaagaatgtatcaagaatatccagatttgctaatttgataaagatagatgacgatgacaagactcctactggtgtatataattattttaaacctaaagatgccattcctgttattatatccataggaaaggatagagatgtttgtgaactattaatctcatcagacatatcgtgtgcatgcgtggagttaaattcatatcacgtagccattcttcccatggatgtttccttttttaccaaaggaaatgcatcattgattattctcctgtttgatttctctatcgatgcggcacctctcttaagaagtgtaaccgataataatgttattatatctagacaccagcgtatacatgacgagcttccgagttccaattggttcaagttttacataagtataaagtccgactattgttctatattatatatggttgttgatggatctgtgatgcatgcgatagctgataatagaactcacgcaattattagcaaaaatatattagacaatactacgattaacgatgagtgtagatgctgttattttgaaccacagattaggattcttgatagagatgagatgctcaatggatcatcgtgtgatatgaacagacattgtattatgatgaatttacctgatgtaggcgaatttggatctagtatgttggggaaatatgaacctgacatgattaagattgctctttcggtggctggtaatttaataagaaatcgagactacattcccgggagacgaggatatagctactacgtttacggtatagcctctagataatttttttaagcacgaaataaaaaacataattttaaaccaatctatttcatactattttgtgtgatcaccatggacataaagatagatattagtatttctggtgataaatttacggtgactactaggagggaaaatgaagaaagaaaaaaatatctacctctccaaaaagaaaaaactactgatgttatcaaacctgattatcttgagtacgatgacttgttagatagagatgagatgtttactattctagaggaatattttatgtacagaggtctattaggcctcagaataaaatatggacgactctttaacgaaattagaaaattcgacaatgatgcggaagaacaattcggtactatagaagaactcaagcagaaacttagattaaattctgaagagggagcagataactttatagattatataaaggtacaaaaacaggatatcgtcaaacttactgtatacgattgcatatctatgataggattgtgtgcatgcgtggtagatgtttggagaaatgagaaactgttttctagatggaaatattgtttacgagcgattaaactgtttattgatgatcacatgcttgataagataaaatctatactgcagaatagactagtatatgtggaaatgtcatagaaagttaaaagttaatgagagcaaaaatatataaggttgtattccatatttgttatttttttctgtaatagttagaaaaatacattcgatggtctatctatcagattattatgtgttataaggtactttttctcataataaactagagtatgagtaagatagtgtttttcaaaacatataaatctaaaattgatggatgagatatacagctattaatttcgaaaatatattttaatctgataactttaaacatggatttttgatggtggtttaacgttttaaaaaaagattttgttattgtagtatatgataatattaaaagatggatataaagaatttgctgactgcatgtactattttttacattactacattggctacggcagatatacctacttcgtcactgccacacgctccggtaaacggggcatgtgacgagggagaatatcttgataagaggcataatcaatgttgtaatcagtgtccacctggagaatttgccaaggtcagatgtagtggtagtgataacacaaaatgtgaacgctgcccacctcatacatataccgcaatccccaattactctaatggatgtcatcaatgtagaaaatgcccaacaggatcatttgataaggtaaagtgtaccggaacacagaacagtaaatgttcgtgtcttcctggttggtattgcgctactgattcttcacagactgaagattgtcgagattgtataccaaaaaggagatgtccatgcggatactttggtggaatagatgaacaaggaaatcctatttgtaaatcgtgttgtgttggtgaatattgcgactacctacgtaattatagacttgatccatttcctccatgcaaactatctaaatgtaattaattatgattttgatgataatgttaccatacattatatcgctacttggttagtgtattattcagtatgaagacctattaataattacttatcttttgacgatcttgttataattataatataaaaatacttatggcatagtaactcataattgctgacgcgataaattcgtaataatctgttttgttcaaaggaatctacaggcataaaaataaaaatataatttataatatactcttacagcgcgccatcatgaataacagcagtaaattaattgctgttattaatggatttagaaatagtggacgattttgtgatattaatatagttattaatgatgaaaggataaacgctcacagactcatcctatctggagcctccgaatatttttccattctgttttccaataattttatcgattctaatgaatacgaagttaatctaagtcatttagattatcaaagcgtaaacgatttgatcgattacatttatgggatacctttgagcctaactaacgataacgtgaaatatattctttcaaccgctgattttttacaaattggatctgctattacggagtgtgaaaattacatacttaaaaatctttgttctagaaactgtatcgatttctacatatacgctgataaatataataacaagaaaatagaatcagcgtcgtttaacacaatattacaaaatattttgagactcatcaacgatgaaaactttaaatacttaacagaggaatcaatgataaaaattttaagcgatgatatgttaaatataaaaaatgaggatttcgccccactaattctcattaaatggttagagagtactcaacaaccatgcaccgtcgagttacttaaatgcctcagaatatcattgctttccccacaagttataaaatcactttatagtcatcgactggttagttcaatctacgaatgtataacattcttaaacaatatagcattcttggatgaatcatttcctagataccatagcatcgagttgatatctatcggtataagtaattcgcatgataagatttccataaactgctacaatcataaaaaaaatacatgggaaatgatatcttcacgtagatataggtgtagtttcgcagtggccgtcctggataatattatttatatgatgggtggatatgatcagtccccgtatagaagttcaaaggttatagcgtacaatacatgtacaaattcttggatatatgatataccagagctaaaatatcctcgttctaattgtgggggactggctgatgacgaatacatttattgtataggcggcatacgcgatcaggattcatcgttgacatctagtattgatagatggaagccatcaaaaccatattggcagaagtatgctaaaatgcgcgaaccaaaatgtgatatgggggttgcgatgttaaacggattaatatatgttataggtggaatcgttaaaggtgacacgtgtaccgacgcactagagagtttatcagaagatggatggatgaagcatcaacgtcttccaataaaaatgtccaatatgtcgacgattgttcatgatggcaagatttatatatctggaggttacaacaatagtagtgtagttaatgtaatatcgaatttagtccttagctataattcgatatatgatgaatggaccaaattatcatcattaaacattcctagaattaatcccgctctatggtcagcgcataataaattatatgtaggaggaggaatatctgatgatgttcgaactaatacatctgaaacatacgacaaagaaaaagattgttggacattggataatggtcacgtgttaccacgcaattatataatgtataaatgcgaaccgattaaacataaatatccattggaaaaaacacagtacacgaatgattttctaaagtatttggaaagttttataggtagttgatagaacaaaatacataattttgtaaaaataaatcactttttatactaatatgacacgattaccaatacttttgttactaatatcattagtatacgctacaccttttcctcagacatctaaaaaaataggtgatgatgcaactctatcatgtaatcgaaataatacaaatgactacgttgttatgagtgcttggtataaggagcccaattccattattcttttagctgctaaaagcgacgtcttgtattttgataattataccaaggataaaatatcttacgactctccatacgatgatctagttacaactatcacaattaaatcattgactgctagagatgccggtacttatgtatgtgcattctttatgacatcgcctacaaatgacactgataaagtagattatgaagaatactccacagagttgattgtaaatacagatagtgaatcgactatagacataatactatctggatctacacattcaccggaaactagttctgagaaacctgattatatagataattctaattgctcgtcggtattcgaaatcgcgactccggaaccaattactgataatgtagaagatcatacagacaccgtcacatacactagtgatagcattaatacagtaagtgcatcatctggagaatccacaacagacgagactccggaaccaattactgataaagaagatcatacagttacagacactgtctcatacactacagtaagtacatcatctggaattgtcactactaaatcaaccaccgatgatacgtacaatgataatgatacagtaccaccaactactgtaggcggtagtacaacctctattagcaattataaaaccaaggactttgtagaaatatttggtattaccgcattaattatattgtcggccgtggcaatattctgtattacgtattatatatgtaataaacgttcacgtaaatacaaaacagagaacaaagtctagatttttgacttacataaatgtctgggatagtaaaatctatcatattgagcgggccatctggtttaggaaagacagccatagccaaaagactatgggaatatatttggatttgtggtgtcccataccactagatttcctcgtcctatggaacgagaaggtgtcgattaccattacgttaacagagaggccatctggaagggaatagccgccggaaactttctagaacatactgagtttttaggaaatatttacggaacttctaaaactgctgtgaatacagcggctattaataatcgtatttgtgtgatggatctaaacatcgatggcgttagaagtcttaaaaatacgtacctaatgccttactcggtgtatataagacctacctctcttaaaatggttgagaccaagcttcgttgtagaaacactgaagcggatgatgagattcatcgtcgtgtgatgttggcaaaaactgacatggatgaggcaggtgaagccggtctattcgacactattatcattgaagatgatgtgaatttagcatatagtaagttaattcagatactacaggaccgtattagaatgtattttaacactaattagagacttaagacttaaaacttgataattaataatataactcgtttttatatgtggctatttcaacgtctaatgtattagttaaatattaaaacttaccacgtaaaacttaaaatttaaaatgatatttcattgacagatagatcacacattatgaactttcaaggacttgtgttaactgacaattgcaaaaatcaatgggtcgttggaccattaataggaaaaggtggatttggtagtatttatactactaatgacaataattatgtagtaaaaatagagcccaaagctaacggatcattatttaccgaacaggcattttatactagagtacttaaaccatccgttatcgaagaatggaaaaaatctcacaatataaagcacgtaggtcttatcacgtgcaaggcatttggtctatacaaatccattaatgtggaatatcgattcttggtaattaatagattaggtgcagatctagatgcggtgatcagagccaataataatagattaccaaaaaggtcggtgatgttgatcggaatcgaaatcttaaataccatacaatttatgcacgagcaaggatattctcacggagatattaaagcgagtaatatagtcttggatcaaatagataagaataaattatatctagtggattacggattggtttctaaattcatgtctaatggcgaacatgttccatttataagaaatccaaataaaatggataacggtactctagaatttacacctatagattcgcataaaggatacgttgtatctagacgtggagatctagaaacacttggatattgtatgattagatggttgggaggtatcttgccatggactaagatatctgaaacaaagaattgtgcattagtaagtgccacaaaacagaaatatgttaacaatactgcgactttgttaatgaccagtttgcaatatgcacctagagaattgctgcaatatattaccatggtaaactctttgacatattttgaggaacccaattacgacaagtttcggcacatattaatgcagggtgtatattattaagtgtggtgtttggtcgataaaaattaaaaaataacttaatttattattgatctcgtgtgtacaaccgaaatcatggcgatgttttacgcacacgctctcggtgggtacgacgagaatcttcatgcctttcctggaatatcatcgactgttgccaatgatgtcaggaaatattctgttgtgttagtttataataacaagtatgacattgtaaaagacaaatatatgtggtgttacagtcaggtgaacaagagatatattggagcactgctgcctatgtttgagtgcaatgaatatctacaaattggagatccgatccatgatcaagaaggaaatcaaatctctatcatcacatatcgccacaaaaactactatgctctaagcggaatcgggtacgagagtctagacttgtgtttggaaggagtagggattcatcatcacgtacttgaaacaggaaacgctgtatatggaaaagttcaacatgattattctactatcaaagagaaggccaaagaaatgagtacacttagtccaggacctatcatcgattaccacgtctggataggagattgtatctgtcaagttactgctgtggacgtacatggaaaggaaattatgaaaatgagattcaaaaagggtgcggtgcttccgatcccaaatctggtaaaagttaaacttggggagaatgatacagaaaatctttcttctactatatcggcgacaccatcgaggtaaccacctctctggaagacagcgtgaataatgtactcatgaaacgtttggaaactatacgccatatgtggtctgttgtatatgatcattttgatattgtgaatggtaaagaatgctgttatgtgcatacgcatttgtctaatcaaaatcttataccgagtactgtaaaaacaaatttgtacatgaagactatgggatcatgcattcaaatggattccatggaagctctagagtatcttagcgaactgaaggaatcaggtggatggagtcccagaccagaaatgcaggaatttgaatatccagatggagtggaagacactgaatcaattgagagattggtagaggagttcttcaatagatcagaacttcaggctggtgaatcagtcaaatttggtaattctattaatgttaaacatacatctgtttcagctaagcaactaagaacacgtatacggcagcagcttccttctatactctcatcttttaccaacacaaagggtggatatttgttcattggagttgataataatacacacaaagtatttggattcacggtgggttacgactacctcagactgatagagaatgatatagaaaagcatatcaaaagactttgtgttgtgtatttctgtgagaagaaagaggacatcaagtacgcgtgtcgattcatcaaggtatataaacctggggatgaggctacctcgacatacgtgtgcgctatcaaagtggaaagatgctgttgtgctgtgtttgcagattggccagaatcatggtatatggatactaatggtatcaagaagtattctccagatgaatgggtgtcacatataaaattttaattaatgtaatagagaacaaataataaggttgtaatatcatatagacaataactaacaattaattagtaactgttatctcttttttaactaaccaactaactatatacctattaatacatcgtaattatagttcttaacatctattaatcattgattcgcttctttaattttttataaactaacattgttaattgaaaagggataacatgttacagaatataaattatatatggatttttttaaaaaggaaatacttgactggagtatatatttatctcttcattatatagcacgcgtgttttccaatttttccacatcccatataatacaggattataatctcgttcgaacatacgagaaagtggataaaacaatagttgattttttatctaggttgccaaatttattccatattttagaatatggggaaaatattctacatatttattctatggatgatgctaatacgaatattataattttttttctagatagagtattaaatattaataagaacgggtcatttatacacaatctcgggttatcatcatccattaatataaaagaatatgtatatcaattagttaataatgatcatccagataataggataagactaatgcttgaaaatggacgtagaacaagacattttttgtcctatatatcagatacagttaatatctatatatgtattttaataaatcatggattttatatagatgccgaagacagttacggttgtacattattacatagatgtatatatcactataagaaatcagaatcagaatcatacaatgaattaattaagatattgttaaataatggatcagatgtagataaaaaagatacgtacggaaacacaccttttatcctattatgtaaacacgatatcaacaacgtggaattgtttgagatatgtttagagaatgctaatatagactctgtagactttaatagatatacacctcttcattatgtctcatgtcgtaataaatatgattttgtaaagttattaatttctaaaggagcaaatgttaatgcgcgtaataaattcggaactactccattttattgtggaattatacacggtatctcgcttataaaactatatttggaatcagacacagagttagaaatagataatgaacatatagttcgtcatttaataatttttgatgctgttgaatctttagattatctattatccagaggagttattgatattaactatcgtactatatacaacgaaacatctatttacgacgctgtcagttataatgcgtataatacgttggtctatctattaaacaaaaatggtgattttgagacgattactactagtggatgtacatgtatttcggaagcagtcgcaaacaacaacaaaataataatggaagtactattgtctaaacgaccatctttgaaaattatgatacagtctatgatagcaattactaaacataaacagcataatgcagatttattgaaaatgtgtataaaatatactgcgtgtatgaccgattatgatactcttatagatgtacagtcgctacagcaatataaatggtatattttaagatgtttcgatgaaatagatatcatgaagagatgttatataaaaaataaaactgtattccaattagttttttgtatcaaagacattaatactttaatgagatacggtaaacatccttctttcgtgaaatgcactagtctcgacgtatacggaagtcgtgtacgtaatatcatagcatctattagatatcgtcagagattaattagtctattatccaagaagctggatcctggagataaatggtcgtgttttcctaacgaaataaaatataaaatattggaaaactttaacgataacgaactatccacatatctaaaaatcttataaacattattaaaatataaaatctaagtaggataaaatcacactacatcattgtttccttttagtgctcgacagtgtatactatttttaacgctcataaataaaaatgaaaacgatttccgttgttacgttgttatgcgtactacctgctgttgtttattcaacatgtactgtacccactatgaataacgctaaattaacgtctaccgaaacatcgtttaatgataaccagaaagttacgtttacatgtgatcagggatatcattctttggatccaaatgctgtctgtgaaacagataaatggaaatacgaaaatccatgcaaaaaaatgtgcacagtttctgattatgtctctgaactatataataaaccgctatacgaagtgaattccaccatgacactaagttgcaacggcgaaacaaaatattttcgttgcgaagaaaaaaatggaaatacttcttggaatgatactgttacgtgtcctaatgcggaatgtcaacctcttcaattagaacacggatcgtgtcaaccagttaaagaaaaatactcatttggggaatatatgactatcaactgtgatgttggatatgaggttattggtgcttcgtacataagttgtacagctaattcttggaatgttattccatcatgtcaacaaaaatgtgatatgccgtctctatctaacggattaatttccggatctacattttctatcggtggcgttatacatcttagttgtaaaagtggttttacactaacggggtctccatcatccacatgtatcgacggtaaatggaatcccatactcccaatatgtgtacgaactaacgaaaaatttgatccagtggatgatggtcccgacgatgagacagatttgagcaaactctcgaaagacgttgtacaatatgaacaagaaatagaatcgttagaagcaacttatcatataatcatagtggcgttgacaattatgggcgtcatatttttaatctccgttatagtattagtttgttcctgtgacaaaaataatgaccaatataagttccataaattgctaccgtaaatataaatccgttaaaataattaataatttaataacaaacaagtatcaaaagattaaagacttatagctagaatcaattgagatgtcttcttcagtggatgttgatatctacgatgccgttagagcatttttactcaggcactattataacaagagatttattgtgtatggaagaagtaacgccatattacataatatatacaggctatttacaagatgcgccgttataccgttcgatgatatagtacgtactatgccaaatgaatcacgtgttaaacaatgggtgatggatacacttaatggtataatgatgaatgaacgcgatattactgtaagcgttggcaccggaatactattcatggaaatgtttttcgattacaataaaaatagtatcaacaatcaactaatgtatgatataattaatagcgtatctataattctagctaatgagagatatagaagcgcttttaacgacgatggtatatacatccgtagaaatatgattaacaagttgtacggatacgcatctctaactactattggcacgatcgctggaggtgtttgttattatctgttgatgcatctagttagtttgtataaataattatttcaatatactagttaaaattttaagattttaaatgtataaaaaactaataacgtttttatttgtaataggtgcattagcatcctattcgaataatgagtacactccgtttaataaactgagtgtaaaactctatatagatggagtagataatatagaaaattcatatactgatgataataatgaattggtgttaaattttaaagagtacacaatttctattattacagagtcatgcgacgtcggatttgattccatagatatagatgttataaacgactataaaattattgatatgtataccattgactcgtctactattcaacgcagaggtcacacgtgtagaatatctaccaaattatcatgccattatgataagtacccttatattcacaaatatgatggtgatgagcgacaatattctattactgcagagggaaaatgctataaaggaataaaatatgaaataagtatgatcaacgatgatactctattgagaaaacatactcttaaaattggatctacttatatatttgatcgtcatggacatagtaatacatattattcaaaatatgatttttaaaaatttaaaatatattatcacttcagtgacagtagtcaaataacaaacaacaccatgagatatattataattctcgcagttttgttcattaatagtatacatgctaaaataactagttataagtttgaatccgtcaattttgattccaaaattgaatggactggggatggtctatacaatatatcccttaaaaattatggcatcaagacgtggcaaacaatgtatacaaatgtaccagaaggaacatacgacatatccgcatttccaaagaatgatttcgtatctttctgggttaaatttgaacaaggcgattataaagtggaagagtattgtacgggactatgcgtcgaagtaaaaattggaccaccgactgtaacattgactgaatacgacgaccatatcaatttgtacatcgagcatccgtatgctactagaggtagcaaaaagattcctatttacaaacgcggtgacatgtgtgatatctacttgttgtatacggctaacttcacattcggagattctaaagaaccagtaccatatgatatcgatgactacgattgcacgtctacaggttgcagcatagactttgtcacaacagaaaaagtgtgcgtgacagcacagggagccacagaagggtttctcgaaaaaattactccatggagttcgaaagtatgtctgacacctaaaaagagtgtatatacatgcgcaattagatccaaagaagatgttcccaatttcaaggacaaaatggccagagttatcaagagaaaatttaatacacagtctcaatcttatttaactaaatttctcggtagcacatcaaatgatgttaccacttttcttagcatgcttaacttgactaaatattcataactaatttttattaatgatacaaaaacgaaataaaactgcatattatacactggttaacgcccttataggctctaaccattttcaagatgaggtccctgattatagtccttctgttcccctctatcatctactccatgtctattagacgatgtgagaagactgaagaggaaacatggggattgaaaatagggttgtgtataattgccaaagatttctatcccgaaagaactgattgcagtgttcatctcccaactgcaagtgaaggattgataactgaaggcaatggattcagggatatacgaaacaccgataaattataaaaaaagcaatgtgtccgctgtttccgttaataatactattttcgtaactggcggattattcataaataactctaatagcacgatcgtggttaacaatatggaaaaacttgacatttataaagacaaacaatggtcgattatagaaatgcctatggctagggtatatcacggcatcgactcgacatttggaatgttatattttgccggaggtctatccgttaccgaacaatatggtaatttagagaaaaacaacgagatatcttgttacaatcctagaacgaataagtggtttgatatttcatatactatttataagatatccatatcatcattgtgtaaactaaataacgtcttctatgtatttagtaaggacattggatatgtggaaaagtatgatggtgcatggaagttagtacatgatcgtctccccgctataaaggcattatcaacttctccttattgattgaaaatgaaaatataaatagtttttatgtatagcagtattaccctatagttttattgcttactactaacatggatacagatgttacaaatgtagaagatatcataaatgaaatagatagagagaaagaagaaatactaaaaaatgtagaaattgaaaataataaaaacattaacaagaatcatccaagtggatatattagagaagcactcgttattaatactagtagtaatagtgattccattgataaagaagttatagaatgtatctgtcacgatgtaggaatatagatcatatctactaatttttataatcgatacaaaacataaaaaacaactcgttattacatagcaggcatggaatccttcaagtattgttttgataacgatggcaagaaatggattatcggaaatactttatattctggtaattcaatactctataaggtcagaaaaaatttcactagttcgttctacaattacgtaatgaagatagatcacaaatcacacaagccattgttgtctgaaatacgattctatatatctgtattggatcctttgactatcgacaactggacacgggaacgtggtataaagtatttggctattccagatctgtatggaattggagaaaccgatgattatatgttcttcgttataaagaattcgggaagagtattcgccccaaaggatactgaatcagtcttcgaagcatgcgtcactatgataaacacgttagagtttatacactctcaaggatttacccatggaaaaatagaaccgaggaatatactgattagaaataaacgtctttcactaattgactattctagaactaacaaactatacaagagtggaaactcacatatagattacaacgaggacatgataacttcaggaaatatcaattatatgtgtgtagacaatcatcttggagcaacagtttcaagacgaggagatttagaaatgttgggatattgcatgatagaatggttcggtggcaaacttccatggaaaaacgaaagtagtataaaagtaataaaacaaaaaaaagaatataaaaaatttatagctactttctttgaggactgttttcctgaaggaaatgaacctctggaattagttagatatatagaattagtatacacgttagattattctcaaactcctaattatgacagactacgtaaactgtttatacaagattgaaattatattcttttttttatagagtgtggtagtgttacggatatctaatattaatattagactatctctatcgcgctacacgaccaatatcgattactatggatatcttctatgaaaggagagaatgtatttatttctccagcgtcaatctcgtcagtattgacaatactgtattatggagctaatggatccactgctgaacagctatcaaaatatgtagaaacggaggagaacacggataaggttagcgctcagaatatctcattcaaatccatgaataaagtatatgggcgatattctgccgtgtttaaagattcctttttgagaaaaattggcgataagtttcaaactgttgacttcactgattgtcgcactatagatgcaatcaacaagtgtgtagatatctttactgaggggaaaatcaatccactattggatgaaccattgtctcctagcaattagtgccgtatactttaaagcaaaatggttgacgccattcgaaaaggaatttaccagtgattatcccttttacgtatctccgacggaaatggtagacgtaagtatgatgtctatgtacggcaaggcatttaatcacgcatctgtaaaagaatcattcggcaacttttcaatcatagaactgccatatgttggagatactagtatgatggtcattcttccagacaagattgatggattagaatccatagaacaaaatctaacagatacaaattttaagaaatggtgtgactttatggatgctatgtttatagatgttcacattcccaagtttaaggtaacaggctcgtataatctggtggatactctagtaaagtcaggactgacagaggtgttcggttcaactggagattatagcaatatgtgtaatttagatgtgagtgtcgacgctatgatccacaaaacgtatatagatgtcaatgaagagtatacagaagcagctgcagcaacttctgtactagtggcagactgtgcatcaacaattacaaatgagttctgtgcagatcatccgttcatctatgtgattaggcatgttgatggaaaaattcttttcgttggtagatattgctctccgacaactaattgttaaccattttttttaaaaaaaatagaaaaaacatgtggtattagtgcaggtcgttgttcttccaattgcaattggtaagatgacggccaactttagtacccacgtcttttcaccacagcactgtggatgtgacagactgaccagtattgatgacgtcaaacaatgtttgactgaatatatttattggtcgtcctatgcataccgcaacaggcaatgcgctggacaattgtattccacactcctctcttttagagatgatgcggaattagtgttcatcgacattcgcgagctggtaaaaaatatgccgtgggatgatgtcaaagattgtacagaaatcatccgttgttatataccggatgagcaaaaaaccatcagagagatttcggccatcatcggactttgtgcatatgctgctacttactggggaggtgaagaccatcccactagtaacagtctgaacgcattgtttgtgatgcttgagatgctaaattacgtggattataacatcatattccggcgtatgaattgatgagttgtacatcttgacattttctttcttctcttctccctttcttctcttctcccttcctccctcttctccctttcccagaaacaaacttttttacccactataaaataaaatgagtatactacctgttatatttctttctatatttttttattcttcattcgttcagacttttaacgcgtctgaatgtatcgacaaagggcaatattttgcatcattcatggagttagaaaacgagccagtaatcttaccatgtcctcaaataaatacgctatcatccggatataatatattagatattttatgggaaaaacgaggagcggataatgatagaattataccgatagataatggtagcaatatgctaattctgaacccgacacaatcagactctggtatttatatatgcattaccacgaacgaaacctactgtgacatgatgtcgttaaatttgacaatcgtgtctgtctcagaatcaaatatagattttatctcgtatccacaaatagtaaatgagagatctactggcgaaatggtatgtcccaatattaatgcatttattgctagtaacgtaaacgcagatattatatggagcggacatcgacgccttagaaataagagacttaaacaacggacacctggaattattaccatagaagatgttagaaaaaatgatgctggttattatacatgtgttttagaatatatatacggtggcaaaacatataacgtaaccagaattgtaaaattagaggtacgggataaaataataccttctactatgcaattaccagatggcattgtaacttcaataggtagtaatttgactattgcatcgttgagacctcccacaacggatgcagacgtcttttggataagtaatggtatgtattacgaagaagatgatggggacggaaacggtagaataagtgtagcaaataaaatctatatgaccgataagagacgtgttattacatcccggttaaacattaatcctgtcaaggaagaagatgctacaacgtttacgtgtatggcgtttactattcctagcatcagcaaaacagttactgttagtataacgtgaatgtatgttgttacatttccatgtcaattgagtttataagaatttttatacattatcttccaacaaacaattgacgaacgtattgctatgattaactcccacgatactatgcatattattaatcattaacttgcagactatacctagtgctattttgacatactcatgttcttgtgtaattgcggtatctatattattaaagtacgtaaatctagctatagttttattatttaattttagataatataccgtctccttatttttaaaaattgccacatcctttattaaatcatgaatgggaatttctatgtcatcgttagtatattgtgaacaacaagagcagatatctataggaaagggtggaatgcgatacattgatctatgtagttttaaaacacacgcgaactttgaagaatttatataaatcattccatcgatacatccttctatgttgagatgtatatatccaggaattcgtttattaatatcgggaaatgtataaactaaaacattgcccgaaagcggtgcctctatctgcgttatatccgttcttaacttacaaaatgtaaccaatacctttgcatgacttgttttgttcggcaacgttagtttaaacttgacgaatggattaattacaatagcatgatccgcgcatctattaagtttttttactttaacgcccttgtatgtttttacagagactttatctaaatttctagtgcttgtatgtgttataaatataacgggatatagaaccgaatcacctaccttagatacccaattacattttatcagatccagataataaacaaattttgtcgccctaactaattctatattgttatatattttacaattggttatgatatcatgtaataacttggagtctaacgcgcatcgtcgtacgtttatacaattgtgatttagtgtagtatatctacacatgtatttttccgcactatagtattctggactagtgataaaactatcgttatatctatcttcaatgaactcatcgagatattgctctctgtcatattcatacacctgcataaactttctagacatcttacaatccgtgttattttaggatcatatttacatatttacgggtatatcaaagatgttagattagttaatgggaatcgtctataataatgaatattaaacaattatatgaggacttttaccacaaagcatcataaaaatgagtcgtcgtctgatttatgttttaaatatcaaccgcaaatcaactcataaaatacaagagaatgaaatatatacatattttagtcattgcaatatagaccatacttctacagaacttgattttgtagttaaaaactatgatctaaacagacgacaacctgtaactgggtatactgcactacactgctatttgtataataattactttacaaacgatgtactgaagatattattaaatcatggagtggatgtaacgatgaaaaccagtagcggacgtatgcctgtttatatattgcttactagatgttgtaatatttcacatgatgtagtgatagatatgatagacaaagataaaaaccacttattacatagagactattccaacctattactagagtatataaaatctcgttacatgttattaaaggaagaggatatcgatgagaacatagtatccactttattagataagggaatcgatcctaactttaaacaagacggatatacagcgttacattattattatttgtgtctcgcacacgtttataaaccaggtgagtgtagaaaaccgataacgataaaaaaggccaagcgaattatttctttgtttatacaacatggagctaatctaaacgcgttagataattgtggtaatacaccattccatttgtatcttagtattgaaatgtgtaataatattcatatgactaaaatgctgttgacttttaatccgaatttcgaaatatgtaataatcatggattaacgcctatactatgttatataacttccgactacatacaacacgatattcttgttatgttaatacatcactatgaaacaaatgttggagaaatgccgatagatgagcgtcgtatgatcgtattcgagtttatcaaaacatattctacacgtccggcagattcgataacttatttgatgaataggtttaaaaatataaatatttatacccgctatgaaggaaagacattattacacgtagcatgtgaatataataatacacacgtaatagattatcttatacgtatcaacggagatataaatgcgttaaccgacaataacaaacacgctacacaactcattatagataacaaagaaaattccccatataccattaattgtttactgtatatacttagatatattgtagataagaatgtgataagatcgttggtggatcaacttccatctctacctatctttcgtcgcttatcatactagtcatatcctaaatgttgatcatattccaccaaatgattgtgaaagagattgagattaaatcgtctaacaaacaattagtttttatgacattaacatataataaataaattaatcattattgacttaacgatgacgaaagttatcatcatcttaggattcttgattattaatacaaattcattgtctatgaaatgtgaacaaggtgtctcatattataattcacaagaattaaagtgttgtaaactatgtaagccaggaacatattcagatcatcgatgtgataaatacagcgataccatttgtggacattgtccgagtgacacattcacgtcaatatataatcgttctccttggtgtcatagttgtagaggtccatgtggtactaatcgagtagaggtcacaccttgtacacctaccacaaatagaatctgtcattgtgactcgaatagttattgtctccttaaagcttctgatggtaactgtgttacatgtgctcctaaaacaaaatgtggtcgtgggtatggaaagaaaggagaagatgaaatgggtaataccatttgtaagaaatgtcggaagggtacttattcagatattgtatctgactctgatcaatgtaaaccaatgacaagataagacttactcgcatctactggatagacataaaatatcctcctcgtaataatgaaatataaatatacactaattattaatatcaataacaatcgagtattaatatataggtcatttttaaatcccttttgggttccgtcccaaacggcgtttcggtctgcgtcgccgccatggccatgccgagcctctccgcgtgctcctccatcgaggacgacttcaactatggcagctcggtggcgtctgccagcgtgcacatacgaatggcatttctaagaaaagtctacggtatcctttgtctacaatttcttttaacaacggcaacaactgcagtatttttatactttgactgcatgcggacatttatacaagggagtcctgttctaatattggcatcaatgttcggatctataggcttgattttcgcattgactttacacagacataaacatcccctgaatctgtacctgctttgtggatttacactgtcggaatctctaacgctggcctctgttgttactttctatgatgtgcatgtcgttatgcaagctttcatgctgactactgcagcgtttcttgctctgactacatatactctacaatcaaagagagatttcagtaaacttggagcaggattgtttgctgctttgtggattttaattttgtcaggactcttggggatatttgtgcaaaatgagacagtggagctggtcctgtctgcttttggggcccttgtattctgtggattcattatctatgacacgcactcactaatacataagctctcgcctgaagagtatgtgttagcctctatcaatctctacttggatatcatcaatctgttcttgcatctgttgcagcttttggaagtatctaataagaaataaagtttaaaatagaattaataaaaacatataggtcattttttaaacatggattggaaaccaaggtagttagttaatacacacaagatatatttttttcacatcatccacccatgggtaacaccaaggttgttagttaataatatacaagatattttttctcactctgatccatgtaaaccaaggacgagataagacactctcattcctcatccacaacccattaaaaaaatggaaattaaagccctctattagcataaacggctacaggtctaccatcaggttaaccttcgtctaccttcacaatggcctttccttgtgcccagttcagaccctgtcattgccacgctactaaggactccctgaataccgtggccgacgtcagacattgtctgactgaatacatcctgtgggtttctcatagatggacccatagagaaagcgctcatctgttctccgtgtggtctcggaacatattctcacaccgtctcttccgcagataaatgcgaacccgtacccagaaatacctttaactatatcgatgtggaaattaatctgtatcccgtcaacgacacatcgtgtactcggacgaccactaccggtctcagcgaatccatctcaacgtcggaactaactattactatgaatcataaagactgtaatcccgtctttcgtgatggatacttctccgttcttaataaggtagcgacttcaggtttctttacaggagaaaggtgtgcactctgaatttcgagattaaatgcaataacaaagattcttcctccaaacagttaacgaaagcaaagaatgatactatcatgccgcattcggagacagtaactctagtgggcgacatctatatactatatagtaataccaatactcaagactacgaaactgatacaatctcttatcatgtgggtaatgttctcgatgtcgatagccatatgcccggtagttgcgatatacataaactgatcactaattccaaacccacccactttttatagtaagtttttcacccataaataataaatacaataattaatttctcgtaaaagtagaaaatatattctaatttattgcacggtaaggaagtagaatcataaagaacagtactcaatcaatagcaattatgaaacaatatatcgtcctggcatgcatgtgcctggcggcagctgctatgcctgccagtcttcagcaatcatcctcatcctcctcctcgtgtacggaagaagaaaacaaacatcatatgggaatcgatgttattatcaaagtcacaaagcaagaccaaacaccgaccaatgataagatttgccaatccgtaacggaaattacagagtccgagtcagatccagatcccgaggtggaatcagaagatgattccacatcagtcgaggatgtagatcctcctaccacttattactccatcatcggtggaggtctgagaatgaactttggattcaccaaatgtcctcagattaaatccatctcagaatccgctgatggaaacacagtgaatgctagattgtccagcgtgtccccaggacaaggtaaggactcatgaagaagctcttgctatgatcaaagactgtgaggtgtctatcgacatcagatgtagcgaagaagagaaagacagcgacatccagtactcgggtctaacatctctcataagaaagtgagttacgaagatatcatcggttcaacgatcgtcgatacaaaatgtgtcaagaatctagagtttagcgttcgtatcggagacatgtgcaaggaatcatctgaacttgaggtcaaggatggattcaagtatgtcgacggatcggcatctgaaggtgcaaccgatgatacttcactcatcgattcaacaaaactcaaagcgtgtgtctgaatcgataactctattcatctgaaattggatgagtagggttaatcgaacgattcaggcacaccacgaattaaaaaagtgtaccggacactatattccggtttgcaaaacaaaaatgttcttaactacattcacaaaaagttacctctcgcgacttcttctttttctgtctcaatagtgtgatacgattatgacactattcctattcctattcctatttcctttcagagtatcacaaaaatattaaacctctttctgatggtctcataaaaaaagttttacaaaaatatttttattctctttctctctttgatggtctcataaaaaaagttttacaaaaatatttttattctctttctctctttgatggtctcataaaaaaagttttacaaaaatatttttattctctttctctctttgatggtctcataaaaaaagttttacaaaaatatttttattctctttctctctttgatggtctcataaaaaaagttttacaaaaatatttttattctctttctctctttgatggtctcataaaaaaagttttacaaaaatatttttattctctttctctctttgatggtctcataaaaaaagttttacaaaaatatttttattctctttctctctttgatggtctcataaaaaaagttttacaaaaatatttttattctctttctctctttgatggtctcataaaaaaagttttacaaaaatatttttattctctttctctctttgatggtctcataaaaaaagttttacaaaaatatttttattctctttctctctttgatggtctcataaaaaaa

SEQ ID NO: 21 - DNA, 193964 bp, Artificial Sequence
  LIVP 2.1.1
gagatagttagtctagatatttttcttagtacaaaagtcaatgttttaaaatatatggacaagaatttgtctgtataaaaacttgtgtgaaattttgtaccaaagaaaaaatgtgagcagtatcccctacatggattttactagatcatttatataccaaaaaatattatacgatctacgttttattatatgattttaacgtgtaaattataaacattattttatgatatacaattgtctggtaacctagatgggcataggggatgttgataagctcgacgagtatatgttgttggacgttattgtttaagaaatagttgatgcatcagaaagagaataaaaaatattttagtgagaccatcgaagagagaaagagataaaacttttttacgactccatcagaaagaggtttaatatttttgtgagaccatcgaagagagaaagagaataaaaatattttatgactccattgaagagagaaaaagaaaatgagaatgagaataaaaatattttagtgacaccatcagaaagaggtttaatatttttgtgagaccatcgaagagagaaagagaataaaaatattttatgactccattgaagagagaaagagaaaatgagaatgagaataaaaatattttagtgacaccatcagaaagaggtttaatattttttatgagaccatcaaagagagaaagaaaataaaaatatttttgtaaaactttttttatgagaccatcaaagagagaaagagaataaaaatatttttgtaaaactttttttatgagaccatcaaagagagaaagagaataaaaatatttttgtaaaactttttttatgagaccatcaaagagagaaagagaataaaaatatttttgtaaaactttttttatgagaccatcaaagagagaaagagaataaaaatatttttgtaaaactttttttatgagaccatcaaagagagaaagagaataaaaatatttttgtaaaactttttttatgagaccatcaaagagagaaagagaataaaaatatttttgtaaaactttttttatgagaccatcaaagagagaaagagaataaaaatatttttgtaaaactttttttatgagaccatcaaagagagaaagagaataaaaatatttttgtaaaactttttttatgagaccatcaaagagagaaagagaataaaaatatttttgtaaaactttttttatgagaccatcaaagagagaaagagaataaaaatatttttgtaaaactttttttatgagaccatcagaaagaggtttaatatttttgtgatactctgaaaggaaataggaataggaataggaatagtgtcataatcgtatcacactattgagacagaaaaagaagaagtcgcgagaggtaactttttgtgaatgtagttaagaacatttttgttttgcaaaccggaatatagtgtccggtacacttttttaattcgtggtgtgtctgaatcgttcgattaaccctactcatccaatttcagatgaatagagttatcgattcagacacacgctttgagttttgttgaatcgatgagtgaagtatcatcggttgcaccttcagatgccgatccgtcgacatacttgaatccatccttgacctcaagttcagatgattccttgcacatgtctccgatacgaacgctaaactctagattcttgacgcattttgtatcgacgatcgttgaaccgatgatatcttcgtaactcactttcttatgagagatgttagacccgagtactggatgggtcttgatgtcgctgtctttctcttcttcgctacatctgatgtcgatagacacttcacagtctttgatcatagcaagagcttcttcatgagtgatcgcgggagagtccttaccttgtcctggggacacgctggacaatctagcattcactgtgtttccatcagcggattctgagatggatttaatctgaggacatttggtgaatccaaagttcattctcagacctccaccgatgatggagtaataagtggtaggaggatctacatcctcgactgatgtggaatcatcttctgattccacctcgggatctggatctgactcggactctgtaatttccgttacggattggcaaatcttatcattggtcggtgtttggtcttgctttgtgactttgataataacatcgattcccatatgatgtttgttttcttcttccgtacacgaggaggaggatgaggatgattgctgaagactggcaggcatagcagctgccgccaggcacatgcatgccaggacgatatattgtttcataattgctattgattgagtactgttctttatgattctacttccttaccgtgcaataaattagaatatattttctacttttacgagaaattaattattgtatttattatttatgggtgaaaaacttactataaaaagtgggtgggtttggaattagtgatcagtttatgtatatcgcaactaccgggcatatggctatcgacatcgagaacattacccacatgataagagattgtatcagtttcgtagtcttgagtattggtattactatatagtatatagatgtcgcccactagagttactgtctccgaatgcggcatgatagtatcattctttgctttcgttaactgtttggaggaagaatctttgttattgcatttaatctcgaaattcagagtgcacacctttctcctgtaaagaaacctgaagtcgctaccttattaagaacggagaagtatccatcacgaaagacgggattacagtctttatgattcatagtaatagttagttccgacgttgagatggattcgctgagaccggtagtggtcgtccgagtacacgacgtgtcgttgacgggatacaggttaatttccacatcgatatagttaaaggtattactgggtacgggttcgcatttatctgcggaagagacggtgtgagaatatgttccgagaccacacggagaacagatgacgtctccggatactccgtatcctattctacattttgtttgggaaacacatgccttgcatccggatgatcctttgagaagacaataatatccgggagagcattcacagattctattgtgagtcgtgttacacgatcgcgtcttccgttacaacttagacaagcgggtaaatgattattgcgagatgtgaaggtacccgaaccacacggcgtacattgtgtgttagtcttgctatcgcataatctggaagcgtatgttcccggacacaaattatggcgtttgtattcgttgtctttacactttccatcggatggtgcatgcggtgctatatctcttccgtttattattatacatgagagaaacaatatatacgagtataatacggacttcatgatttaataatgtagtaatcgtcgtcttgttcctgtttcctacttctccaatcatatagatattttctttctatcatggataatatttgtaatggttctttccgtacaacatactgtttagatgatattgcgcataatttccggaggcaaatacgatagtctagattgaccgatggtagactctaatttattgagtgctttgtcgacgagtttacttttacgctccatcgatagatggcactgttctatgagatcgtcgtacatgggaaatgaaatgtgactgtctgaatgtatggctttaagatagctgtgataccgtatacaggtcggtgtcggagattcgaatctctttaaggcgacttatgtcacgatgatggaatctatcttatcgaatgatatatttttcataaatacacttttatagtcctcgtttaaacagaatttactatgtagttccgcgaatgactcgtcccttaataggcagtaggctagtatcttttttacgtagtaatcgtcgtagggagagacatcttgtagaacaacgatttaatcataggtagagatactttcagtctgtggtggatgatgtcattcacaacatccgccttgtatatgatgtttctgttttcaaacaccaagtcgaataccgtctttagtcggaaggttgatgtcgtatccgatgtatgaggcaacattgttgttacaattttgaaaggcggtattatagtattcgtctttctgaatgtcgaacctatctaatagataccgtagtatattgagagtgtatccttgattatgttttatgaatagataaagtagatgttgtccttcttccttttgttcgtgccaattgagtaacattatgagaatatgacctgttgcacaatcgttccatgatgggtgtacaatcaagattattacgtatcctcgtatcggctcctcgagataaaagagcatacaccacacgaggactatgtttggtatactgttgaaggtaagtgtgtaaccgcgttaatgtttgctccataatctattatcgcgtagatgaatcgcttctcggctcgcatcttagtgtgacttaacttgtaataattgctttcgtagaacgtggatatgtgtttacagtagtaatgaagagaagtgagttcatcctcgtcggcgcaattagggtcggatcctttgtacagaacgtaatagtttaagctcccattgaatttatatctaagataacacagcaatagatcggatgatttactaaagtcatcaatggtgtccgttagtatatcaaagatcttgttatcgattgatagtggtcatccttgctatcaaagttacgcatgccgtggtgtaacaatatctttaatacagatggattaaatcgtgtattcatcgtatagcaatgtaatggagagttacctcgtttattcagatcgcagtgtttaataactagcttaaacagatgagacgatgtatccacatcaaagaacgtaaaatacatatgacagacattgttgacagaaacgtgaccttcattcttaccgtcgtccataaatacgttaggtatgtaccacatactgtcgcgaacgatgcgtacaatctcgtccatctcataatgatttactttttcataattaaagatgtgaaagaaaaccgaacaatatatttttttagtaatgtttatgcgagacatataaaataaactccgtgtttatgatgccggtaaatgtttttatcatcttggacggaatcgattttgtaatatgtcatggaaacaaatgaaacaggacattatcgctccatgataaattatttaatggagtaataaagtatctccatgggtaatttcgaaatcaagttatcgtctgtattaatgttgtccactatggagtcgatcctctcattgttctttacagtttctgtaatgatggacgttagttcttttttgtaccatttgatgtcggattctttgcgtatctcaatttgtggcgtttgcttcgtttaaataatatatcaaacatggagacgcctgatatgtagacattcttcattctattaatgtctactctatagcgctttagttccttatgacgaccggcgatatcatactttactttagaaggaaaatcatcatctaggattaaggcgtatctgatacaggcgaataatggttcaggatatagatagcgtatatctctattaaatgcgtcaatcatagtctctagagtgggatggtaactcagtaataaatcaactagcttcgttttgttttctctttggtaactgcttttctggatggccgtattgattatcgagcgtgacactcgctccatattccaataaccgctttgcaaattgtatattattgacatcgaccgcgtaatatagtagagttatcgatcatatctatatcatccatgtacttgcttagtatatcaaatacatctatcagtatggtttcataacagtgatacccgcaattattaaatctcgataatatcagaccgtacatacatagacggccattgttcgatacgtgatttacagccgcgtgtccatattttccacgataaaccttacgacgtttacatcgacgagattattattaacaaagtagtcgtgcagaggatagttgttgtccgttatctaacatgcatcgaacgaccatatcgccgtaatgtaagtagtttatcaacatggcttgtacatcctgttgtctaaatctctttagaatgttatcgatgatgtagtggttatattctctggaatcgtacgaagtaatactacgcattacgtcgacaagagtatgacgtctctcaataagaagattaacgatttccatgtctacattatatggggttactctaaatcgcttgtttagataatatagggctgacgtcgtatactctacacgtgtccacatcctttattaataataatttaacaatctctatatctatggttgagaaagaccagtagtattggatgggtaaagatcctccttcgtctctgccatggatggaaacattgttatcgatcaaacatttaattacatccttggatagagattgagattctctatgagacgatatatagtaatgaagagagttcttacacatatcactgtcgtacatacaggtacgaaatacgtaaccggtgctgtaacattctgatttaagaagccatagcaatacttctggtctcggattaggcgtcgttacgtatatatccaccaatccgagaccattgattgcataattcgtattcttggacggacgtatccgtttatccacaattaggtattttagcagacgtaagtcgatattatccgaatacagatcgaaatcatttatattcgacttgagttcgttagaggaatttgaatagctggatatcagtagatgcacaatctgagatttgacgtatctatgcttactgtatactcctagcggagttaatccttcgttgtttctacaaagtctctcgactccgcgagagaacaatcttaatgtctgtatcgcatttattggagacgtaacaatgtagcgcattgtttcctcgtctatctatatgttttgataagttgtgacacgtttcaatttctagttttatttttttgtacgtcacatcttcatccagtagacgacatagaatagtgcactctctaccacaataatccatagctattctggtgctaattattcctatttcacgaaggcaatcattcctcataagatgataaaaagtgtagtggagatttagtatttagcagtgcggatatgatccaagagggtgagatagtcgttctcgttcagaatctttcgcagcataagtagtatgtcgatatacttatcgttgaagactctttataaaagtctatttgtttatatttattgcggatagcagtatttccctataaaaagtatacgtcctgtggtgtctttaatcatgtacatgaatggatggtttatgtagaccttcgtacgatataccatcgaaaagttaatcgtaaatactcctgtaacggccgatgcttctgtatactcctcattaacatctataaacgtcgtatgtagaaatttttctacagtgatagtttcattacacatcttgctaaaatctgcataatatccgaatatattagtaagtcctaaattttctaaaatcggtaccagattatacggttctgtcatttccactttaaactttggcatatacaagtctatacttttagtagataacataccacaccattttttaaatttttcatctgttatatttttttctatgttatatataccttctatgtcgtccggtagtataattaccatactagagtttccctcgtatggaatatcgataatagagaatcctccgaataattcattaatatgtacatattgcaagttattctcggtacccaccatcatatcaacgctggtaactatattcttagaaatataaaacttgtctgtatatgtaagatgtttagaaaatggatatttccacattgctttaaaatggacggcgctaacaactgtcatacgagtattaatggatagcggactagtcaataaggaattaattttaccatttgtcattgtcttaacccattcgttgattagttcctttgtttggttagcattattaaagtttacagtttgaaaatcgtcttttattttttgtaggaaggaggcgtggaactcgatactatcgctaccgtatattttatttgcggtagctagtgtcgcacaatacggaatatctacctccatgtcatcattattgtcatcgggtgtattctcattcatattctctatatattttgatagttgttcagctgtagaaccagctgctccatgatttagaatagataaagtagataaaatggaaactggagaaatcaaaacattttcatcagggtgttttaagattagttctttaaagatatccatggtatagacctaacgataacgatatatatcataaataaataatgttaaatttcaatttatgtttgtaccccgtattcatacttaacaaattggtattgcgtacacaatcaatcatattacataccattaataatgcaagcataaaaaattgttagtagatgtttctaaatataggttccgtaagcaaagaatataagaatgaagcggtaatgataaaatcaatcgttatctaaaatgatcatactcatttattttattctattatattaacacatacatttttaacagcaacacattcaatattgtattgttatttttatattatttacacaattaacaatatattattagtttatattactgaattaataatataaaattcccaatcttgtcataaacacacactgagaaacagcataaacacagaatccatcaaaaatgttgataaattatctgatgttgttgttcgctgctatgataatcagatcattcgccgatagtggtaacgctatcgaaacgacattgccagaaattacaaacgctacaacagatattccagctatcagattatgcggtccagagggagatggatattgtttacacggtgactgtatccacgctagagatattgacggtatgtattgtagatgctctcatggttatacaggcattagatgtcagcatgtagtattagtagactatcaacgttcagaaaacccaaacactacaacgtcatatatcccatctcccggtattatgcttgtattagtaggcattattatgtgttgtctattatctgtttataggttcactcgacgaactaaactacctatacaagatatggttgtgccataatttttataaattttttttatgagtatttttacaaaaatgtataaagtgtatgtcttatgtatatttataaaaatgctaagtatgcgatgtatctatgttatttgtatttatctaaacaatacctctacctctagatattatacaaaaattttttatttcggcatattaaagtaaaatctagttaccttgaaaatgaatacagtgggtggttccgtatcaccagtaagaacataatagtcaaatacagtatccgattgagattttgcatacaatactagtctagaaagaaatttgtaatcatcttctgtgacgggagtccatatatctgtatcatcgtctagtttatcagtgtcccatgctatattcctgttatcatcattagttaatgaaaataactctcgtgcttcagaaaagtcaaatattgtatccatacatacatctccaaaactatcgcttatacgtttatctttaacgatacctatacctagatggttatttactaacagacattttccagatctattgactataactcctatagtttccacatcaaccaagtaatgatcatctattgttatataacaataacataactcttttccatttttatcagtatgtatatctatatcaacgtcgtcgttgtagtgaatagtagtcattgatctattatatgaaacggatatgtctagaacggcaattgttttacgtccagttaacactttcgttgatttaaagtctagagtctttgcaaacataatatccttatccgactttatatttcctgtagggtggtataattttattttgcctccacatatcggtgtttccaaatatattactagacaatattccatatagttattagttaagggtacccaattagaacacgtacgcttattatcatcatttggatcgtatttcataaaagttattgtgttatcgatgtcaacacattctacattttttaatcgtctatatagtatttttctgatattttctataatatcagaattgtcttccatcggaagttgtatactatcggaatcagttacatgtttaaataattctctgatgtcattccttatacaatcaaattcattattaaacagtttaatagtctgtagacctttatcgtcgtaaatatccattgtcttattagttacgcttatttttatgtgttttacgttgctttattatattttataagaatgattgtttgacgaatcacgagaactattaagacacattattaggtatatattataaaaaagtttttgattacgatgttataagaggaaagaggacacattaacatcatacatcaattaactacattcttataacatcgtaatcaaaagaattgcaattttgatgtataacaactgtcaatgggttatggaattgtatattacatattatacggtatgttggtaacgacaaataccggtcggtaattgtctgccggtgtaatagaattatatatatctatctattacaccggccttgtatacataataataagttgtggtagtatgatctccatatttataatttaggactttgtattcagtatttttggaatcataaaaaataaaaaaaagttttactaatttaaaatttaaaaagtatttacatttttttcactgtttagtcgcggatatggaattcgatcctgccaaaatcaatacatcatctatagatcatgtaacaatattacaatacatagatgaaccaaatgatataagactaacagtatgcattatccgaaatattatatcaatatcacaaaaataaatacacatttggctaatcaatttcgggcttggaaaaaacgtatcgccggaagggactatatgactaacttatctagagatacaggaatacaacaatcaaaacttactgaaactatacgtaactgtcaaaaaaatagaaacatatatggtctatatatacactacaatttagttattaattggataaccgatgtgattatcaatcaatattaagagggttggtaaattggtacatagctaataatacctatactccaaatacacccaataatacaacaaccatttctgagttggatatcatcaaaatactggataaatacgaggacgtgtatagagtaagtaaagaaaaagaatgtggaatttgctatgaagttgtttactcaaaacgatagatactttggtttattggattcgtgtactcatatattttgcataacatgcatcaatatatggcataaaacacgaagagaaaccggtgcgtcggataattgtcctatatgccgtacccgttttagaaacataacaatgagcaagttctataagctagttaactaataaataaaaagtttaatttgttgacgacgtatgtcgttattttttctcgtataaaagattaatttgattctaatataatctttagtattggataaatatcaattcaaattaattccattagattatatcataaataaaaatagtagcacgcactacttcagccaaatattcttttttgaaacgccatctatcgtagtgaggacacaagtgaacctataattatcaaatttattagtatcagtcacatgaaggactttacgtagagtgacgattccactatctgtggtacgaacggtttcatcttctttgatgccatcacccagatgttctataaacttggtatcctcgtccgatctcatatcctttgccaaccaatacatgtagctaaaattaggcataaatttcacacatcctgaacaatgaaattctccagaagatgttacaatgtctagatttggacatttggtttcaaccgcgttaacatatgagtgaacacacccatacatgaaagcgatgagaaataggattctcatcttgccaaaatatcactagaaaaaatttatttatcaattttaaaggtataaaaaatacttattgttgctcgaatattttgtatttgatggtatacggaagattagaaatgtaggtattatcatcaactgattctatggttttatgtattctatcatgtttcactattgcgttggaaataatatcatatgcttccacatatattttattttgttttaactcataatactcacgtaattctggattattggcatatctatgaataattttagctccatgatcagtaaatattaatgagaacatagtattaccacctaccattatttttttcatctcattcaattcttaattgcaaagatctatataatcattatagcgttgacttatggactctggaatcttagacgatgtacagtcatctataatcatggcatatttaatacattgttttatagcatagtcgttatctacgatgttagatatttctctcaatgaatcaatcacacaatctaatgtaggtttatgacataatagcattttcagcagttcaatgtttttagattcgttgatggcaatggctatacatgtatatccgttatttgatctaatgttgacatctgaaccggattctagcagtaaagatactagagattgtttattatatctaacagccttgtgaagaagtgtttctcctcgtttgtcaatcatgttaatgtctttaagataaggtaggcaaatgtttatagtactaagaattgggcaagcataagacatgtcacaaagaccctttttgtatgtataagtgtagaaattataacatccatagttggatttacataggtgtccaatcgggatctctccatcatcgagataattgatggcatctcccttccttttttagtagatatttcatcgtgtaagaatcaatattaatatttctaaagtatccgtgtatagcctctttatttaccacagttccatattccactagagggatatcgccgaatgtcatatactcaattagtatatgttggaggacatccgagttcattgttttcaatatcaaagagatggtttccttatcatttctccatagtggtacaatactacacattatttcgtgcggctttccattttccaaaaacaatttgaccaaatctacatctttattgtatctataatcactatttagataatcagccataattcctcgagtgcaacatgttagatcgtctatatatgaataagccgtgttatctattcctttcattaacaatttaacgatgtctatatctatatgagatgacttaatataatattgaagagctgtacaatagtttttatctataaaagacggcttgattccgtgattaattagacatttaacaacttccggacgcacatatgctctcgtatccgactctgaatacagatgagagatgatatacagatgcaatacggtaccgcaatttcgtagttgataatcatcatacgcgtatcagtactcgtcctcataaagaacactgcagccattttctatgaacaaatcaataatttcaggaacaggatcatctgtcattacataattttctataactgaacgatggttttcacatttaacactcaagtcaaatccatgttctaccaacacctttatcaagtcaacgtctacatttttggatttcatatagctgaatatattaaagttatttatgttgctaaatccagtggcttctagtagagccatcgctatatccttattaactttaacatgtctactatttgtgtattcttctaatggggtaagctgtctccaatttttgcgtaatggattagtgccactgtctagtagtagtttgacgacctcgacattattacaatgctcattaaaaaggtatgcgtgtaaagcattattcttgaattggttcctggtatcattaggatctctgtctctcaacatctgtttaagttcatcgagagccacctcctcattttccaaatagtcaaacattttgactgaatgagctactgtgaactctatacacccacacaactaatgtcattaaatatcatgtcaaaaacttgtacaattattaataaaaataatttagtgtttaaattttaccagttccagattttacacctccgttaatacctccattaaccccactggacgatcctcctccccacattccaccgccaccagatgtataagttttagatcctttattactaccatcatgtccatggataaagacactccacatgccgccactaccccctttagaagacatattaataagacttaaggacaagtttaacaataaaattaatcacgagtaccctactaccaacctacactattatatgattatagtttctatttttacagtaccttgactaaagtttctagtcacaagagcaatactaccaacctacactattatatgattatagtttctatttttataggaacgcgtacgagaaaatcaaatgtctaatttctaacggtagtgttgataaacgattatcgtcaatggatacctcctctatcatgtcgtctattttcttactttgttctattaacttattagcattatatattatttgattataaaacttatattgcttattagcccaatctgtaaatatcggattattaacatatcgtttctttgtaggtttatttaacttgtacatcactgtaagcatgtccttaccatttattttaatttgacgcatatccgcaatttctttttcgcagtcggttataaattctatatatgatggatacatgctacatgtgtacttataatcgactaatatgaagtacttgatacatatttccagtaacgatttattattaccacctatgaataagtacctgtgatcgtctaggtaatcaactgttttcttaatacattcgatggttggtaatttactcagaataatttccaatatcttaatatataattctgctatttctgggatatatttatctgccagtataacacaaatagtaatacatgtaaacccatattttgttattatattaatgtctgcgccattatctattaaccattctactaggctgacactatgcgactcaatacaatgataaagtatactacatccatgtttatctattttgtttatatcattaatatacggcttacaaagttttagtatcgataacacatccaactcacgcatagagaaggtagggaataatggcataatatttattaggttatcatcattgtcattatctacaactaagtttccattttttaaaatatactcgacaactttaggatctctattgccaaatttttgaaaatatttatttatatgcttaaatctatataatgtagctccttcatcaatcatacatttaataacattgatgtatactgtatgataagatacatattctaacaatagatcttgtatagaatctgtatatcttttaagaattgtggatattaggatattattacgtaaactattacacaattctaaaatataaaacgtatcacggtcgaataatagttgatcaactatataattatcgattttgtgatttttcttcctaaactgtttacgtaaatagttagatagaatattcattagttcatgaccactatagttactatcgaataacgcgtcaaatatttcccgtttaatatcgcatttgtcaagataataatagagtgtggtatgttcacgataagtataataacgcatctctttttcgtgtgaaattaaatagtttattacgtccaaagatgtagcataaccatcttgtgacctagtaataatataataatagagaactgttttacccattctatcatcataatcagtggtgtagtcgtaatcgtaatcgtctaattcatcatcccaattataatattcaccagcacgtctaatctgttctattttgatcttgtatccatactgtatgttgctacatgtaggtattcctttatccaataatagtttaaacacatctacattgggatttgatgttgtagcgtatttttctacaatattaataccatttttgatactatttatttctatacctttcgaaattagtaatttcaataagtctatatcgatgttatcagaacatagatattcgaatatatcaaaatcattgatatttttatagtcgactgacgacaataacaaaatcacgacatcgtttttgatattattatttttcttggtaacgtatgcctttaatggagtttcaccatcatactcatataatggatttgcaccactttctatcaatgattgtgcactgctggcatcgatgttaaatgttttacaactatcatagagtatcttatcgttaaccatgattggttgttgatgctatcgcattttttggtttctttcatttcagttatgtatggatttagcacgtttgggaagcatgagctcatatgatttcagtactgtagtgtcagtactattagtttcaataagatcaatctctagatctatagaatcaaaacacgataggtcagaagataatgaatatctgtaggcttcttgttgtactgtaacttctggttttgttagatggttgcatcgtgctttaacgtcaatggtacaaattttatcctcgctttgtgtatcatattcgtccctactataaaattgtatattcagattatcatgcgatgtgtatacgctaacggtatcaataaacggagcacaccatttagtcataaccgtaatccaaaaatttttaaagtatatcttaacgaaagaagttgtgtcattgtctacggtgtatggtactagatcctcataagtgtatatatctagagtaatgtttaatttattaaatggttgataatatggatcctcgtgacaatttccgaagatggaaataagacataaacacgcaataaatctaattgcggacatggttactccttaaaaaaatacgaataatcaccttggctatttagtaagtgtcatttaacactatactcatattaatccatggactcataatctctatacgggattaacggatgttctatatacggggatgagtagttctcttctttaactttatactttttactaatcatatttagactgatgtatgggtaatagtgtttgaagagctcgttctcatcatcagaataaatcaatatctctgtttttttgttatacagatgtattacagcctcatatattacgtaatagaacgtgtcatctaccttattaactttcaccgcatagttgtttgcaaatacggttaatcctttgacctcgtcgatttccgaccaatctgggcgtataatgaatctaaactttaattgcttgtaatcattcgaaataatttttagtttgcatccgtagttatcccctttatgtaactgtaaatttctcaacgcgatatctccattaataatgatgtcgaattcgtgctgtatacccatactgaatggatgaacgaataccgacggcgttaatagtaatttactttttcatctttacatattgggtactagttttactatcataagtttataaattccacaagctactatggaataagccaaccatcttagtataacacacatgtcttaaagtttattaattaattacatgttgttttatatatcgctacgaatttaaacagagaaatcagtttaggaaaaaaaattatctatctacatcatcacgtctctgtattctacgatagagtgctactttaagatgcgacagatctgtgtcatcaaatatatactccattaaaatgattattccggcagcgaacttgatattggatatatcacaacctttgttaatatctacgacaatagacagcagtcccatggttccataaacagtgagtttatctttctttgaagagatattttgtagagatcttataaaactgtcgaatgacatcgcatttatatttttagctaaatcgtatatgttaccatcgtaatatctaaccgcgtctatcttaaacgtttccatcgctttaaagacgtttccgatagatggtctcatttcatcagtcatactgagccaacaaatataatcgtgtataacatctttgatagaatcagactctaaagaaaacgaatcggctttattatacgcattcatgataaacttaatgaaaaatgtttttcgttgtttaagttggatgaatagtatgtcttaataattgttattatttcattaattaatatttagtaacgagtacactctataaaaacgagaatgacataactaatcataactagttatcaaagtgtctaggacgcgtaattttcatatggtatagatcctgtaagcattgtctgtattctggagctattttctctatcgcattagtgagttcagaatatgttataaatttaaatcgaataacgaacataactttagtaaagtcgtctatattaactcttttattttctagccatcgtaataccatgtttaagatagtatattctctagttactacgatctcatcgttgtctagaatatcacatactgaatctacatccaattttagaaattggtctgtgttacatatctcttctatattattgttgatgtattgtcgtagaaaactattacgtagaccattttctttataaaacgaatatatagtactccaattatctttaccgatatatttgcacacataatccattctctcaatcactacatctttaagattttcgttgttaagatatttggctaaactatataattctattagatcatcaacagaatcagtatatatttttctagatccaaagacgaactctttggcgtcctctataatattcccagaaaagatattttcgtgttttagtttatcgagatctgatctgttcatatacgccatgattgtacggtacgttatgataaccgcataaaataaaaatccattttcatttttaaccaatactattcataattgagattgatgtaatactttgttactttgaacgtaaagacagtacacggatccgtatctccaacaagcacgtagtaatcaaatttggtgttgttaaacttcgcaatattcatcaatttagatagaaacttatactcatcatctgttttaggaatccatgtattattaccactttccaacttatcattatcccaggctatgtttcgtccatcatcgttgcgcagagtgaataattcttttgtattcggtagttcaaatatatgatccatgcatagatcggcaaagctattgtagatgtgatttttcctaaatctaatataaaactcgtttactagcaaacactttcctgatttatcgaccaagacacatatggtttctaaatctatcaagtggtggggatccatagttatgacgcagtaacatatattattacattcttgactgtcgctaatatctaaatatttattgttatcgtattggattctgcatatagatggcttgtatgtcaaagatatagaacacataaccaatttatagtcgcgctttacattctcgaatctaaagttaagagatttagaaaacattatatcctcggatgatgttatcactgtttctggagtaggatatattaaagtctttacagatttcgtccgattcaaataaatcactaaataatatcccacattatcatctgttagagtagtatcattaaatctattatattttatgaaagatatatcactgctcacctctatatttcgtacatttttaaactgtttgtataatatctctctgatacaatcagatatatctattgtgtcggtagacgataccgttacatttgaattaatggtgttccattttacaacttttaacaagttgaccaattcatttctaatagtatcaaactctccatgattaaatattttaatagtatccattttatatcactacggacacaaagtagctgacataaaccattgtataatttttatgttttatgtttattagcgtacacattttggaagttccggcttccatgtatttcctggagagcaagtagatgatgaggaaccagatagtttatatccgtacttgcacttaaagtctacattgtcgttgtatgagtatgatcttttaaacccgctagacaagtatccgtttgatattgtaggatgtggacatttaacaatctgacacgtgggtggatcggaccattctcctcctgaacacaggacactagagttaccaatcaacgaatatccactattgcaactataagttacaacgctcccatcggtataaaaatcctcgtatccgttatgtcttccgttggatatagatggaggggattggcatttaacagattcacaaataggtgcctcgggattccataccatagatccagtagatcctaattcacaatacgatttagattcaccgatcaactgatatccgctattacaagagtacgttatactagagccaaagtctactccaccaatatcaagttggccattatcgatatctcgaggcgatgggcatctccgtttaatacattgattaaagagtgtccatccagtacctgtacatttagcatatataggtcccattttttgctttctgtatccaggtagacatagatattctatagtgtctcctatgttgtaattagcattagcatcagtctccacactattcttaaatttcatattaatgggtcgtgacggaatagtacagcatgatagaacgcatcctattcccaacaatgtcaggaacgtcacgctctccaccttcatatttatttatccgtaaaaatgttatcctggacatcgtacaaataataaaaagcccatatatgttcgctattgtagaaattgtttttcacagttgctcaaaaacgatggcagtgacttatgagttacgttacactttggagtctcatctttagtaaacatatcataatattcgatattacgagttgacatatcgaacaaattccaagtatttgattttggataatattcgtattttgcatctgctataattaagatataatcaccgcaagaacacacgaacatctttcctacatggttaaagtacatgtacaattctatccatttgtcttccttaactatatatttgtatagataattacgagtctcgtgagtaattccagtaattacatagatgtcgccgtcgtactctacagcataaactatactatgatgtctaggcatgggagacttttttatccaacgatttttagtgaaacattccacatcgtttaatactacatatttctcatacgtggtataaactccacccattacatatatatcatcgtttacgaataccgacgcgcctgaatatctaggagtaattaagtttggaagtcttatccatttcgaagtgccgtgtttcaaatattctgccacacccgttgaaatagaaaattctaatcctcctattacatataactttccatcgttaacacaagtactaacttctgattttaacgacgacatattagtaaccgttttccattttttcgtttcaagatctacccgcgatacggaataaacatgtctattgttaatcatgccgccaataatgtatagacaattatgtaaaacatttgcattatagaattgtctatctgtattaccgactatcgtccaatattctgttctaggagagtaatgggttattgtggatatataatcagagtttttaatgactactatattatgttttataccatttcgtgtcactggctttgtagatttggatatagttaatcccaacaatgatatagcattgcgcatagtattagtcataaacttgggatgtaaaatgttgatgatatctacatcgtttggatttttatgtatccactttaataatatcatagctgtaacatcctcatgatttacgttaacgtcttcgtgggataagatagttgtcagttcatcctttgataattttccaaattctggatcggatgtcaccgcagtaatattgttgattatttctgacatcgacgcattatatagttttttaattccatatcttttagaaaagttaaacatccttatacaatttgtgaaattaatattatgaatcatagtttttacacatagatctactacaggcggaacatcaattattatggcagcaactagtatcatttctacattgtttatggtgatgtttatcttcttccagcgcatatagtctaatagcgattcaaacgcgtgatagtttataccattcaatataatcgcttcatcctttagatggtgatcctgaatgcgtttaaaaaaattatacggagacgccgtaataatttccttattcacttgtataatttccccattgatagaaaatattacgctttccattcttaaagtactataagtaattatagtataatgtaaacgtttatatattcaatatttttataaaaatcattttgacattaattcctttttaaatttccgtctatcatctatagaaacgtattctatgaatttataaaatgcttttacgtgtcctatcgtaggcgatagaaccgctaaaaagcctatcgaatttctacaaaagaatctgttatatggtatagggagagtataaaacattaaatgtccgtacttattaaagtattcagtagccaatcctaactctttcgaatacttattaatggctcttgttctgtacgaatctatttttttgaacaacggacctagtggtatatcttgttctatgtatctaaaataatgtctgactagatccgttagtttaatatccgcagtcatcttgtctagaatggcaaatctaactgcgggtttaggctttagtttagtttctatatctacatctatgtctttatctaacaccaaaaatataatagctaatattttattacaatcatccggatattcttctacgatctcactaactaatgtttctttggttatactagtatagtcactatcggacaaataaagaaaatcagatgatcgatgaataatacatttaaattcatcatctgtaagatttttgagatgtctcattagaatattattagggttagtactcattatcattcggcagctattacttattttattatttttcaccatatagatcaatcattagatcatcaaaatatgtttcaatcatcctaaagagtatggtgaatgactcttcccatctaatttctgaacgttcaccaatgtctctagccactttggcactaatagcgatcattcgcttagcgtcttctatattattaactggttgattcaatctatctagcaatggaccgtcggacagcgtcattctcatgttcttaatcaatgtacatacatcgccgtcatctaccaattcatccaacaacataagctttttaaaatcatcattataataggtttgatcgttgtcatttctccaaagaatatatctaataagtagagtcctcatgattagttaacaactattttttatgttaaatcaattagtacaccgctatgtttaatacttattcatattttagtttttaggattgagaatcaatacaaaaattaatgcatcattaattttagaaatacttagtttccacgtagtcaatgaaacatttgaactcatcgtacaggacgttctcgtacaggacgtaactataaaccggtttatatttgttcaagatagatacaaatccgataactttttttacgaattctacgggatccactttaaaagtgtcataccgggttctttttatttttttaaacagatcaatggtgtgatgttgattaggtcttttacgaatttgatatagaatagcgtttacatatcctccataatggtcaatcgccatttgttcgtatgtcataaattctttaattatatgacactgtgtattatttagttcatccttgttcattgttaggaatctatccaaaatggcaattatactagaactataggtgcgttgtatacacatattgatgtgtctgtttatacaatcaatgctactaccttcgggtaaaattgtagcatcatataccatttctagtactttaggttcattattatccattgcagaggacgtcatgatcgaatcataaaaaaatatattatttttatgttattttgttaaaaataatcatcgaatacttcgtaagatactccttcatgaacataatcagttacaaaacgtttatatgaagtaaagtatctacgatttttacaaaagtccggatgcataagtacaaagtacgcgataaacggaataataatagatttatctagtctatctttttctatagctttcatagttagatacatggtctcagaagtaggattatgtaacatcagcttcgataaaatgactgggttatttagtcttacacattcgctcatacatgtatgaccgttaactacagagtctacactaaaatgattgaacaatagatagtctaccattgtttcgtattcagatagtacagcgtagtacatggcatcttcacaaattatatcattgtctaatagatatttgacgcatcttatggatcccacttcaacagccatcttaaaatcggtagaatcatattgctttcctttatcattaataatttctagaacatcatctctatcataaaagatacaaatattaactgtttgatccgtaataacattgctagtcgatagcaatttgttaataagatgcgctgggctcaatgtcttaataagaagtgtaagaggactatctccgaatttgttttgtttattaacatccgttgatggaagtaaaagatctataatgtctacattcttgactgttttagagcatacaatatggagaggtgtatttccatcatgatctggttttgagggactaattcctagtttcatcatccatgagattgtagaagcttttggattgtctgacataagatgtctatgaatatgatttttgccaaatttatccactatcctggcttcgaatccgatggacattatttttttaaacactctttctgaaggatctgtacacgccaacaacggaccacatccttcttcatcaaccgagttgttaatcttggctccatactgtaccaataaatttattctctctatgacttcatcatctgttcccgagagataatatagaggcgttttatgctgtttatcacacgcgtttggatctgcgccgtgcgtcagcagcatcgcgactattctattattattaattttagaagctatatgcaatggataatttccatcatcatccgtctcatttggagagtatcctctatgaagaagttcttcgacaaatcgttcatctagtcctttaattccacaatacgcatgtagaatgtgataattatttccagaaggttcgatagcttgtagcatattcctaaatacatctaaatttttactattatatttggcataaagagatagataatactcggccgacataatgttgtccattgtagtataaaaattaatatttctatttctgtatatttgcaacaatttactctctataacaaatatcataacttagttcttttatgtcaagaaggcactggtttagttcatctataaatgtcacgccataactaccacgcatgccatactcagaattatgataaagatatttatccttggggtgtaggtaatggggattaatctttgttggatcagtctctaagttaacacatgtcacacatgatccatttatagttatatcacacgatgatgatttatgaattgattccggaagatcgctatcgtattttgtggttccacaattcatttccatacatgttattgtcacactaatattatgatgaactttatctagccgctgagtggtaaacaacagaacagatagtttattatctttaccaacaccctcagccgctgccacaaatctctgatccgtatccatgatggtcatgtttatttctagtccgtatccagtcaacactatgttagcatttctgtcgatatagctttcactcatatgacactcaccaataatagtagaattaatgtcgtaatttacaccaatagtgagttcggcggcaaagtaccaataccggtaatcttgtcgaggaggacatatagtattcttgtattctaccgaatacccgagagatgcgatacaaaagagcaagactaatttgtaaaccatcttactcaaaatatgtaacaatagtacgatgcaatgagtaagacaataggaaatctatcttatatacacataattattctatcaattttaccaattagttagtgtaatgttaacaaaaatgtgggagaatctaattagtttttctttacacaattgacgtacatgagtctgagttccttgtttttgctaattatttcatccaatttattattcttgacgatatcgagatcttttgtataggagtcaaacttgtattcaacatgcttttctataatcattttagctatttcggcatcatccaatagtacattttccagattagcagaatagatattaatgtcgtatttgaacagagcctgtaacatctcaatgtctttattatctatagccaatttaatgtccggaatgaagagaagggaattattggtgtttgtcgacgtcatatagtcgagcaagagaatcatcatatccacgtgtccattttttatagtgatgtgaatacaactaaggagaatagccagatcaaaagtagatggtatctctgaaagaaagtaggaaacaatacttacatcattaagcatgacggcatgataaaatgaagttttccatccagttttcccatagaacatcagtctccaatttttcttaacaaacagttttaccgtttgcatgttaccactatcaaccgcataatacaatgcggtgtttcccttgtcatcaaattgtgaatcatccagtccactgaatagcaaaatctttactattttggtatcttccaatgtggctgcctgatgtaatggaaattcattctctagaagatttttcaatgctccagcgttcaacaacgtacatactagacgcacgttattatcagctattgcataatacaaggcactatgtccatggacatccgccttaaatgtatctttactagagagaaagcttttcagctgcttagacttccaagtattaattcgtgacagatccatgtctgaaacgagacgctaattagtgtatattttttcattttttataattttgtcatattgcaccagaattaataatatctttaatagatctgattagtagatacatggctatcgcaaaacaacatatacacatttaataaaaataatatttattaagaaaattcagatttcacgtacccatcaatataaataaaataatgattccttacaccgtacccatattaaggagattccaccttacccataaacaatataaatccagtaatatcatgtctgatgatgaacacaaatggtgtattaaattccagtttttcaggagatgatctcgccgtagctaccataatagtagatgcctctgctacagttccttgttcgtcgacatctatctttgcattctgaaacattttataaatatataatgggtccctagtcatatgtttaaacgacgcattatctggattaaacatactaggagccatcatttcggctatcgacttaatatccctcttattttcgatagaaaatttagggagtttaagattgtacactttattccctaattgagacgaccaatagtctaattttgcagccgtgatagaatctgtgaaatgggtcatattatcacctattgccaggtacatactaatattagcatccttatacggaaggcgtaccatgtcatattctttgtcatcgattgtgattgtatttccttgcaatttagtaactacgttcatcatgggaaccgttttcgtaccgtacttattagtaaaactagcattgcgtgttttagtgatatcaaacggatattgccatatacctttaaaatatatagtattaatgattgcccatagagtattattgtcgagcatattagaatctactacattagacataccggatctacgttctactatagaattaattttattaaccgcatctcgtctaaagtttaatctatataggccgaatctatgatattgttgataatacgacggtttaatgcacacagtattatctacgaaactttgataagttagatcagtgtacgtatatttagatgttttcagcttagctaatcctgatattaattctgtaaatgctggacccagatctctttttctcaaatccatagtcttcaataattctattctagtattacctgatgcaggcaatagcgacataaacatagaaaacgaataaccaaacggtgagaagacaatattatcatcttgaatatttttatacgctactataccggcattggtaaatccttgtagacgataggcggacgctgaacacgctaacgatagtatcaataacgcaatcatgattttatggtattaataattaaccttatttttatgttcggtataaaaaaattattgatgtctacacatccttttgtaattgacatctatatatccttttgtataatcaactctaatcactttaacttttacagttttccctaccagtttatccctatattcaacatatctatccatatgcatcttaacactctctgccaagatagcttcagagtgaggatagtcaaaaagataaatatatagagcataatcattctcgtatactctgccctttattacatcacccgcattgggcaacgaataacaaaatgcaagcatcttgttaacgggctcgtaaattgggataaaaattatgtttttattgtcttatatctattttattcaagagaatattcaggaatttctttttccggttgtatctcgtcgcagtatatatcatttgtacattgtttcatattttttaatagtttacaccttttagtaggactagtatcgtacaattcatagctgtattttgaattccaatcacgcataaaaatatcttccaattgttgacgaagacctaatccatcatccggtgtaatattaatagatgctccacatgtatccgtaaagtaatttcctgtccaatttgaggtacctatataggccgttttatcggttaccatatatttggcatggtttaccctagaatacggaatgggaggatcagcatctggtacaataaatagctttacttctatatttatgtttttagattttagcatagcgatagatcttaaaaagtttctcatgataaacgaagatcgttgccagcaactaatcaatagcttaacggatacttgtctgtctatagcggatcttcttaattcatcttctatataaggccaaaacaaaattttacccgccttcgaataaataatagggataaagttcataacagatacataaacgaatttactcgcatttctaatacatgacaataaagcggttaaatcattggttctttccatagtacatagttgttgcggtgcagaagcaataaatacagagtgtggaacgccgcttacgttaatactaagaggatgatctgtattataatacgacggataaaagtttttccaattatatggtagattgttaactccaagataccagtatacctcaaaaatttgagtgagatccgctgccaagttcctattattgaagatcgcaatacccaattccttgacctgagttagtgatctccaatccatgttagcgcttcctaaataaatatgtgtattatcagatatccaaaattttgtatgaagaactcctcctaggatatttgtaatatctatgtatcgtacttcaactccggccatttgtagtctttcaacatcctttaatggtttgttagatttattaacggctactctaactcgtactcctcttttgggtaattgtacaatctcgtttaatattatcgtgccgaaattcgtacccacttcatccgataaactccaataaaaagatgatatatctagtgtttttgtggtattggatagaatttccctccacatgttaaatgtagacaaatatactttatcaaattgcatacctataggaatagtttctgtaatcactgcgattgtattatccggattcattttatttgttaaaagaataatcctatatcacttcactctattaaaaatccaagtttctatttctttcatgactgattttttaacttcatccgtttccttatgaagatgatgtttggcaccttcataaatttttatttctctattacaatttgcatgttgcatgaaataatatgcacctaaaacatcgctaatcttattgtttgttccctggagtatgagagtcgggggggtgttaatcttggaaattatttttctaaccttgttggtagccttcaagacctgactagcaaatccagccttaattttttcatgattgactaatgggtcgtattggtatttataaactttatccatatctctagatactgattctggacatagctttccgactggcgcatttggtgtgatggttcccataagtttggcagctagcagattcagtcttgaaacagcatctgcattaactagaggagacattagaatcattgctgtaaacaagtttggattatcgtaagaggctagctcccatggaatgacccaataagtagatttaatagttaccacgtgctgtaccaaagtcatcaatcatcattttttcaccattacttcttccatgtccaatatgatcatgtgagaatactaaaattcctaacgatgatatgttttcagctagttcgtcataacgtccagaatgtttaccagctccatgacttatgaatactaatgccttaggatatgtaataggtttccaatatttacaatatatgtaatcattgtccagattgaacatacagtttgcactcatgattcacgttatataactatcaatattaacagttcgtttgatgatcatattatttttatgttttattgataattgtaaaaacatacaattaaatcaatatagaggaaggagacggctactgtcttttgtaagatagtcatggcgactaaattagattatgaggatgctgttttttactttgtggatgatgataaaatatgtagtcgcgactccatcatcgatctaatagatgaatatattacgtggagaaatcatgttatagtgtttaacaaagatattaccagttgtggaagactgtacaaggaattgatgaagttcgatgatgtcgctatacggtactatggtattgataaaattaatgagattgtcgaagctatgagcgaaggagaccactacatcaattttacaaaagtccatgatcaggaaagtttattcgctaccataggaatatgtgctaaaatcactgaacattggggatacaaaaagatttcagaatctagattccaatcattgggaaacattacagatttgatgaccgacgataatataaacatcttgatactttttctagaaaaaaaattgaattgatgatataggggtcttcataacgcataattattacgttagcattctatatccgtgttaaaaaaaattatcctatcatgtatttgagagttttatatgtagcaaacatgatagctgtgatgccaataagctttagatattcacgcgtgctagtgttagggatggtattatctggtggtgaaatgtccgttatataatctacaaaacaatcatcgcatatagtatgcgatagtagagtaaacatttttatagtttttactggattcatacatcgtctacccaattcggttataaatgaaattgtcgccaatcttacacccaaccccttgttatccattagcatagtattaacttcgttatttatgtcataaactgtaaatgattttgtagatgccatatcatacatgatattcatgtccctattataatcattactaactttatcacaatatatgttgataatatctatatatgatctagtctttgtgggcaactgtctatacaagtcgtctaaacgttgtttactcatatagtatctaacagccatcattacatggtcccgttccgttgatagataatcgagtatgttagtggacttgtcaaatctatataccatattttctggaagtggatatacatagtcgtgatcaacattattgctagcctcatcttctatatcctgtactataccattatctatatcatctacataatctatgatattattacacataaacatcgacaacatactattgtttattatctaagtcctgttgatccaaacccttgatctcctctatttgtactatctagagattgtacttcttccagttctggataatatatacgttgatagattagctgagctattctatctccagtatttacattaaacgtacattttccattattaataagaatgactcctatgtttcccctataatcttcgtctattacaccacctcctatatcaatgccttttagtgacagaccagacctaggagctattctaccatagcagaacttaggcatggacatactaatatctgtcttaattaactgtctttctcctggagggatagtataatcgtaagcgctatacaaatcatatccggcagcacccggcgattgcctagtaggagatttagctctgttagtttccttaacaaatctaactggtgagttaatattcatgttgaacataaaactaatattttatttcaaaattatttaccatcccatatattccatgaataagtgtgatgattgtacacttctatagtatctatatacgatccacgataaaatcctcctatcaatagcagtttattatccactatgatcaattctggattatccctcggataaataggatcatctatcagagtccatgtattgctggattcacaataaaattccgcatttctaccaaccaagaataaccttctaccgaacactaacgcgcatgatttataatgaggataataagtggatggtccaaactgccactgatcatgattgggtagcaaatattctgtagttgtatcagtttcagaatgtcctcccattacgtatataacattgtttatggatgccactgctggattacatctaggtttcagaagactcggcatattaacccaagcagcatccccgtggaaccaacgctcaacagatgtgggatttggtagacctcctactacgtataatttattgttagcgggtatcccgctagcatacagtctggggctattcatcggaggaattggaatccaattgtttgatatataatttaccgctatagcattgttatgtatttcattgttcatccatccaccgatgagatatactacttctccaacatgagtacttgtacacatatggaatatatctataatttgatccatgttcataggatactctatgaatggatacttgtatgatttgcgtggttgtttatcacaatgaaatattttggtacagtctagtatccattttacattatttatacctctgggagaaagataatttgacctgattacatttttgataaggagtagcagatttcctaatttatttcttcgctttatataccacttaatgacaaaatcaactacataatcctcatctggaacatttagttcatcgctttctagaataagtttcatagatagataatcaaaattgtctatgatgtcatcttccagttccaaaaagtgtttggcaataaagtttttagtatgacataagagattggatagtccgtattctatacccatcatgtaacactcgacacaatattcctttctaaaatctcgtaagataaagtttatacaagtgtagatgataaattctacagaggttaatatagaagcacgtaataaattgacgacgttatgactatctatatatacctttccagtatacgagtaaataactatagaagttaaactgtgaatgtcaaggtctagacaaaccctcgtaactggatctttatttttcgtgtatttttgacgtaaatgtgtgcgaaagtaaggagataactttttcaatatcgtagaattgactattatattgcctcctatggcatcaataattgttttgaatttcttagtcatagacaatgctaatatattcttacagtacacagtattgacaaatatcggcatttatgtttctttaaaagtcaacatctagagaaaaatgattatctttttgagacataactcccattttttggtattcacccacacgtttttcgaaaaaattagtttttccttccaatgatatattttccatgaaatcaaacggattggtaacattataaatttttttaaatcccaattcagaaatcaatctatccgcgacgaattctatatatgttttcatcatttcacaattcattcctataagtttaactggaagagccgcagtaagaaattcttgttcaatggatactgcatctgttataatagatctaacggtttcttcactcggtggatgcaataaatgtttaaacatcaaacatgcgaaatcgcagtgcagaccctcgtctctactaattagttcgttggaaaacgtgagtccgggcattaggccacgctttttaagccaaaatatggaagcgaatgatccggaaaagaagattccttctactgcagcaaaggcaataagtctctctccataaccggcgctgtcatgtatccacttttgagcccaatcggccttcttttttacacaaggcatcgtttctatggcattaaagagatagtttttttcattactatctttaacataagtatcgatcaaaagactatacatttccgaatgaatgttttcaatggccatctgaaatccgtagaaacatctagcctcggtaatctgtacttctgtacaaaatcgttccgccaaattttcattcactattccgtcactggctgcaaaaaacgccaatacatgttttataaaatatttttcgtctggtgttagtttattccaatcattgatatctttagatatatctacttcttccactgtccaaaatgatgcctctgcctttttatacatgttccagatgtcatgatattggattgggaaaataacaaatctatttggatttggtgcaaggatgggttccataactaaattaacaataacaataaattttttttcagttatctatatgcctgtacttggattttttgtacatcgatatcgccgcaatcactacaataattacaagtattattgatagcattgttattagtactatcataattaaattatctacattcatgggtgctgaataatcgttattatcatcattatcattttgtaattgtgacatcatactagataaatcgtttgcgagattgttgtgggaagcgggcatggaggatgcattatcattattatttaacgccttccatttggattcacaaatgttacgcacattcaacattttatggaaactataattttgtgaaaacaaataacaagaaaactcgtcatcgttcaaatttttaacgatagtaaaccgattaaacgtcgagctaatttctaacgctagcgactctgttggatatgggtttccagatatatatcttttcagttcccctacgtatctataatcatctgtaggaaatggaagatatttccatttatctactgttcctaatatcatatgtggtggtgtagtagaaccattaagcgcgaaagatgttatttcgcatcgtattttaacttcgcaataatttctggttagataacgcactctaccagtcaagtcaatgatattagcctttacagatatattcatagtagtcgtaacgatgactccatcttttagatgcgatactcctttgtatgtaccagaatcttcgtacctcaaactcgatatatttaaacaagttaatgagatattaacgcgttttatgaatgatgatatataaccagaagttttatcctcggtggctagcgctataaccttatcattataataccaactagtgtgattaatatgtgacacgtcagtgtgggtacaaatatgtacattatcgtctacgtcgtattcgatacatccgcatacagccaacaaatataaaatgacaaatactctaacgacgttcgtacccatcttgatgcggtttaataaatgttttgatttcaatttattgtaaaaaaagattcggttttatactgttcgatattctcattgcttatattttcatctatcatctccacacagtcaaatccgtggttagcatgcacctcatcaaccggtaaaagactatcggactcttctatcattataactctagaatatttaatttggtcattattaatcaagtcaattatcttatttttaacaaacgtgagtattttactcatttttataaaaacttttagaaatatacagactctatcgtgtgtctatatcttctttttatatccaatgtatttatgtctgatttttcttcatttatcatatataatggtccaaattctacacgtgcttcggattcatccagatcattaaggttcttataattgtaacatccttctcttccctcttctacatcttccttcttattcttattcttagcgtcacagaatctaccacagcaggatcccatgacgagcgtcatattaaactaatccattttcaattataatatatgattagtaatgaccattaaaataaaaaatattcttcataaccggcaagaaagtgaaaagttcacattgaaactatgtcagtagtatacatcatgaaatgatgatatatatactctattttggtggaggattatatgatataattcgtggataatcatttttaagacacatttctttattcgtaaatcttttcacgttaaatgagtgtccatattttgcaatttcttcatatgatggcggtgtacgtggacgaggctgctcctgttcttgttgtagtcgccgactgtcgtgtctgcgtttagatccctccattatcgcgattgcgtagatggagtactattttataccttgtaattaaatttttttattaattaaacgtataaaaacgttccgtatctgtatttaagagccagatttcgtctaatagaacaaatagctacagtaaaaataactagaataattgctacacccactagaaaccacggatcgtaatacggcaatcggttttcgataataggtggaacgtatattttatttaaggacttaacaattgtctgtaaaccacaatttgcttccgcggatcctgtattaactatctgtaaaagcatatgttgaccgggcggagccgaacattctccgatatctaatttctgtatatctataatattattaacctccgcatacgcattacagttcttttctagcttggataccgcactaggtacatcgtctagatctattcctatttcctcagcgatagctcttctatccttttccggaagcaatgaaatcacttcaataaatgattcaaccatgagtgtgaaactaagtcgagaattactcatgcatttgttagttattcggagcgcgcaatttttaaactgtcctataacctctcctatatgaatagcacaagtgacattagtagggatagaatgttgagctaatttttgtaaataactatctataaaaagattatacaaagttttaaactctttagtttccgccatttatccagtctgagaaaatgtctctcataataaatttttccaagaaactaattgggtgaagaatggaaacctttaatctatatttatcacagtctgttttggtacacatgatgaattcttccaatgccgtactaaattcgatatctttttcgatttctggatatgtttttaataaagtatgaacaaagaaatggaaatcgtaataccagttatgtttaactttgaaattgttttttattttcttgttaatgattccagccacttgggaaaagtcaaagtcgtttaatgccgatttaatacgttcattaaaaacaaactttttatcctttagatgaattattattggttcattggaatcaaaaagtaagatattatcgggtttaagatctgcgtgtaaaaagttgtcgcaacagggtagttcgtagattttaatgtataacagagccatctgtaaaaagataaactttatgtattgtaccaaagatttaaatcctaatttgatagctaactcggtatctactttatctgccgaatacagtgctaggggaaaaattataatgtttcctctttcatattcgtagttagttctcttttcatgttcgaaaaagtgaaacatgcggttaaaatagtttataacattaatattactgttaataactgccggataaaagtgggatagtaatttcacgaatttgatactgtcctttctctcgttaaacgcctttaaaaaaactttagaagaatatctcaatgagagttcctgaccatccatagtttgtatcaataatagcaacatatgaagaacacgtttatacagagtatgtaaaaatgttaatttatagtttaatcccatggcccacgcacacacgattaattttttttcatctccctttagattgttgtatagaaatttgggtactgtgaactccgccgtagtttccatgggactatataattttgtggcctcgaatacaaattttactacatagttatctatcttaaagactataccatatcctcctgtagatatgtgataaaaatcgtcgtttataggataaaatcgtttatccttttgttggaaaaaggatgaattaatgtaatcattctcttctatctttagtagtgtttccttattaaaattcttaaaataatttaacaatctaactgacggagcccaattttggtgtaaatctaattgggacattatattgttaaaatacaaacagtctcctaatataacagtatctgataatctatggggagacatccattgatattcaggggatgaatcattggcaacacccatttattgtacaaaaagccccaatttacaaacgaaagtccaggtttgatagagacaaacaattaactattttgtctctgtttttaacacctccacagtttttaatttctttagtaatgaaattattcacaatatcagtatcttctttatctaccagagattttactaacttgataaccttggctgtctcattcaatagggtagtaatatttgtatgtgtgatattgatatctttttgaattgtttcttttagaagtgattctttgatggtgccagcatacgaattacaataatgcagaaactcggttaacatgcaggaattatagtaagccaattccaattgttgcctgtgttgtattagagtgtcaatatgagcaatggtgtccttgcgtttctctgatagaatgcgagcagcgattttggcgttatcatttgacgatatttctggaatgacgaatcctgtttctactaactttttggtaggacaaagtgaaacaatcaagaagatagcttctcctcctatttgtggaagaaattgaactcctctagatgatctactgacgatagtatctccttgacagatattggaccgaattacagaagtacctggaatgtaaagccctgaaaccccctcattttttaagcagattgttgccgtaaatcctgcactatgcccaagatagagagctcctttggtgaatccatctctatgtttcagtttaaccaagaaacagtcagctggtctaaaatttccatctctatctaatacagcatctaacttgatgtcaggaactatgaccggtttaatgttatatgtaacattgagtaaatccttaagttcataatcatcactgtcatcagttatgtacgatccaaacaatgtttctaccggcatagtggatacgaagatgctatccatcagaatgtttccctgattagtattttctatatagctattcttctttaaacgattttccaaatcagtaactatgttcatttttttaggagtaggacgcctagccagtatggaagaggattttctagatcctctcttcaacatctttgatctcgatggaatgcaaaaccccatagtgaaacaaccaacgataaaaataatattgtttttcactttttataattttaccatctgactcatggattcattaatatctttataagagctactaacgtataattctttataactgaactgagatatatacaccggatctatggtttccataattgagtaaatgaatgctcggcaataactaatggcaaatgtatagaacaacgaaattatactagagttgttaaagttaatattttctatgagctgttccaataaattatttgttgtgactgcgttcaagtcataaatcatcttgatactatccagtaaaccgtttttaagttctggaatattatcatcccattgtaaagcccctaattcgactatcgaatatcctgctctgatagcagtttcaatatcgacggacgtcaatactgtaataaaggtggtagtattgtcatcatcgtgataaactacgggaatatggtcgttagtaggtacggtaactttacacaacgcgatatataactttccttttgtaccatttttaacgtagttgggacgtcctgcagggtattgttttgaagaaatgatatcgagaacagatttgatacgatatttgttggattcctgattattcactataatataatctagacagatagatgattcgataaatagagaaggtatatcgttggtaggataatacatccccattccagtattctcggatactctattgatgacactagttaagaacatgtcttctattctagaaaacgaaaacatcctacatggactcattaaaacttctaacgctcctgattgtgtctcgaatgcctcgtacaaggatttcaaggatgccatagattctttgaccaacgatttagaattgcgtttagcatctgatttttttattaaatcgaatggtcggctctctggtttgctaccccaatgataacaatagtcttgtaaagataaaccgcaagaaaatttatacgcatccatccaaataaccctagcaccatcggatgatattaatgtattattatagattttccatccacagttattgggccagtatactgttagcaacggtatatcgaatagattactcatgtaacctactagaatgatagttcgtgtactagtcataatatctttaatccaatctaagaaatttaaaattagattttttacactgttaaagttaacaaaagtattacccgggtacgtggatatcatatatggcattggtccattatcagtaatagctccataaactgatacggcgatggtttttatatgtgtttgatctaacgaggaagaaattcgcgcccacaattcatctctagatatgtatttaatatcaaacggtaacacatcaatttcgggacgcgtatatgtttctaaatttttaatccaaatataatgatgacctatatgccctattatcatactgtcaactatagtacacctagggaacttacgatacatctgtttcctataatcgttaaattttacaaatctataacatgctaaaccttttgacgacaaccattcattaatttctgatatggaatctgtattctcgataccgtatcgttctaaagccagtgctatatctccctgttcgtgggaacgctttcgtataatatcgatcaacggataatctgaagtttttggagaataatatgactcatgatctatttcgtccataaacaatctagacataggaattggaggcgatgatcttaattttgtgcaatgagtcgtcaatcctataacttctaatcttgtaatattcatcatcgacataatactatctatgttatcatcgtatattagtataccatgaccttcttcatttcgtgccaaaatgatatacagtcttaaataattacgcaatatctcaatagtttcataattgttagctgttttcatcaaggtttgtatcctgtttaacatgatggcgttctataacgtctctattttctatttttaattttttaaatttttaacgatttactgtggctagatacccaatctctctcaaatatttttttagcctcgcttacaagctgtttatctatactattaaaactgacgaatccgtgattttggtaatgggttccgtcgaaatttgccgaagtgatatgaacatattcgtcgtcgactatcaacaattttgtattattctgaatagtgaaaaccttcacagatagatcattttgaacacacaacgcatctagacttttggcggttgccatagaatatacgtcgttcttatcccaattaccaactagaagtctgatcttaactcctctattaatggctgcttctataatggagttgtaaatgtcgggccaatagtagctattaccgtcgacacgtgtagtgggaactatggccaaatgttcaatatctatactagtcttagctgacctgagtttatcaataactacatcggtatctagatctctagaatatcccaataggtgttccggagaatcagtaaagaacactccacctataggattcttaatatgatacgcagtgctaactggcaaacaacaagccgcagagcataaattcaaccatgaattttttgcgctattaaaggctttaaaagtatcaaatcttctacgaagatctgtggccagcgggggataatcagaatatacacctaacgttttaatcgtatgtatagatcctccagtaaatgacgcgtttcctacataacatctttcatcatctgacacccaaaaacaaccgagtagtagtcccacattattttttttatctatattaacggttataaaatttatatccgggcagtgactttgtagctctcccagatttcttttccctcgttcatctagcaaaactattattttaatccctttttcagatgcctcttttagtttatcaaaaataagcgctcccctagtcgtactcagaggattacaacaaaaagatgctatgtatatatatttcttagctagagtgataatttcgttaaaacattcaaatgttgttaaatgatcggatctaaaatccatattttctggtagtgtttctaccagcctacattttgctcccgcaggtaccgatgcaaatggccacatttagttaacataaaaacttatacatcctgttctatcaacgattctagaatatcatcggctatatcgctaaaattttcatcaaagtcgacatcacaacctaactcagtcaatatattaagaagttccatgatgtcatcttcgtctatttctatatccgtatccattgtagattgttgaccgattatcgagtttaaatcattactaatactcaatccttcagaatacaatctgtgtttcattgtaaatttataggcggtgtatttaagttggtagattttcaattatgtattaatatagcaacagtagttcttgctcctccttgattctagcatcctcttcattattttcttctacgtacataaacatgtccaatacgttagacaacacaccgacgatggcggccgctacagacacgaatatgactaaaccgatgaccatttaaaaacccctctctagctttcacttaaactgtatcgatcattcttttagcacatgtataatataaaaacattattctatttcgaatttaggcttccaaaaatttttcatccgtaaaccgataataatatatatagacttgttaatagtcggaataaatagattaatgcttaaactatcatcatctccacgattagagatacaatatttacattctttttgctgtttcgaaactttatcaatacacgttaatacaaacccaggaaggagatattgaaactgaggctgttgaaaatgaaacggtgaatacaataattcagataatgtaaaatcatgattccgtattctgatgatattagaactgctaatggatgtcgatggtatgtatctaggagtatctattttaacaaagcatcgatttgctaatatacaattatccttttgattaattgttattttattcatattcttaaaaggtttcatatttatcaattcttctacattaaaaatttccatttttaatttatgtagccccgcaatactcctcattacgtttcattttttgtctataatatccattttgttcatctcggtacatagattatccaattgagaagcgcatttagtagttttgtacattttaagtttattgacgaatcgtcgaaaactagttatagttaacattttattatttgataccctgatattaatacccctgccgttactattatttataactgatgtaatccacgtaacattggaattaactatcgatagtaatgcatcgacgcttccaaaattgtctattataaactcaccgataatttttttattgcatgttttcatattcattaggattatcaaatctttaatcttattacgattgtatgcgttgatattacaagacgtcattctaaaagacggaggatctccatcaaatgccagacaatcacgtacaaagtacatggaaataggttttgttctattgcgcatcatagatttatatagaacacccgtagaaatactaatttgttttactctataaaatactaatgcatctatttcatcgttttgtataacgtctttccaagtgtcaaattccaaatttttttcattgatagtaccaaattcttctatctctttaactacttgcatagataggtaattacagtgatgcctacatgccgttttttgaaactgaatagatgcgtctagaagcgatgctacgctagtcacaatcaccactttcatatttagaatatatatatgtaaaaatatagtagaatttcattttgtttttttctatgctataaatgaattctcattttgcatctgctcatactccgttttatattaataccaaagaaggaagatatctggttctaaaagccgttaaagtatgcgatgttagaactgtagaatgcgaaggaagtaaagcttcctgcgtactcaaagtagataaaccctcatcgcccgcgtgtgagagaagaccttcgtccccgtccagatgcgagagaatgaataaccctggaaaacaagttccgtttatgaggacggacatgctacaaaatatgttcgcggctaatcgcgataatgtagcttctagacttttgtcctaaaatactattatatccttttcgatattaataaatccgtgtcgtccaggttttttatctctttcagtatgtgaatagataggtattttatctctattcatcatcgaatttaagagatccgataaacattgtttgtattctccagatgtcagcatctgatacaacaatatatgtgcacataaacctctggcacttatttcatgtaccttccccttatcactaaggagaatagtatttgagaaatatgtatacatgatattatcatgaattagatatacagaatttgtaacactctcgaaatcacacgatgtgtcggcgttaagatctaatatatcactcgataacacattttcatctagatacactagacattttttaaagctaaaatagtctttagtagtaacagtaactatgcgattattttcatcgatgatacatttcatcggcatattattacgcttaccatcaaagactataccatgtgtatatctaacgtattctagcatggttgccatacgcgcattaaacttttcaggatctttggatagatcttccaatctatctatttgagaaaacatttttatcatgttcaatagttgaaacgtcggatccactatatagatattatctataaagattttaggaactacgttcatggtatcctggcgaatattaaaactatcaatgatatgattatcgttttcatcttttatcaccatatagtttctaagatatgggattttacttaatataatattatttcccgtgataaattttattagaaaggccaaatctataagaaaagtcctagaattagtctgaagaatatctatatcgccgtatagtatatttggattaattagatatagagaatatgatccgtaacatatacaacttttattatggcgtctaagatattcttccatcaacttattaacatttttgactagggaagatacattatgacgtcccattacttttgccttgtctattactgcgacgttcatagaatttagcatatctcttgccaattcttccattgatgttacattataagaaattttagatgaaattacatttggagctttaatagtaagaactcctaatatgtccgtgtatgtggtcactaatacagattgtagttctataatcgtaaataatttacctatattatatgtttgagtctgtttagaaaagtagctaagtatacgatcttttatttctgatgcagatgtatcaacatcggaaaaaaatctttttttattcttttttactaaagatacaaatatgtctttgttaaaaacagttattttctgaatatttctagcttgtaattttaacatatgatattcgttcacactaggtactctgcctaaataggtttctataatctttaatgtaatattaggaagagtattctgatcaggattcctattcattttgaggatttaaaactctgattattgtctaatatggtctctacgcaaactttttcacagagcgatagagtttttgataactcgtttttcttaagaaatataaaactactgtctccagagctcgctctatcttttattttatctaattcgatacaaactcctgatactggttcagaaagtaattcattaattttcagtcctttatagaagatatttaatatagataatacaaaatcttcagtttttgatatcgatctgattgatcctagaactagatatattaataacgtgctcattaggcagtttatggcagcttgataattagatatagtatattccagttcatatttattagataccgcattgcccagattttgatattctatgaattcctctgaaaataaatccaaaataactagacattctattttttgtggattagtgtactctcttccctctatcatgttcactactggtgtccacgatgataaatatctagagggaatataatatagtccataggatgccaatctagcaatgtcgaataactgtaattttattcttcgctcttcattatgaattgattcttgaggtataaacctaacacaaattatattattagacttttcgtatgtaatgtctttcatgttataagtttttaatcctggaatagaatctattttaatgaggcttttaaacgcagagttctccaacgagtcaaagcataatactctgttgtttttcttatatacgatgttacgattttcttctttgaatggaataggtttttgaattagtttataattacaacataatagataaggaagtgtgcaaatagtacgcggaaaaaacataatagctcccctgttttcatccatggttttaagtaaatgatcactggcttctttagtcaatggatattcgaacattaaccgtttcatcatcattggacagaatccatatttcttaatgtaaagagtgatcaaatcattgtgtttattgtaccatcttgttgtaaatgtgtattcggttatcggatctgctcctttttctattaaagtatcgatgtcaatctcgtctaagaattcaactatatcgacatatttcatttgtatacacataaccattactaacgtagaatgtataggaagagatgtaacgggaacagggtttgttgattcgcaaactattctaatacataattcttctgttaatacgtcttgcacgtaatctattatagatgccaagatatctatataattattttgtaagatgatgttaactatgtgatctatataagtagtgtaataattcatgtattttgatatatgttccaactctgtctttgtgatgtctagtttcgtaatatctatagcatcctcaaaaaatatattcgcatatattcccaagtcttcagttctatcttctaaaaaatcttcaacgtatggaatataataatctattttacctcttctgatatcattaatgatatagtttttgacactatcttctgtcaattgattcttattcactatatctaagaaacggatagcgtccctaggacgaactactgccattaatatctctattatagcttctggacataattcatctattataccagaattaatgggaactattccgtatctatctaacatagttttaagaaagtcagaatctaagacttgatgttcatatattggttcatacatgaaatgatctctattgatgatagtgactatttcattctctgaaaattggtaactcattctatatatgctttccttgttgatgaaggatagaatatactcaatagaatttgtaccaacaaactgttctcttatgaatcgtatatcatcatctgaaataatcatgtaaggcatacatttaacaattagagacttgtctcctgttatcaatatactattcttgtgataatttatgtgtgaggcaaatttgtccacgttctttaattttgttatagtagatatcaaatccaatggagctacagttcttggcttaaacagatatagtttttctggaacaaattctacaacattattataaaggactttgggtaaataagtgggatgaaatcctattttaattaatgcgatagccttgtcctcgtgcagatatccaaacgcttttgtgatagtatggcattcattgtctagaaacgctctacgaatatctgtgacagatatcatctttagagaatatactagtcgcgttaatagtactacaatttgtattttttaatctatctcaataaaaaaattaatatgtatgattcaatgtataactaaactactaactgttattgataactagaatcagaatctaatgatgacgtacccaagaagtttatctactgccaatttagctgcattatttttagcatctcgtttagattttccatctgccttatcgaatactcttccgtcgatatctacacaggcataaaatgtaggagagttactaggcccaactgattcaatacgaaaagaccaatctctcttagttatttggcagtactcattaataacggtgacagggttagcatctttccaatcaataatttttttagccggaataacatcatcaaaagacttatgatcctctctcattgatttttcgcgggatacatcatctattatgacgtcagccataacatcagcatccggcttatccgcctccgttgtcataaaccaacgaggaggaatatcgtcggagctgtacaccatagcactacgttgaagatcgtacagagctttattaacttctcgcttctccatattaagttgtctagttagttgtgcagcagtagctccttcgattccaatggttttaatagcctcacacacaatctctgcgttagaacgttcgtcgatatagattttagacatttttagagagaactaacacaaccagcaataaaactgaacctactttatcatttttttattcatcatcctctggtggttcgtcgttcctatcaaatgtagctctgattaacccgtcatctataggtgatgctggttctggagattctggaggagatggattattatctggaagaatctctgttatttccttgttttcatgtatcgattgcgttgtaacattaagattgcgaaatgctctaaatttgggaggcttaaagtgttgtttgcaatctctacacgcgtgtctaactagtggaggttcgtcagctgctctagtttgaatcatcatcggcgtagtattcctacttttacagttaggacacggtgtattgtatttctcgtcgagaacgttaaaataatcgttgtaactcacatcctttattttatctatattgtattctactcctttcttaatgcattttataccgaataagagatagcgaaggaattctttttcggtgccgctagtacccttaatcatatcacatagtgttttatattccaaatttgtggcaatagacggtttatttctatacgatagtttgtttctggaatcctttgagtattctataccaatattattctttgattcgaatttagtttcttcgatattagattttgtattacctatattcttgatgtagtactttgatgatttttccatggcccattctattaagtcttccaagttggcatcatccacatattgtgatagtaattctcggatatcagtagcggctaccgccattgatgtttgttcattggatgagtaactactaatgtatacattttccatttataacacttatgtattaactttgttcatttatattttttcattattatgttgatattaacaaaagtgaatatatatatatgttaataattgtattgtggttatacggctacaattttataatgagtgaaagtcagtgtccgatgatcaatgacgatagctttactctgaaaagaaagtatcaaatcgatagtgcggagtcaacaataaaaatggataagaagaggataaagtttcagaatagagccaaaatggtaaaagaaataaatcagacaataagagcagcacaaactcattacgagacattgaaactaggatacataaaatttaagagaatgattaggactactactctagaagatatagcaccatctattccaaataatcagaaaacttataaactattctcggacatttcagccatcggcaaagcatcacagaatccgagtaagatggtatatgctctgctgctttacatgtttcccaatttgtttggagatgatcatagattcattcgttatagaatgcatccaatgagtaaaatcaaacacaagatcttctctcctttcaaacttaatcttattagaatattagtggaagaaagattctataataatgaatgcagatctaataaatggaaaataattggaacacaagttgataaaatgttgatagctgaatctgataaatatacaatagatgcaaggtataacctaaaacccatgtatagaatcaagggagaatctgaagaagataccctcttcatcaaacagatggtagaacaatgtgtgacatcccaggaattggtggaaaaagtgttgaagatactgtttagagatttgttcaagagtggagaatacaaagcgtacagatacgatgatgatgtagaaaatggattcattggattggatacactaaaattaaacattgttcatgatatagttgaaccatgtatgcctgttcgtaggccagtggctaagatactgtgtaaagaaatggtaaataaatactttgagaatccgctacatattattggtaaaaatcttcaagagtgcattgactttgttagtgaataggcatttcatctttctccaatactaattcaaattgttaaattaataatggatagtataaatagttattagttataagatagtaaaaataattattagaataagagtgtagtatcatagataactctcttctataaaaatggattttattcgtagaaagtatcttatatacacagtagaaaataatatagattttttaaaggatgatacattaagtaaagtaaacaattttaccctcaatcatgtactagctctcaagtatctagttagcaattttcctcaacatgttattactaaggatgtattagctaataccaatttttttgttttcatacatatggtacgatgttgtaaagtgtacgaagcggttttacgacacgcatttgatgcacccacgttgtacgttaaagcattgactaagaattatttatcgtttagtaacgcaatacaatcgtacaaggaaaccgtgcataaactaacacaagatgaaaaatttttagaggttgccgaatacatggacgaattaggagaacttataggcgtaaattatgacttagttcttaatccattatttcacggaggggaacccatcaaagatatggaaatcatttttttaaaactgtttaagaaaacagacttcaaagttgttaaaaaattaagtgttataagattacttatttgggcatacctaagcaagaaagatacaggcatagagtttgcggataatgatagacaagatatatatactctatttcaacaaactggtagaatcgtccatagcaatctaacagaaacgtttagagattatatctttcccggagataagactagctattgggtgtggttaaacgaaagtatagctaatgatgcggatatcgttcttaatagacccgccattaccatgtatgataaaattcttagttatatatactctgagataaaacaaggacgcgttaataaaaacatgcttaagttagtttatatctttgagcctgaaaaagatatcagagaacttctgctagaaatcatatatgatattcctggagatatcctatctattattgatgcaaaaaacgacgattggaaaaaatattttattagtttttataaagctaattttattaacggtaatacatttattagtgatagaacgtttaacgaggacttattcagagttgttgttcaaatagatcccgaatatttcgataatgaacgaattatgtctttattctctacgagtgctgcggacattaaacgatttgatgagttagatattaataacagttatatatctaatataatttatgaggtgaacgatatcacattagatacaatggatgatatgaagaagtgtcaaatctttaacgaggatacgtcgtattatgttaaggaatacaatacatacctgtttttgcacgagtcggatcccatggtcatagagaacggaatactaaagaaactgtcatctataaaatccaagagtagacggctgaacttgtttagcaaaaacattttaaaatattatttagacggacaattggctcgtctaggtcttgtgttagatgattataaaggagacttgttagttaaaatgataaaccatcttaagtctgtggaggatgtatccgcattcgttcgattttctacagataaaaaccctagtattcttccatcgctaatcaaaactattttagctagttataatatttccatcatcgtcttatttcaaaggtttttgagagataatctatatcatgtagaagaattcttggataaaagcatccatctaaccaagacggataagaaatatatacttcaattgataagacacggtagatcatagaacagaccaaatatattattaataatttgtatatacatagatataattatcacacatttttgataaatgggaactgctgcaacaattcagactcccaccaaattaatgaataaagaaaatgcagaaatgattttggaaaaaattgttgatcatatagttatgtatattagtgacgaatcaagtgattcagaaaataatcctgaatatattgattttcgtaacagatacgaagactatagatctctcattataaaaagtgatcacgagtttgtaaagctatgtaaaaatcatgcggagaaaagttctccagaaacgcaacaaatgattatcaaacacatatacgaacaatatcttattccagtatctgaagtactattaaaacctataatgtccatgggtgacataattacatataacggatgtaaagacaatgaatggatgctagaacaactctctaccctaaactttaacaatctccgcacatggaactcatgtagcataggcaatgtaacgcgtctgttttatacattttttagttatctgatgaaagataaactaaatatataagtataatcccattctaatactttaacctgatgtattacctgcatcttattagaatattaacctaactaaaagacataacataaaaactcattacatagttgataaaaagcggtaggatataaatattatggctgccaccgttccgcgttttgacgacgtgtacaaaaatgcacaaagaagaattctagatcaagaaacattttttagtagaggtctaagtagaccgttaatgaaaaacacatatctatttgataattacgcgtatggatggataccagaaactgcaatttggagtagtagatacgcaaacttagatgcaagtgactattatcccatttcgttgggattacttaaaaagttcgagtttctcatgtctctatataaaggtcctattccagtatacgaagaaaaagtaaatactgaattcattgctaatggatctttctccggtagatacgtatcatatcttagaaagttttctgctcttccaacaaacgagtttattagttttttgttactgacttccattccaatctataatatcttgttctggtttaaaaatactcagtttgatattactaaacacacattattcagatacgtctatacagataatgccaaacacctggcgttggctaggtatatgtatcaaacaggagactataagcctttgtttagtcgtctcaaagagaattatatatttaccggtcccgttccaatatgtatcaaagatatagatcaccctaatcttagtagagcaagaagtccatccgattatgagacattagctaatattagtactatattgtactttaccaagtatgatccggtattaatgtttttattgttttacgtacctgggtattcaattactacaaaaattactccagccgtagaatatctaatggataaactgaatctaacaaagagcgacgtacaactgttgtaaattattttatgcttcgtaaaatgtaggttttgaaccaaacattctttcaaagaatgagatgcataaaactttattatccaatagattgactatttcggacgtcaatcgtttaaagtaaacttcgtaaaatattctttgatcactgccgagtttaaaacttctatcgataattgtttcatatgttttaatatttacaagttttttggtccatggtccattaggacaaatatatgcaaaataatatcgttctccaagttctatagtctctggattatttttattatattcagtaaccaaatacatattagggttatctgcggatttataatttgagtgatgcattcgactcaacataaataattctagaggagacgatctactatcaaattcggatcgtaaatctgtttctaaagaacggagaatatctatacatacctgattagaattcatccgtccttcagacaacatctcagacagtctggttttgtacatcttaatcatattcttatgaaacttggaaacatctcttctagtttcactagtacctttattaattctctcaggtacagattttgaattcgacgatgccgagtatttcatcgttgtatatttcttcttcgattgcataatcagattcttatataccgcctcaaactctattttaaaattattaaacaatactctattattaatcagtcgttctaactctttcgctatttctatagacttatctacatcttgactgtctatctctgtaaacacggagtcggtatctccatacacgctacgaaaacgaaatctgtaatctataggcaacgatgttttcacaatcggattaatatctctatcgtccatataaaatggattacttaatggattggcaaaccgtaacataccgttagataactctgctccatttagtaccgattctagatacaagatcattctacgtcctatggatgtgcaactcttagccgaagcgtatgagtatagagcactatttctaaatcccatcagaccatatactgagttggctactatcttgtacgtatattgcatggaatcatagatggccttttcagttgaactggtagcctgttttagcatctttttatatctggctctctctgccaaaaatgttcttaatagtctaggaatggttccttctatcgatctatcgaaaattgctatttcagagatgaggttcggtagtctaggttcacaatgaaccgtaatatatctaggaggtggatatttctgaagcaatagctgattatttatttcttcttccaatctattggtactaacaacgacaccgactaatgtttccggagatagatttccaaagatacacacattaggatacagactgttataatcaaagattaatacattattactaaacattttttgttttggagcaaataccttaccgccttcataaggaaacttttgttttgtttctgatctaactaagatagttttagtttccaacaatagctttaacagtggacccttgatgactgtactcgctctatattcgaataccatggattgaggaagcacatatgttgacgcacccgcgtctgtttttgtttctactccataatactcccacaaatactgacacaaacaagcatcatgaatacagtatctagccatatctaaagctatgtttagattataatccttatacatctgagctaaatcaacgtcatcctttccgaaagataatttatatgtatcattaggtaaagtaggacataatagtacgactttaaatccattttcccaaatatctttacgaattactttacatataatatcctcatcaacagtcacataattacctgtggttaaaacctttgcaaatgcagcggctttgcctttcgcgtctgtagtatcgtcaccgatgaacgtcatttctctaactcctctatttaatactttacccatgcaactgaacgcgttcttggatatagaatccaatttgtacgaatccaatttttcaaatttttgaatgaatgaatatagatcgaaaaatatagttccattattgttattaacgtgaaacgtagtattggccatgccgcctactcccttatgactagactgatttctctcataaatacagagatgtacagcttcctttttgtccggagatctaaagataattttctctcctgttaataactctagacgattagtaatatatctcagatcaaagttatgtccgttaaaggtaacgacgtagtcgaacgttagttccaacaattgtttagctattcgtaacaaaactatttcagaacatagaactagttctcgttcgtaatccatttccattagtgactgtatcctcaaacatcctctatcgacggcttcttgtatttcctgttccgttaacatctcttcattaatgagcgtaaacaataatcgtttaccacttaaatcgatataacagtaacttgtatgcgagattgggttaataaatacagaaggaaacttcttatcgaagtgacactctatatctagaaataagtacgatcttgggatatcgaatctaggtatttttttagcgaaacagttacgtggatcgtcacaatgataacatccattgttaatctttgtcaaatattgctcgtccaacgagtaacatccgtctggagatatcccgttagaaatataaaaccaactaatattgagaaattcatccatggtggcattttgtatgctgcgtttctttggctcttctatcaaccacatatctgcgacggagcattttctatctttaatatctagattataacttattgtctcgtcaatgtctatagttctcatctttcccaacggcctcgcattaaatggaggaggagacaatgactgatatatttcgtccgtcactacgtaataaaagtaatgaggaaatcgtataaatacggtctcaccatttcgacatctggatttcagatataaaaatctgttttcaccgtgactttcaaaccaattaatgcaccgaacatccatttatagaatttagaaatatattttcatttaaatgaatcccaaacattggggaagagccgtatggaccattatttttatagtactttcgcaagcgggtttagacggcaacatagaagcgtgtaaacgaaaactatatactatagttagcactcttccatgtcctgcatgtagacggcacgcgactatcgctatagaggacaataatgtcatgtctagcgatgatctgaattatatttattattttttcatcagattatttaacaatttggcatctgatcccaaatacgcgatcgatgtgacaaaggttaaccctttataaacttaacccattataaaacttatgattagtcacaactgaaataaccgcgtgattattttttggtataattctacacggcatggtttctgtgactatgaattcaacccccgttacattagtgaaatctttaacaaacagcaagggttcgtcaaagacataaaactcattgtttacaatcgaaatagaccccctatcacacttaaaataaaaaatatccttatcctttaccaccaaataaaattctgattggtcaatgtgaatgtattcacttaacagttccacaaatttatttattaactccgaggcacatacatcgtcggtattttttatggcaaactttactcttccagcatccgtttctaaaaaaatattaacgagttccatttatatcatccaatattattgaaatgacgttgatggacagatgatacaaataagaaggtacggtacctttgtccaccatctcctccaattcatgctctattttgtcattaactttaatgtatgaaaacagtacgccacatgcttccatgacagtgtgtaacactttggatacaaaatgtttgacattagtataattgttcaagactgtcaatctataatagatagtagctataatatattctatgatggtattgaagaagatgacaaccttggcatattgatcatttaacacagacatggtatcaacagatagcttgaatgaaagagaatcagtaattggaataagcgtcttctcgatagagtgtccgtataccaacatgtctgatattttgatgtattccattaaattatttagttttttctttttattctcgttaaacagcatttctgtcaacggaccccaacatcgttgaccgattaagttttgattgatttttccgtgtaaggcgtatctagtcagatcgtatagcctatccaataatccatcatctgtgcgtagatcacatcgtacactttttaattctctatagaagagcgacagacatctggagcaattacagacagcaatttctttattctctacagatgtaagatacttgaagacattcctatgatgatgcagaattttggataacacggtattgatggtatctgttaccataattcctttgatggctgatagtgtcagagcacaagatttccaatctttgacaatttttagcaccattatctttgttttgatatctatatcagacagcatggtgcgtctgacaacacagggattaagacggaaagatgaaatgattctctcaacatcttcaatagataccttgctattttttctggcattatctatatgtgcgagaatatcctctagagaatcagtatcctttttgatgatagtggatctcaatgacatgggacgtctaaaccttcttattctatcaccagattgcatggtgatttgtcttctttcttttatcataatgtaatctctaaattcatcggcaaattgtctatatctaaaatcataatatgagatgtttacctctacaaatatctgttcgtccaatgttaaagtatttacatcagttttgtattccaaattaaacatggcaacggatttaattttatattcctctattaagtcctcgtcgataataacagaatgtagataatcatttaatccatcgtacatggttggaagatgcttgttgacaaaatctttaattgtcttgatgaaggtgggactatatctaacatcttgattaataaaatttataacattgtccataggatactttgtaactagttttatacacatctcttcatcggtaagtttagacagaatatcgtgaacaggtggtatattatattcatcagatatacgaagaacaatgtccaaatctatattgtttaatatattatatagatgtagcgtagctcctacaggaatatctttaactaagtcaatgatttcatcaaccgttagatctattttaaagttaatcatataggcattgatttttaaaaggtatgtagccttgactacattctcattaattaaccattccaagtcactgtgtgtaagaagattatattctatcataagcttgactacatttggtcccgataccattaaagaattcttatgatataaggaaacagattttaggtactcatctactctacaagaattttggagagccttaacgatatcagtgacgtttattatttcaggaggaaaaaacctaacattgagaatatcggaattaatagcttccagatacagtgattttggcaatagtccgtgtaatccataatccagtaacacgagctggtgcttgctagacaccttttcaatgtttaatttttttgaaataagctttgataaagccttcctcgcaaattccggatacatgaacatgttggcgacatgattaagtattgttttttcattatttttatattttctcaacaagttctcaataccccaatagatgatagaatatcacccaatgcgtccatgttgtctatttccaacaggtcgctatatccaccaatagaagtttttccaaaaaagattctaggaacagttctaccaccagtaatttgttcaaaatagtcacgcaattcattttcgggtttaaattctttaatatcgacaatttcatacgctcctcttttgaaactaaacttatttagaatatccagtgcatttctacaaaaaggacatgtatacttgacaaaaattgtcactttgttattggccaacctttgttgtacaaattcctcggccattttaatatttaagtgatataaaactatctcgacttatttaactctttagtcgagatatatggacgcagatagctatatgatagccaactacagaaggcaaacgctataaaaaacataattacgacgagcatatttataaatatttttattcagcattacttgatatagtaatattaggcacagtcaaacattcaaccactctcgatacattaactctctcattttctttaacaaattctgcaatatcttcgtaaaaagattcttgaaactttttagaatatctatcgactctagatgaaatagcgttcgtcaacatactatgttttgtatacataaaggcgcccattttaacagtttctagtgacaaaatgctagcgatcctaggatcctttagaatcacatagattgacgattcgtctctcttagtaactctagtaaaataatcatacaatctagtacgcgaaataatattatccttgacttgaggagatctaaacaatctagttttgagaacatcgataagttcatcgggaatgacatacatactatctttaatagaactcttttcatccagttgaatggattcgtccttaaccaactgattaatgagatcttctattttatcattttccagatgatatgtatgtccattaaagttaaattgtgtagcgcttctttttagtctagcagccaatactttaacatcactaatatcgatatacaaaggagatgatttatctatggtattaagaattcgtttttcgacatccgtcaaaaccaattcctttttgcctgtatcatccagttttccatcctttgtaaagaaattattttctactagactattaataagactgataaggattcctccataattgcacaatccaaactttttcacaaaactagactttacaagatctacaggaatgcgtacttcaggttttttagcttgtgattttttcttttgcggacattttcttgtgaccaactcatctaccatttcattgattttagcagtgaaataagctttcaatgcacgggcactgatactattgaaaacgagttgatcttcaaattccgccatttaagttcaccaaacaacttttaaatacaaatatatcaatagtagtagaataagaactataaaaaaataataattaaccaataccaaccccaacaaccggtattattagttgatgtgactgttttctcatcacttagaacagatttaacaatttctataaagtctgtcaaatcatcttccggagaccccataaatacaccaaatatagcggcgtacaacttatccatttatacattgaatattggcttttctttatcgctatcttcatcatattcatcatcaatatcaacaagtcccagattacgagccagatcttcttctacattttcagtcattgatacacgttcactatctccagagagtccgataacgttagccaccacttctctatcaatgattagtttcttgagcgcgaaagtaatttttgtttccgttccggatctatagaagacgataggtgtgataattgccttggccaattgtctttctcttttactgagtgattctagttcaccttctatagatctgagaatggatgattctccagtcgaaacatattctaccatggatccgtttaatttgttgatgaagatggattcatccttaaatgttttctctgtaatagtttccaccgaaagactatgcaaagaatttggaatgcgttccttgtgcttaatgtttccatagacggcttctagaagttgatacaacataggactagccgcggtaacttttatttttagaaagtatccatcgcttctatcttgtttagatttatttttataaagtttagtctctccttccaacataataaaagtggaagtcatttgactagataaactatcagtaagttttatagagatagacgaacaattagcgtattgagaagcatttagtgtaacgtattcgatacattttgcattagatttactaatcgattttgcatactctataacacccgcacaagtctgtagagaatcgctagatgcagtaggtcttggtgaagtttcaactctcttcttgattaccttactcatgattaaacctaaataattgtactttgtaatataatgatatatattttcactttatctcatttgagaataaaaatgtttttgtttaaccactgcatgatgtacagatttcggaatcgcaaaccaccagtggttttattttatccttgtccaatgtgaattgaatgggagcggatgcgggtttcgtacgtagatagtacattcccgtttttagaccgagactccatccgtaaaaatgcatactcgttagtttggaataactcggatctgctatatggatattcatagattgactttgatcgatgaaggctcccctgtctgcagccatttttatgatcgtcttttgtggaatttcccaaatagttttataaactcgcttaatatcttctggaaggtttgtattctgaatggatccaccatctgccataatcctattcttgatctcatcattccataattttctctcggttaaaactctaaggagatgcggattaactacttgaaattctccagacaatactctccgagtgtaaatattactggtatacggttccaccgactcattatttcccaaaatttgagcagttgatgcagtcggcataggtgccaccaataaactatttctaagaccgtatgttctgattttatcttttagaggttcccaattccaaagatccgacggtacaacattccaaagatcatattgtagaataccgttactggcgtacgatcctacatatgtatcgtatggtccttccttctcagctagttcacaactcgcctctaatgcaccgtaataaatggtttcgaagatcttcttatttagatcttgtgcttccaggctatcaaatggataatttaagagaataaacgcgtccgctaatccttgaacaccaataccgataggtctatgtctcttattagagatttcagcttctggaataggataataattaatatctataattttattgagatttctgacaattactttgaccacatccttcagtttgagaaaatcaaatcgcccatctattacaaacatgttcaaggcaacagatgccagattacaaacggctacctcattagcatccgcatattgtattatctcagtgcaaagattactacacttgatagttcctaaattttgttgattactctttttgttacacgcatccttataaagaatgaatggagtaccagtttcaatctgagattctataatcgctttccagacgactcgagcctttattatagatttgtatctcctttctctttcgtatagtgtatacaatcgttcgaactcgtctccccaaacattgtccaatccaggacattcatccggacacatcaacgaccactctccgtcatccttcactcgtttcataaagagatcaggaatccaaagagctataaatagatctctggttctatgttcctcgtttcctgtattctttttaagatcgaggaacgccataatatcagaatgccacggttccaagtatatggccataactccaggccgtttgtttcctccctgatctatgtatctagcggtgttattataaactctcaacattggaataataccgtttgatataccattggtaccggagatatagcttccactggcacgaatattactaattgatagacctattccccctgccattttagagattaatgcgcatcgttttaacgtgtcatagataccctctatgctatcatcgatcatgttaagtagaaaacagctagacatttggtgacgactagttcccgcattaaataaggtaggagaagcgtgcgtaaaccatttttcagaaagtagattgtacgtctcaatagctgagtctatatcccattgatgaattcctactgcgacacgcattaacatgtgctgaggtctttcaacgatcttgttgtttattttcaacaagtaggatttttccaaagttttaaaaccaaaatagttgtatgaaaagtctcgttcgtaaataataaccgagttgagtttatccttatatttgttaactatatccatggtgatacttgaaataatcggagaatgtttcccatttttaggattaacatagttgaataaatcctccatcacttcactaaatagtttttttgtttccttgtgtagatttgatacggctattctggcggctagaatggcataatccggatgttgtgtagtacaagtggctgctatttcggctgccagagtgtccaattctaccgttgttactccattatatattccttgaataaccttcatagctattttaataggatctatatgatccgtgtttaagccataacataattttctaatacgagacgtgattttatcaaacatgacattttccttgtatccatttcgtttaatgacaaacatttttgttggtgtaataaaaaaattatttaacttttcattaatagggatttgacgtatgtagcgtacaaaatgatcgttcctggtatatagataaagagtcctatatatttgaaaatcgttacggctcgattaaactttaatgattgcatagtgaatatatcattaggatttaactccttgactatcatggcggcgccagaaattaccatcaaaagcattaatacagttatgccgatcgcagttaaaacggttatagcatccaccatttatatctaaaaattagatcaaagaatatgtgacaaagtcctagttgtatactgagaattgacgaaacaatgtttcttacatatttttttcttattagtaactgacttaatagtaggaactggaaagctagacttgattattctataagtatagatacccttccagataatgttctctttgataaaagttccagaaaatgtagaattttttaaaaagttatcttttgctattaccaagattgtgtttagacgcttattattaatatgagtgatgaaatccacaccgcctctagatatcgcctttatttccacattagatggtaaatccaatagtgaaactatctttttaggaatgtatggactcgcgtttagaggagtgaacgtcttgggcgtcggaaaggatgattcgtcaaacgaataaacaatttcacaaatggatgttaatgtattagtaggaaattttttgacgctagtggaattgaagattctaatggatgatgttctacctatttcatccgataacatgttaatttccgacaccaacggttttaatatttcgatgatatacggtagtctctctttcggacttatatagcttattccacaatacgagtcattatatactccaaaaaacaaaataactagtataaaatctgtatcgaatgggaaaaacgaaattatcgacataggtatagaatccggaacattgaacgtattaatacttaattctttttctgtggtaagtaccgataggttattgacattgtatggttttaaatattctataacttgagacttgatagatattagtgatgaattgaaaattatttttatcaccacgtgtgtttcaggatcatcgtcgacgcccgtcaaccaaccgaatggagtaaaataaatatcattaatatatgctctagatattagtatttttattaatcctttgattatcatcttctcgtaggcgaatgattccatgatcaagagtgatttgagaacatcctccggagtattaatgggcttagtaaacagtccatcgttgcaataataaaagttatccaagttaaaggatattatgcattcgtttaaagatatcacctcatctgacggagacaattttttggtaggttttagagactttgaagctacttgtttaacaaagttattcatcgtcgtctactattctatttaattttgtagttaatttatcacatatcacattaattgactttttggtccatttttccatacgtttatattcttttaatcctgcgttatccgtttccgttatatccagggatagatcttgcaagttaaatagaatgctcttaaataatgtcattttcttatccgctaaaaatttaaagaatgtataaacctttttcagagatttgaaactcttaggtggtgtcctagtacacaatatcataaacaaactaataaacattccacattcagattccaacagctgattaacttccacattaatacagcctattttcgctccaaatgtacattcgaaaaatctgaataaaacatcgatgtcacaatttgtattatccaatacagaatgtttgtgattcgtgttaaaaccatcggagaaggaatagaaataaaaattattatagtggtggaattcagttggaatattgcctccggagtcataaaaggatactaaacattgttttttatcataaattacacatttccaatgagacaaataacaaaatccaaacattacaaatctagaggtagaacttttaattttgtctttaagtatatacgataagatatgtttattcataaacgcgtcaaatttttcatgaatcgctaaggagtttaagaatctcatgtcaaattgtcctatataatccacttcggatccataagcaaactgagagactaagttcttaatacttcgattgctcatccaggctcctctctcaggctctattttcatcttgacgacctttggattttcaccagtatgtattcctttacgtgataaatcatcgattttcaaatccatttgtgagaagtctatcgccttagatactttttcccgtagtcgaggtttaaaaaaatacgctaacggtatactagtaggtaactcaaagacatcatatatagaatggtaacgcgtctttaactcgtcggttaactctttcttttgatcgagttcgtcgctactattgggtctgctcaggtgccccgactctactagttccaacatcataccgataggaatacaagacactttgccggcggttgtagatttatcatatttttccactacatatccgttacaatttgttaaaaatttagatacatctatattgctacataatccagctagtgaatatatatgacataataaattggtaaatcctagttctggtattttactaattactaaatctgtatatctttccatttatcatggaaaagaatttaccagatatcttcttttttccaaactgcgttaatgtattctcttacaaatattcacaagatgaattcagtaatatgagtaaaacggaacgtgatagtttctcattggccgtgtttccagttataaaacatagatggcataacgcacacgttgtaaaacataaaggaatatacaaagttagtacagaagcacgtggaaaaaaagtatctcctccatcactaggaaaacccgcacacataaacctaaccgcgaagcaatatatatacagtgaacacacaataagctttgaatgttatagttttctaaaatgtataacaaatacagaaatcaattcgttcgatgagtatatattaagaggactattagaagctggtaatagtttacagatattttccaattccgtaggtaaacgaacagatactataggtgtactagggaataagtatccatttagcaaaattccattggcctcattaactcctaaagcacaacgagagatattttcagcgtggatttctcatagacctgtagttttaactggaggaactggagtgggtaagacgtcacaggtacccaagttattgctttggtttaattatttatttggtggattctctactctagataaaatcactgactttcacgaaagaccagtcattctatctcttcctaggatagctttagttagattgcatagcaataccattttaaaatcattgggatttaaggtactagatggatctcctatttctttacggtacggatctataccggaagaattaataaacaaacaaccaaaaaaatatggaattgtattttctacccataagttatctctaacaaaactatttagttatggcactcttattatagacgaagttcatgagcatgatcaaataggagatattattatagcagtagcgagaaagcatcatacgaaaatagattctatgtttttaatgactgccacgttagaggatgacagggaacggctaaaagtatttttacctaatcccgcatttatacatattcctggagatacactgtttaaaattagcgaggtatttattcataataagataaatccatcttccagaatggcatacatagaagaagaaaagagaaatttagttactgctatacagatgtatactcctcctgatggatcatccggtatagtctttgtggcatccgttgcacagtgtcacgaatataaatcatatttagaaaaaagattaccgtatgatatgtatattattcatggtaaggtcttagatatagacgaaatattagaaaaagtgtattcatcacctaatgtatcgataattatttctactccttatttggaatccagcgttactatacgcaatgttacacacatttatgatatgggtagagtttttgtccccgctccttttggaggatcgcaacaatttatttctaaatctatgagagatcaacgaaaaggaagagtaggaagagttaatcctggtacatacgtctatttctatgatctgtcttatatgaagtctatacagcgaatagattcagaatttctacataattatatattgtacgctaataagtttaatctaacactccccgaagatttgtttataatccctacaaatttggatattctatggcgtacaaaggaatatatagactcgttcgatattagtacagaaacatggaataaattattatccaattattatatgaagatgatagagtatgctaaactttatgtactaagtcctattctcgctgaggagttggataactttgagaggacgggagaattaactagtattgtacgagaagccattttatctctaaatttacaaattaagattttaaattttaaacataaagatgatgatacgtatatacacttttgtaaaatattattcggtgtctataacggaacaaacgctactatatattatcatagacctctaacgggatatatgaatatgatttcagatactatatttgttcctgtagataataactaaaaattaaactctaatgaccacatctttttttagagatgaaaaattttccacatctccttttgtagacacgactaaacattttgcagaaaaaagtttattagtgtttagataatcgtatacttcatcagtgtagatagtaaatgtgaacagataaaaggtattcttgctcaatagattggtaaattccatagaatatattaatcctttcttcttgagatcccacatcatttcaaccagagacgttttatccaatgatttacctcgtactataccacatacaaaactagattttgcagtgacgtcgtacctggtattcctaccaaacaaaattttacttttagttcttttagaaaattctaaggtagaatctctatttgccaatatgtcatctatggaattaccactagcaaaaaatgatagaaatatatattgatacatcgcagctggttttgatctactatactttaaaaacgaatcagattccataattgcctgtatatcatcagctgaaaaactatgttttacacgtattccttcggcatttctttttaatgatatatcttgtttagacaatgataaagttatcatgtccatgagagacgcgtctccgtatcgtataaatatttcattagatgttagacgcttcattaggggtatacttctataaggtttcttaatcagtccatcattggttgcgtcaagaactactatcggatgttgttgggtatctctagtgttacacatggccttactaaagtttgggtaaataactatgatatctctattaattatagatgcatatatttcattcgtcaaggatattagtatcgacttgctatcgtcattaatacgtgtaatgtaatcatataaatcatgcgatagccaaggaaaatttaaatagatgttcatcatataatcgtcgctataattcatattaatacgttgacattgactaatttgtaatatagcctcgccacgaagaaagctctcgtattcagtttcatcgataaaggataccgttaaatataactggttgccgatagtctcatagtctattaagtggtaagtttcgtacaaatacagaatccctaaaatattatctaatgttggattaatctttaccataactgtataaaatggagacggagtcataactattttaccgtttgtacttactggaatagatgaaggaataatctccggacatgctggtaaagacccaaatgtctgtttgaagaaatccaatgttccaggtcctaatctcttaacaaaaattacgatattcgatcccgatatcctttgcattctatttaccagcatatcacgaactatattaagattatctatcatgtctattctcccaccgttatataaatcgcctccgctaagaaacgttagtatatccatacaatggaatacttcatttctaaaatagtattcgttttctaattctttaatgtgaaatcgtatactagaaagggaaaaattatctttgagttttccgttagaaaagaaccacgaaactaatgttctgattgcgtccgattccgttgctgaattaatggatttacaccaaaaactcatataacttctagatgtagaagcattcgctaaaaaattagtagaatcaaaggatataagtagatgttccaacaagtgagcaattcccaagatttcatctatatcattctcgaatccgaaattagaaattcccaagtagatatcctttttcatccgatcgttgatgaaaatacgaactttattcggtaagacaatcatttactaaggagtaaaataggaagtaatgttcgtatgtcgttatcatcgtataaattaaaggtgtgttttttaccattaagtgacattataattttaccaatattggaattataatataggtgtatttgcgcactcgcgacggttgatgcatcggtaaatatagctgtatctaatgttctagtcggtatttcatcatttcgctgtctaataatagcgttttctctatctgtttccattacagctgcctgaagtttattggtcggataatatgtaaaataataagaaatacatacgaataacaaaaataaaataagatataataaagatgccatttagagatctaattttgtttaacttgtccaaattcctacttacagaagatgaggaatcgttggagatagtgtcttccttatgtagaggatttgaaatatcttataatgacttgataacttactttccagataggaaataccataaatatatttataaagtatttgaacatgtagatttatcggaggaattaagtatggaattccatgatacaactctgagagatttagtctatcttagattgtacaagtattccaagtgtatacggccgtgttataaattaggagataatctaaaaggcatagttgttataaaggacaggaatatttatattagggaagcaaatgatgacttgatagaatatctcctcaaggaatacactcctcagatttatacatattctaatgagcgcgtccccataactggttcaaaattaattctttgtggattttctcaagttacatttatggcgtatacaacgtcgcatataacaacaaataaaaaggtagatgttctcgtttccaaaaaatgtatagatgaactagtcgatccaataaattatcaaatacttcaaaatttatttgataaaggaagcggaacaataaacaaaatactcaggaagatattttattcggtaacaggtggccaaactccataggtagctttttctatttcggattttagaatttccaaattcaccagcgatttatcggttttggtgaaatccaaggatttattaatgtccacaaatgccatttgttttgtctgtggattgtatttgaaaatggaaacgatgtagttagatagatgcgctgcgaagtttcctattagggttccgcgcttcacgtcacccagcatacttgaatcaccatcctttaaaaaaaatgataagatatcaacatggagtatatcatactcggattttaattcttctactgcatcactgacattttcacaaatactacaatacggtttaccgaaaataatcagtacgttcttcatttatgggtatcaaaaacttaaaatcgttactgctggaaaataaatcactgacgatattagatgataatttatacaaagtatacaatggaatatttgtggatacaatgagtatttatatagccgtcgccaattgtgtcagaaacttagaagagttaactacggtattcataaaatacgtaaacggatgggtaaaaaagggagggcatgtaaccctttttatcgatagaggaagtataaaaattaaacaagacgttagagacaagagacgtaaatattctaaattaaccaaggacagaaaaatgttagaattagaaaagtgtacatccgaaatacaaaatgttaccggatttatggaagaagaaataaaggcagaaatgcaattaaaaatcgataaactcacatttcaaatatatttatctgattctgataacataaaaatatcattgaatgagatactaacacatttcaacaataatgagaatgttacattattttattgtgatgaacgagacgcagaattcgttatgtgtctcgaggctaaaacacatttctctaccacaggagaatggccgttgataataagtaccgatcaggatactatgctatttgcatctgctgataatcatcctaagatgataaaaaacttaactcaactgtttaaatttgttccctcggcagaggataactatttagcaaaattaacggcgttagtgaatggatgtgatttctttcctggactctatggggcatctataacacccaccaacttaaacaaaatacaattgtttagtgattttacaatcgataatatagtcactagtttggcaattaaaaattattatagaaagactaactctaccgtagacgtgcgtaatattgttacgtttataaacgattacgctaatttagacgatgtctactcgtatgttcctccttgtcaatgcactgttcaagaatttatattttccgcattagatgaaaaatggaatgaatttaaatcatcttatttagaaagcgttccgttaccctgccaattaatgtacgcgttagaaccacgtaaggagattgatgtttcagaagttaaaactttatcatcttatatagatttcgaaaatactaaatcagatatcgatgttataaaatctatatcctcgatcttcggatattctaacgaaaactgtaacacgatagtattcggcatctataaggataatttactactgagtataaataattcattttactttaacgatagtctgttaataaccaatactaaaagtgataatataataaatataggttactagattaaaaatggtgttccaactcgtgtgctctacgtgcggcaaagatatttctcacgaacgatataaattgattatacgaaaaaaatcattaaaggatgtactcgtcagtgtaaagaacgaatgttgtaggttaaaattatctacacaaatagaacctcaacgtaacttaacagtgcaacctctattggatataaactaatatggatccggttaattttatcaagacatatgcgcctagaggttctattatttttattaattataccatgtcattaacaagtcatttgaatccatcgatagaaaaacatgtgggtatttattatggtacgttattatcggaacacttggtagttgaatctacctatagaaaaggagttcgaatagtcccattggatagtttttttgaaggatatcttagtgcaaaagtatacatgttagagaatattcaagttatgaaaatagcagctgatacgtcattaactttattgggtattccgtatggatttggtcataatagaatgtattgttttaaattggtagctgaatgttataaaaatgccggtattgatacatcgtctaaacgaatattaggtaaagatatttttctgagccaaaacttcacagacgataatagatggataaagatatatgattctaataatttaacattttggcaaattgattaccttaaagggtgagttaatatgcataactactcctccgttgttttttccctcgttctttttcttaacgttgtttgccatcactctcataatgtaaagatattctaaaatggtaaacttttgcatatcggacgcagaaattggtataaatgttgtaattgtattatttcccgtcaatggactagtcacagctccatcagttttatatcctttagagtatttctcactcgtgtctaacattctagagcattccatgatctgtttatcgttgatattggccggaaagatagattttttattttttattatattactattggcaattgtagatataacttctggtaaatatttttctaccttttcaatctcttctattttcaagccggctatatattctgctatattgttgctagtatcaataccttttctggctaagaagtcatatgtggtattcactatatcagttttaactggtagttccattagcctttccacttctgcagaataatcagaaattggttctttaccagaaaatccagctactataataggctcaccgatgatcattggcaaaatcctatattgtaccagattaatgagagcatatttcatttccaataattctgctagttcttgagacattgatttatttgatgaatctagttggttctctagatactctaccatttctgccgcatacaataacttgttagataaaatcagggttatcaaagtgtttagcgtggctagaatagtgggcttgcatgtattaaagaatgcggtagtatgagtaaaccgttttaacgaattatatagtctccagaaatctgtggcgttacatacatgagccgaatgacatcgaagattgtccaatatttttaatagctgctctttgtccattatttctatatttgactcgcaacaattgtagataccattaatcaccgattcctttttcgatgccggacaatagcacaattgtttagctttggactctatgtattcagaattaatagatatatctctcaatacagattgcactatacattttgaaactatgtcaaaaattgtagaacgacgctgttctgcagccatttaactttaaataatttacaaaaatttaaaatgagcatccgtataaaaatcgataaactgcgccaaattgtggcatatttttcagagttcagtgaagaagtgtctataaatgtagactcgacggatgagttaatgtatatttttgccgccttgggcggatctgtaaacatttgggcaattatacctctaagtgcatcagtgttttaccgaggagccgaaaatattgtgtttaatcttcctgtgtccaaggtaaaatcgtgtttgtgtagttttcacaatgatgccatcatagatatagaacctgatctggaaaataatctagtaaaactttctagttatcatgtagtaagtgtcgattgtaacaaggaactgatgcctattaggacagatactactatttgtctaagtatagatcaaaagaaatcttacgtgtttaattttcacaagtatgaagaaaaatgttgtggtagaaccgtcattcatctagaatggttgttgggctttatcaagtgtattagtcagcatcagcatctggctattatgtttaaagatgacaatattattatgaagactcctggtaatactgatgcgttttccagggaatattctatgactgaatgttctcaagaactacaaaagttttctttcaaaatagctatctcgtctctcaacaaactacgaggattcaaaaagagagtcaatgtttttgaaactagaatcgtaatggataatgacgataacattttaggaatgttgttttcggatagagttcaatcctttaagatcaacatctttatggcgtttttagattaatactttcaatgagataaatatgggtggcggagtaagtgttgagctccctaaacgggatccgcctccgggagtacccactgatgagatgttattaaacgtggataaaatgcatgacgtgatagctcccgctaagcttttagaatatgtgcatataggaccactagcaaaagataaagaggataaagtaaagaaaagatatccagagtttagattagtcaacacaggacccggtggtctttcggcattgttaagacaatcgtataatggaaccgcacccaattgctgtcgcacttttaatcgtactcattattggaagaaggatggaaagatatcagataagtatgaagagggtgcagtattagaatcgtgttggccagacgttcacgacactggaaaatgcgatgttgatttattcgactggtgtcagggggatacgttcgatagaaacatatgccatcagtggatcggttcagcctttaataggagtaatagaactgtagagggtcaacaatcgttaataaatctgtataataagatgcaaacattatgtagtaaagatgctagtgtaccaatatgcgaatcatttttgcattatttacgcgcacacaatacagaagatagcaaagagatgatcgattatattctaagacaacagtctgcggactttaaacagaaatatatgagatgtagttatcccactagagataagttagaagagtcattaaaatatgcggaacctcgagaatgttgggatccagagtgttcgaatgccaatgttaatttcttactaacacgtaattataataatttaggactttgcaatattgtacgatgtaataccagcgtgaacaacttacagatggataaaacttcctcattaagattgtcatgtggattaagcaatagtgatagattttctactgttcccgtcaatagagcaaaagtagttcaacataatattaaacactcgttcgacctaaaattgcatttgatcagtttattatctctcttggtaatatggatactaattgtagctatttaaatgggtgccgcggcaagcatacagacgacggtgaatacactcagcgaacgtatctcgtctaaattagaacaagaagcgaacgctagtgctcaaacaaaatgtgatatagaaatcggaaatttttatatccgacaaaaccatggatgtaacctcactgttaaaaatatgtgctctgcggacgcggatgctcagttggatgctgtgttatcagccgctacagaaacatatagtggattaacaccggaacaaaaagcatacgtgccagctatgtttactgctgcgttaaacattcagacgagtgtaaacactgttgttagagattttgaaaattatgtgaaacagacttgtaattctagcgcggtcgtcgataacaaattaaagatacaaaacgtaatcatagatgaatgttacggagccccaggatctccaacaaatttggaatttattaatacaggatctagcaaaggaaattgtgccattaaagcgttgatgcaattgacgactaaggccactactcaaatagcacctagacaagttgctggtacaggagttcagttttatatgattgttatcggtgttataatattggcagcgttgtttatgtactatgccaagcgtatgttgttcacatccaccaatgataaaatcaaacttattttagccaataaggaaaacgtccattggactacttacatggacacattctttagaacttctccgatggttattgctaccacggatatgcaaaactgaaaatatattgataatattttaatagattaacatggaagttatcgctgatcgtctagacgatatagtgaaacaaaatatagcggatgaaaaatttgtagattttgttatacacggtctagagcatcaatgtcctgctatacttcgaccattaattaggttgtttattgatatactattatttgttatagtaatttatatttttacggtacgtctagtaagtagaaattatcaaatgttgttggtggtgctagtcatcacattaactattttttattactttatactataatagtactagactgacttctaacaaacatctcacctgccataaataaatgcttgatattaaagtcttctatttctaacactattccatctgtggaaaataatactctgacattatcgctaattgacacatcggtgagtgatatgcctataaagtaataatcttctttgggcacatataccagtgtaccaggttctaacaacctatttactggtgctcctgtagcatactttttctttaccttgagaatatccatcgtttgcttggtcaatagcgatatgtgattttttatcaaccactcgaaaaagtaattggagtgttcatatcctctacgggctattgtctcatggccgtgtatgaaatttaagtaacacgactgtggtagatttgttctatagagccgattgccgcaaatagatagaactaccaatatgtctgtacaaatgttaaacattaattgattaacagaaaaaacaatgttcgttctgggaatagaaaccagatcaaaacaaaattcgttagaatatatgccacgtttatacatggaatataaaataactacagtttgaaaaataacagtatcatttaaacatttaacttgcggggttaatttcacaactttactgtttttgaactgttcaaaatatagcatcgatccgtgagaaatacgtttagccgcctttaatagaggaaatcccaccgcctttctggatctcaccaacgacgatagttctgaccagcaactcatttcttcatcatccacctgttttaacatataataggcaggagatagatatccgtcattgcaatattccttctcgtaggcacacaatctaatattgataaaatctccattctcttctctgcatttattatcttgtttcggtggctgattaggctgtagtcttggtttaggccttggtctatcgttgttgaatctattttggtcattaaatctttcatttcttcctggtatatttctatcacctcgtttggttggatttttgtctatattatcgtttgtaacatcggtacgggtattcatttatcacaaaaaaaacttctctaaatgagtctactgctagaaaacctcatcgaagaagataccatattttttgcaggaagtatatctgagtatgatgatttacaaatggttattgccggcgcaaaatccaaatttccaagatctatgctttctatttttaatatagtacctagaacgatgtcaaaatatgagttggagttgattcataacgaaaatatcacaggagcaatgtttaccacaatgtataatataagaaacaatttgggtctaggagatgataaactaactattgaagccattgaaaactatttcttggatcctaacaatgaagttatgcctcttattattaataatacggatatgactgccgtcattcctaaaaaaagtggtaggagaaagaataagaacatggttatcttccgtcaaggatcatcacctatcttgtgcattttcgaaactcgtaaaaagattaatatttataaagaaaatatggaatccgcgtcgactgagtatacacctatcggagacaacaaggctttgatatctaaatatgcgggaattaatgtcctgaatgtgtattctccttccacatccataagattgaatgccatttacggattcaccaataaaaataaactagagaaacttagtactaataaggaactagaatcgtatagttctagccctcttcaagaacccattaggttaaatgattttctgggactattggaatgtgttaaaaagaatattcctctaacagatattccgacaaaggattgattactataaatggagaatgttcctaatgtatactttaatcctgtgtttatagagcccacgtttaaacattctttattaagtgtttataaacacagattaatagttttatttgaagtattcgttgtattcattctaatatatgtattttttagatctgaattaaatatgttctttatgcctaaacgaaaaatacccgatcctattgatagattacgacgtgctaatctagcgtgtgaagacgataaattaatgatctatggattaccatggatgacaactcaaacatctgcgttatcaataaatagtaaaccgatagtgtataaagattgtgcaaagcttttgcgatcaataaatggatcacaaccagtatctcttaacgatgttcttcgcagatgatgattcattttttaagtatttggctagtcaagatgatgaatcttcattatctgatatattgcaaatcactcaatatctagactttctgttattattattgatccaatcaaaaaataaattagaagctgtgggtcattgttatgaatctctttcagaggaatacagacaattgacaaaattcacagactttcaagattttaaaaaactgtttaacaaggtccctattgttacagatggaagggtcaaacttaataaaggatatttgttcgactttgtgattagtttgatgcgattcaaaaaagaatcctctctagctaccaccgcaatagatcctgttagatacatagatcctcgtcgtgatatcgcattttctaacgtgatggatatattaaagtcgaataaagtgaacaataattaattctttattgtcatcatgaacggcggacatattcagttgataatcggccccatgttttcaggtaaaagtacagaattaattagacgagttagacgttatcaaatagctcaatataaatgcgtgactataaaatattctaacgataatagatacggaacgggactatggacgcatgataagaataattttgaagcattggaagcaactaaactatgtgatgtcttggaatcaattacagatttctccgtgataggtatcgatgaaggacagttctttccagacattgtttaattctgtgagcgtatggcaaacgaaggaaaaatagttatagtagccgcactcgatgggacatttcaacgtaaaccgtttaataatattttgaatcttattccattatctgaaatggtggtaaaactaactgctgtgtgtatgaaatgctttaaggaggcttccttttctaaacgattgggtgaggaaaccgagatagagataataggaggtaatgatatgtatcaatcggtgtgtagaaagtgttacatcgactcataatattatattttttatctaaaaaactaaaaataaacattgattaaattttaatataatacttaaaaatggatgttgtgtcgttagataaaccgtttatgtattttgaggaaattgataatgagttagattacgaaccagaaagtgcaaatgaggtcgcaaaaaaactgccgtatcaaggacagttaaaactattactaggagaattattttttcttagtaagttacagcgacacggtatattagatggtgccaccgtagtgtatataggatctgctcccggtacacatatacgttatttgagagatcatttctataatttaggagtgatcatcaaatggatgctaattgacggccgccatcatgatcctattttaaatggattgcgtgatgtaactctagtgactcggttcgttgatgaggaatatctacgatccatcaaaaaacaactgcatccttctaagattattttaatttctgatgtaagatccaaacgaggaggaaatgaacctagtacggcggatttactaagtaattacgctctacaaaatgtcatgattagtattttaaaccccgtggcatctagtcttaaatggagatgcccgtttccagatcaatggatcaaggacttttatatcccacacggtaataaaatgttacaaccttttgctccttcatattcagctgaaatgagattattaagtatttataccggtgagaacatgagactgactcgagttaccaaattagacgctgtaaattatgaaaaaaagatgtactaccttaataagatcgtccgtaacaaagtagttgttaactttgattatcctaatcaggaatatgactattttcacatgtactttatgctgaggaccgtgtactgcaataaaacatttcctactactaaagcaaaggtactatttctacaacaatctatatttcgtttcttaaatattccaacaacatcaactgaaaaagttagtcatgaaccaatacaacgtaaaatatctagcaaaaattctatgtctaaaaacagaaatagcaagagatccgtacgcggtaataaatagaaacgtactactgagatatactaccgatatagagtataatgatttagttactttaataaccgttagacataaaattgattctatgaaaactgtgtttcaggtatttaacgaatcatccataaattatactccggttgatgatgattatggagaaccaatcattataacatcgtatcttcaaaaaggtcataacaagtttcctgtaaattttctatacatagatgtggtaatatctgacttatttcctagctttgttagactagatactacagaaactaatatagttaatagtgtactacaaacaggcgatggtaaaaagactcttcgtcttcccaaaatgttagagacggaaatagttgtcaagattctctatcgccctaatataccattaaaaattgttagatttttccgcaataacatggtaactggagtagagatagccgatagatctgttatttcagtcgctgattaatcaattagtagagatgagataagaacattataataattaataatattatcttatatcttatcttatatcttatatcttgtttagaaaaatgctaatattaaaatagctaacgctagtaatccaatcggaagccatttgatatctataatagggtatctaatttcctgatttaaatagcggacagctatattctcggtagctactcgtttggaatcacaaacattatttacatctaatttactatctgtaatggaaacgtttcccaatgaaatggtacaatccgatacattgcattttgttatatttttttttaaagaggctggtaacaacgcatcgcttcgtttacatggctcgtaccaacaataatagggtaatcttgtatctattcctatccgtactatgcttttatcaggataaatacatttacatcgtatatcgtctttgttagcatcacagaatgcataaatttgttcgtccgtcatgataaaaatttaaagtgtaaatataactattatttttatagttgtaataaaaagggaaatttgattgtatactttcggttctttaaaagaaactgacttgataaaaatggctgtaatctctaaggttacgtatagtctatatgatcaaaaagagattaatgctacagatattatcattagtcatgttaaaaatgacgacgatatcggtaccgttaaagatggtagactaggtgctatggatggggcattatgtaaaacttgtgggaaaacggaattggaatgtttcggtcactggggtaaagtaagtatttataaaactcatatagttaagcctgaatttatttcagaaattattcgtttactgaatcatatatgtattcactgcggattattgcgttcacgagaaccgtattccgacgatattaacctaaaagagttatcgggacacgctcttaggagattaaaggataaaatattatccaagaaaaagtcatgttggaacagcgaatgtatgcaaccgtatcaaaaaattactttttcaaagaaaaaggtttgtttcgtcaacaagttggatgatattaacgttcctaattctctcatctatcaaaagttaatttctattcatgaaaagttttggccattattagaaattcatcaatatccagctaacttattttatacagactactttcccatccctccgctgattattagaccggctattagtttttggatagatagtatacccaaagaaaccaatgaattaacttacttattaggtatgatcgttaagaattgtaacttgaatgctgatgaacaggttatccagaaggcggtaatagaatacgatgatattaaaattatttctaataacactaccagtatcaatttatcatatattacatccggcaaaaataatatgattagaagttatatcgtcgcccgacgaaaagatcagaccgctagatctgtaattggtcccagtacatctatcaccgttaatgaggtaggaatgcccgcatatattagaaatacacttacagaaaagatatttgttaatgcctttacagtggataaagttaaacaactattagcgtcaaaccaagttaaattttactttaataaacgattaaaccaattaacaagaatacgccaaggaaagtttattaaaaataaaatacatttattgcctggtgattgggtagaagtagctgttcaagaatatacaagtattatttttggaagacagccgtctctacatagatacaacgtcatcgcttcatctatcagagctaccgaaggagatactatcaaaatatctcccggaattgccaactctcaaaatgctgatttcgacggggatgaggaatggatgatattagaacaaaatcctaaagctgtaattgaacaaagtattcttatgtatccgacgacgttactcaaacacgatattcatggagcccccgtttatggatctattcaagatgaaatcgtagcagcgtattcattgtttaggatacaagatctttgtttagatgaagtattgaacatcttggggaaatatggaagagagttcgatcctaaaggtaaatgtaaattcagcggtaaagatatctatacttacttgataggtgaaaagattaattatccgggtctcttaaaggatggtgaaattattgcaaacgacgtagatagtaattttgttgtggctatgaggcatctgtcattggctggactcttatccgatcataagtcgaacgtggaaggtatcaactttattatcaagtcatcttatgtttttaagagatatctatctatttacggttttggggtgacattcaaagatctgagaccaaattcgacgttcactaataaattggaggccatcaacgtagaaaaaatagaacttatcaaagaagcatacgccaaatatctcaacgatgtaagagacgggaaaatagttccattatctaaagctttagaggcggactatgtggaatccatgttatccaacttgacaaatcttaatatccgagagatagaagaacatatgagacaaacgctgatagataatccagataataacctcctgaaaatggccaaagcgggttataaagtaaatcccacagaactaatgtatattctaggtacgtatggacaacaaaggattgatggtgaaccagcagagactcgagtattgggtagagttttaccttactatcttccagactctaaggatccagaaggaagaggttatattcttaattctttaacaaaaggattaacgggttctcaatattacttttcgatgctggttgcaagatctcaatctactgatatcgtctgtgaaacatcacgtaccggaacactggctagaaaaatcattaaaaagatggaggatatggtggtcgacggatacggacaagtagttataggtaatacgctcatcaagtacgccgccaattataccaaaattctaggctcagtatgtaaacctgtagatcttatctatccagatgagtccatgacttggtatttggaaattagtgctctgtggaataaaataaaacagggattcgtttactctcagaaacagaaacttgcaaagaagacattggcgccgtttaatttcctagtattcgtcaaacccaccactgaggataatgctattaaggttaaggatctgtacgatatgattcataacgtcattgatgatgtgagagagaaatacttctttacggtatctaatatagattttatggagtatatattcttgacgcatcttaatccttctagaattagaattacaaaagaaacggctatcactatctttgaaaagttctatgaaaaactcaattatactctaggtggtggaactcctattggaattatttctgcacaggtattgtctgagaagtttacacaacaagccctgtccagttttcacactactgaaaaaagtggtgccgtcaaacaaaaacttggtttcaacgagtttaataacttgactaatttgagtaagaataagaccgaaattatcactctggtatccgatgatatctctaaacttcaatctgttaagattaatttcgaatttgtatgtttgggagaattaaatccagacatcactcttcgaaaagaaacagataggtatgtagtagatataatagtcaatagattatacatcaagagagcagaaataaccgaattagtcgtcgaatatatgattgaacgatttatctcctttagcgtcattgtaaaggaatggggtatggagacattcattgaggacgaggataatattagatttactgtctatctaaatttcgttgaaccggaagaattgaatcttagtaagtttataatggttcttccgggggcagccaacaagggcaagattagtaaattcaagattcctatctctgactatacgggttatgacgacttcaatcaaacaaaaaagctcaataagatgactgtagaactcatgaatctaaaagaattgggttctttcgatttggaaaacgtcaacgtgtatcctggagtatggaatacatacgatatcttcggtatcgaggccgctcgtgaatacttgtgcgaagccatgttaaacacctatggagaagggttcgattatctgtatcagccttgtgatcttctcgctagtttactatgtgctagttacgaaccagaatcagtgaataaattcaagttcggcgcagctagtactcttaagagagctacgttcggagacaataaagcattgttaaacgcggctcttcataaaaagtcagaacctattaacgataatagtagctgccacttttttagcaaggtccctaatataggaactggatattacaaatactttatcgacttgggtcttctcatgagaatggaaaggaaactatctgataagatatcttctcaaaagatcaaggaaatggaagaaacagaagacttttaattcttatcaataacatatttttctatgatctgtcttttaaacgatggattttccacaaatgcgcctctcaagtccctcatagaatgatacacgtataaaaaatatagcataggcaatgactccttatttttagacattagatatgccaaaatcatagccccgcttctatttactcccgcagcacaatgaaccaacacgggctcgtttcgttgatcacatttagataaaaaggcggttacgtcgtcaaaatatttactaatatcggtagttgtatcatctaccaacggtatatgaataatattaatattagagttaggtaatgtatatttatccatcgtcaaatttaaaacatatttgaacttaacttcagatgatggtgcatccatagcatttttataatttcccaaatacacattattggttacccttgtcattatagtgggagatttggctctgtgcatatctccagttgaacgtagtagtaagtatttatacaaacttttcttatccatttataacgtacaaatggataaaactactttatcggtaaacgcgtgtaatttagaatacgttagagaaaaggctatagtaggcgtacaagcagccaaaacatcaacacttatattctttgttattatattggcaattagtgcgctattactctggtttcagacgtctgataatccagtctttaatgaattaacgagatatatgcgaattaaaaatacggttaacgattggaaatcattaacggatagcaaaacaaaattagaaagtgatagaggtagacttctagccgctggtaaggatgatatattcgacttcaaatgtgtggatttcggcgcctattttatagctatgcgattggataagaaaacatatctgccgcaagctattaggcgaggtactggagacgcgtggatggttaaaaaggcggcaaaggtcgatccatctgctcaacaattttgtcagtatttgataaaacacaagtctaataatgttattacttgtggtaatgagatgttaaatgaattaggttatagcggttattttatgtcaccgcattggtgttccgattttagtaatatggaatagtgttagataaatgcggtaacgaatgttcctgtaaggaaccataacagcttagatttaacgttaaagatgagcataaacataataaacaaaattacaatcaaacttataacattaatatcaaacaatccaaaaaatgaaatcagtggagtagtaaacgcgtacataactcctggataacgtttagcagctgccgttcctattctagaccaaaaatttggtttcatgttttcgaaacggtattctgcaacaagtcggggatcgtgttctacatatttggcggcattatccagtatctgcctattgatcttcatttcgttttcgattctggctatttcaaaataaaatcccgatgatagacctccagactttataatttcatctacgatgttcagcgccgtagtaactctaataatataggctgataagctaacatcataccctcctgtatatgtgaatatggcatgatttttgtccattacaagctcggttttaactttattgcctgtaataatttctctcatctgtaggatatctatttttttgtcatgcattgccttcaagacgggacgaagaaacgtaatatcctcaataacgttatcgttttctacaataactacatattctacctttttattttctaactcggtaaaaaaattagaatcccatagggctaaatgtctagcgatatttcttttcgtttcttctgtacacatagtgttacaaaaccctgaaaagaagtgagtatacttgtcatcatttctaatgtttcctccagtccactgtataaacgcataatccttgtaatgatctggatcatccttgactaccacaacatttcttttttctggcataacttcgttgtcctttacatcatcgaacttctgatcattaatatgctcatgaacattaggaaatgtttctgatggaggtctatcaataactggcacaacaataacaggagttttcaccgccgccatttagttattgaaattaatcatatacaactctttaatacgagttatattttcgtctatccattgtttcacattgacatatttcgacaaaaagatataaaatgcgtattccaatgcttctctgtttaatgaattactaaaatatacaaacacgtcactgtctggcaataaatgatatcttagaatattgtaacaatttattttgtattgcacatgttcgtgatctatgagttcttcttcgaatggcataggatctccgaatctgaaaacgtataaataggagttagaataataatatttgagagtattggtaatatataaactctttagcggtataattagtttttttctctcaatttctatttttagatgtgatggaaaaatgactaattttgtagcattagtatcatgaactctaatcaaaatcttaatatcttcgtcacacgttagctctttgaagtttttaagagatgcatcagttggttctacagatggagtaggtgcaacaattttttgttctacacatgtatgtactggagccattgttttaactataatggtgcttgtatcgaaaaactttaatgcagatagcggaagctcttcgccgcgactttctacatcgtaattgggttctaacgccgatctctgaatggatactagttttctaagttctaatgtgattctctgaaaatgtaaatccaattcctccggcattatagatgtgtatacatcggtaaataaaactatagtatccaacgatcccttctcgcaaattctagtcttaaccaaaaaatcgtatataaccacggagatggcgtatttaagagtggattcttctaccgttttgttcttggatgtcatataagaaactataaagtccgcactactgttaagaatgattactaacgcaactatatagttcaaattaagcattttggaaacataaaataactctgtagacgatacttgactttcgaataagtttgcagacaaacgaagaaagaacagacctctcttaatttcagaagaaaactttttttcgtattcctgacgtctagagtttatatcaataagaaagttaagaattagtcggttaatgttgtatttcattacccaagtttgagatttcataatattatcaaaagacatgataatattaaagataaagcgctgactatgaacgaaatagctatatggttcgctcaaaaatatagtcttgttaaacgtggaaacgataactgtatttttaatcacgtcagcggcatctaaattaaatataggtatatttattccacacactctacaatatgccacaccatcttcataataaataaattcgttagcaaaattattaattttagtgaaatagttagcgtcaactttcatagcttccttcaatctaatttgatgctcacacggtgcgaattccactctaacatcccttttccatgcctcaggttcatcgatctctataatatctagttttttgcgtttcacaaacacaggctcgtctctcgcgatgagatctgtatagtaactatgtaaatgataactagatagaaagatgtagctatatagatgacgatcctttaagagaggtataataactttaccccaatcagatagactgttgttatggtcttcggaaaaagaatttttataaatttttccagtattttccaaatatacgtacttaacatctaaaaaatccttaatgataataggaatggataatccgtctattttataaagaaatacatatcgcacattatacttttttttggaaatgggaataccgatgtgtctacataaatatgcaaagtctaaatattttttagagaatcttagttggtccaaattcttttccaagtacggtaatagatttttcatattgaacggtatcttcttaatctctggttctagttccgcattaaatgatgaaactaagtcactatttttataactaacgattacatcacctctaacatcatcatttaccagaatactgatcttcttttgtcgtaaatacatgtctaatgtgttaaaaaaaagatcatacaagttatacgtcatttcatctgtggtattcttgtcattgaaggataaactcgtactaatctcttctttaacagcctgttcaaatttatatcctatatacgaaaaaatagcaaccagtgtttgatcatccgcgtcaatattctgttctatcgtagtgtataacaatcgtatatcttcttctgtgatagtcgatacgttataaaggttgataacgaaaatatttttatttcgtgaaataaagtcatcgtaggattttggacttatattcgcgtctagtaaatatgcttttatttttggaatgatctcaattagaatagtctctttagagtccatttaaagttacaaacaactaggaaattggtttatgatgtataatttttttagtttttatagattctttattctatacttaaaaaatgaaaataaatacaaaggttcttgagggttgtgttaaattgaaagcgagaaataatcataaattatttcattatcgcgatatccgttaagtttgtatcgtaatggcgtggtcaattacaaataaagcggatactagtagcttcacaaagatggctgaaatcagagctcatctaaaaaatagcgctgaaaataaagataaaaacgaggatattttcccggaagatgtaataattccatctactaagcccaaaaccaaacgagccactactcctcgtaaaccagcggctactaaaagatcaaccaaaaaggaggaagtggaagaagaagtagttatagaggaatatcatcaaacaactgaaaaaaattctccatctcctggagtcagcgacattgtagaaagcgtggctgctgtagagctcgatgatagcgacggggatgatgaacctatggtacaagttgaagctggtaaagtaaatcatagtgctagaagcgatctttctgacctaaaggtggctaccgacaatatcgttaaagatcttaagaaaattattactagaatctctgcagtatcgactgttctagaggatgttcaagcagctggtatctctagacaatttacttctatgactaaagctattacaacactatctgatctagtcaccgagggaaaatctaaagttgttcgtaaaaaagttaaaacttgtaagaagtaaatgcgtgcacttttttataaagatggtaaactctttaccgataataattttttaaatcctgtatcagacgataatccagcgtatgaggttttgcaacatgttaaaattcctactcatttaacagatgtagtagtatatgaacaaacgtgggaggaggcgttaactagattaatttttgtgggaagcgattcaaaaggacgtagacaatacttttacggaaaaatgcatgtacagaatcgcaacgctaaaagagatcgtatttttgttagagtatataacgttatgaaacgaattaattgttttataaacaaaaatataaagaaatcgtccacagattccaattatcagttggcggtttttatgttaatggaaactatgttttttattagatttggtaaaatgaaatatcttaaggagaatgaaacagtagggttattaacactaaaaaataaacacatagaaataagtcccgatgaaatagttatcaagtttgtaggaaaggacaaagtttcacatgaatttgttgttcataagtctaatagactatataaaccgctattgaaactgacggatgattctagtcccgaagaatttctgttcaacaaactaagtgaacgaaaggtatacgaatgtatcaaacagtttggtattagaatcaaggatctccgaacgtatggagtcaattatacgtttttatataatttttggacaaatgtaaagtccatatctcctcttccatcaccaaaaaagttaatagcgttaactatcaaacaaactgctgaagtggtaggtcatactccatcaatttcaaaaagagcttacatggcaacgactattttagaaatggtaaaggataaaaattttttagatgtagtatctaaaactacgttcgatgaattcctatctatagtcgtagatcacgttaaatcatctacggatggatgatatagatctttacacaaataattacaagaccgataaatggaaatggataagcgtatgaaatctctcgcaatgacagctttcttcggagagctaaacacattagatattatggcattgataatgtctatatttaaacgccatccaaacaataccattttttcagtggataaggatggtcagtttatgattgatttcgaatacgataattataaggcttctcaatatttggatctgaccctcactccgatatttggagatgaatgcaagactcacgcatcgagtatagccgaacaattggcgtgtgcggatattattaaagaggatattagcgaatatatcaaaactactccccgtcttaaacgatttataaaaaaataccgcaatagatcagatactcgtatcagtcgagatacagaaaagcttaaaatagctctagctaaaggcatagattacgaatatataaaagacgcttgttaataagtaaatgaaaaaaaactagtcgtttataataaaacacgatatggatgccaacgtagtatcatcttctactattgcaacgtatatagacgctttagcgaagaatgcttcagaattagaacagaggtctaccgcatacgaaataaataatgaattggaactagtatttattaagccgccattgattactttgacaaatgtagtgaatatctctacgattcaggaatcgtttattcgatttaccgttactaataaggaaggtgttaaaattagaactaagattccattatctaaggtacatggtctagatgtaaaaaatgtacagttagtagatgctatagataacatagtttgggaaaagaaatcattagtgacggaaaatcgtcttcacaaagaatgcttgttgagactatcgacagaggaacgtcatatatttttggattacaagaaatatggatcctctatccgactagaattagtcaatcttattcaagcaaaaacaaaaaactttacgatagactttaagctaaaatattttctaggatccggtgcccaatctaaaagttctttgttgcacgctattaatcatccaaagtcaaggcctaatacatctctggaaatagaattcacacctagagacaatgaaacagttccatatgatgaactaataaaggaattgacgactctatcacgtcatatatttatggcttctccagagaatgtaattctttctccgcctattaacgcgcctataaaaacctttatgttgcctaaacaagatatagtaggtctggatctggaaaatctatatgccgtaactaagactgacggcattcctataactatcagagttacatcaaacgggttgtattgttattttacacatcttggttatattattagatatcctgttaagagaataatagattccgaagtagtagtctttggtgaggcagttaaggataagaactggaccgtatatctcattaagctaatagagcccgtgaatgcaatcaatgatagactagaagaaagtaagtatgttgaatctaaactagtggatatttgtgatcggatagtattcaagtcaaagaaatacgaaggtccgtttactacaactagtgaagtcgtcgatatgttatctacatatttaccaaagcaaccagaaggtgttattctgttctattcaaagggacctaaatctaacattgattttaaaattaaaaaggaaaatactatagaccaaactgcaaatgtagtatttaggtacatgtccagtgaaccaattatctttggagaatcgtctatctttgtagagtataagaaatttagcaacgataaaggctttcctaaagaatatggttctggtaagattgtgttatataacggcgttaattatctaaataatatctattgtttggaatatattaatacacataatgaagtgggtattaagtccgtggttgtacctattaagtttatagcagaattcttagttaatggagaaatacttaaacctagaattgataaaaccatgaaatatattaactcagaagattattatggaaatcaacataatatcatagtcgaacatttaagagatcaaagcatcaaaataggagatatctttaacgaggataaactatcggatgtgggacatcaatacgccaataatgataaatttagattaaatccagaagttagttattttacgaataaacgaactagaggaccgttgggaattttatcaaactacgtcaagactcttcttatttctatgtattgttccaaaacatttttagacgattccaacaaacgaaaggtattggcgattgattttggaaacggtgctgacctggaaaaatacttttatggagagattgcgttattggtagcgacggatccggatgctgatgctatagctagaggaaatgaaagatacaacaaattaaactctggaattaaaaccaagtactacaaatttgactacattcaggaaactattcgatccgatacatttgtctctagtgtcagagaagtattctattttggaaagtttaatatcatcgactggcagtttgctatccattattcttttcatccgagacattatgctaccgtcatgaataacttatccgaactaactgcttctggaggcaaggtattaatcactaccatggacggagacaaattatcaaaattaacagataaaaagacttttataattcataagaatttacctagtagcgaaaactatatgtctgtagaaaaaatagctgatgatagaatagtggtatataatccatcaacaatgtctactccaatgactgaatacattatcaaaaagaacgatatagtcagagtgtttaacgaatacggatttgttcttgtagataacgttgatttcgctacaattatagaacgaagtaaaaagtttattaatggcgcatctacaatggaagatagaccgtctacaaaaaactttttcgaactaaatagaggagccattaaatgtgaaggtttagatgtcgaagacttacttagttactatgttgtttatgtcttttctaagcggtaaataataatatggtatgggttctgatatccccgttctaaatgcattaaataattccaatagagcgatttttgttcctataggaccttccaactgtggatactctgtattgttaatagatatattaatacttttgtcgggtaacagaggttctacgtcttctaaaaataaaagttttataacatctggcctgttcataaataaaaacttggcgattctatatatactcttattatcaaatctagccattgtcttatagatgtgagctactgtaggtgtaccatttgattttctttctaatactatatatttctctcgaagaagttcttgcacatcatctgggaataaaatactactgttgagtaaatcagttattttttttatatcgatattgatggacatttttatagttaaggataataagtatcccaaagtcgataacgacgataacgaagtatttatacttttaggaaatcacaatgactttatcagattaaaattaacaaaattaaaggagcatgtatttttttctgaatatattgtgactccagatacatatggatctttatgcgtcgaattaaatgggtctagttttcagcacggtggtagatatatagaggtggaggaatttatagatgctggaagacaagttagatggtgttctacatccaatcatatatctaaagatatacccgaagatatgcacactgataaatttgtcatttatgatatatacacttttgacgctttcaagaataaacgattggtattcgtacaggtacctccgtcgttaggagatgatagtcatttgactaatccgttattgtctccgtattatcgtaattcagtagccagacaaatggtcaataatatgatttttaatcaagattcatttttaaaatatttattagaacatctgattagaagccactatagagtttctaaacatataacaatagttagatacaaggataccgaagaattaaatctaacgagaatatgttataatagagataagtttaaggcgtttgtattcgcttggtttaacggcgtttcggaaaatgaaaaggtactagatacgtataaaaaggtatctaatttgatataatgaattcagtgactgtatcacacgcgccatatactattacttatcacgatgattgggaaccagtaatgagtcaattggtagagttttataacgaagtagccagttggctgctacgagacgagacgtcgcctattcctgataagttctttatacagttgaaacaaccgcttagaaataaacgagtatgtgtgtgcggtatagatccgtatccgaaagatggaactggtgtaccgttcgaatcaccaaattttacaaaaaaatcaattaaggagatagcttcatctatatctagattaaccggagtaattgattataaaggttataaccttaatataatagacggggttataccctggaattattacttaagttgtaaattaggagaaacaaaaagtcacgcgatctactgggataagatttccaagttactgctgcagcatataactaaacacgttagtgttctttattgtttgggtaaaacagatttctcgaatatacgggcaaagttagaatccccggtaactaccatagtcggatatcatccagcggctagagaccgccaattcgagaaagatagatcatttgaaattatcaacgttttactggaattagacaacaaggcacctataaattgggctcaagggtttatttattaatgctttagtgaaattttaacttgtgttctaaatggatgcggctattagaggtaatgatgttatctttgttcttaagactataggtgtcccgtcagcgtgcagacaaaatgaagatccaagatttgtagaagcatttaaatgcgacgagttagaaagatatattgagaataatccagaatgtacactattcgaaagtcttagggatgaggaagcatactctatagtcagaattttcatggatgtagatttagacgcgtgtctagacgaaatagattatttaacggctattcaagattttattatcgaggtgtcaaactgtgtagctagattcgcgtttacagaatgcggtgccattcatgaaaatgtaataaaatccatgagatctaatttttcattgactaagtctacaaatagagataaaacaagttttcatattatctttttagacacgtataccactatggatacattgatagctatgaaacgaacactattagaattaagtagatcatctgaaaatccactaacaagatcgatagacactgccgtatataggagaaaaacaactcttcgggttgtaggtactaggaaaaatccaaattgcgacactattcatgtaatgcaaccaccgcatgataatatagaagattacctattcacttacgtggatatgaacaacaatagttattacttttctctacaacaacgattggaggatttagttcctgataagttatgggaaccagggtttatttcattcgaagacgctataaaaagagtttcaaaaatattcattaattctataataaactttaatgatctcgatgaaaataattttacaacggtaccactggtcatagattacgtaacaccttgtgcattatgtaaaaaacgatcgcataaacatccgcatcaactatcgttggaaaatggtgctattagaatttacaaaactggtaatccacatagttgtaaagttaaaattgttccgttggatggtaataaactgtttaatattgcacaaagaattttagacactaactctgttttattaaccgaacgaggagaccatatagtttggattaataattcatggaaatttaacagcgaagaacccttgataacaaaactaattttgtcaataagacatcaactacctaaggaatattcaagcgaattactctgtccgaggaaacgaaagactgtagaagctaacatacgagacatgttagtagattcagtggagaccgatacctatccggataaacttccgtttaaaaatggtgtattggacctggtagacggaatgttttactctggagatgatgctaaaaaatatacgtgtactgtatcaaccggatttaaatttgacgatacaaagttcgtcgaagacagtccagaaatggaagagttaatgaatatcattaacgatatccaaccattaacggatgaaaataagaaaaatagagagctatatgaaaaaacattatctagttgtttatgcggtgctaccaaaggatgtttaacattcttttttggagaaactgcaactggaaagtcgacaaccaaacgtttgttaaagtctgctatcggtgacctgtttgttgagacgggtcaaacaattttaacagatgtattggataaaggacctaatccatttatcgctaacatgcatttgaaaagatctgtattctgtagcgaactacctgattttgcatgtagtgggtcaaagaaaatcagatctgataatattaaaaagttgacagaaccttgtgtcattggaagaccgtgtttctccaataaaattaataatagaaaccatgcgacaatcattatcgatactaattacaaacctgtttttgataggatagataacgcattaatgagaagaattgccgtcgtgcgattcagaacacacttttctcaaccttctggtagagaggctgctgaaaataatgacgcgtacgataaagtcaaactattagacgaggggttagatggtaaaatacaaaataatagatatagattcgcatttctatacttgttggtgaaatggtacaaaaaatatcatgttcctattatgaaactatatcctacaccggaagagattcctgactttgcattctatctcaaaataggtactctgttagtatctagctctgtaaagcatattccattaatgacggacctctccaaaaagggatatatattgtacgataatgtggttactcttccgttgactactttccaacagaaaatatccaagtattttaattctagactatttggacacgatatagagagcttcatcaatagacataagaaatttgccaatgttagtgatgaatatctgcaatatatattcatagaggatatttcatctccgtaaatatatgctcatatatttatagaagatatcacatatctaaatgaataccggaatcatagatttatttgataatcatgttgatagtataccaactatattacctcatcagttagctactctagattatctagttagaactatcatagatgagaacagaagcgtgttattgttccatattatgggatcaggtaaaacaataatcgctttgttgttcgccttggtagcttccagatttaaaaaggtttacattctagtgccgaacatcaacatcttaaaaattttcaattataatatgggtgtagctatgaacttgtttaatgacgaattcatagctgagaatatctttattcattccacaacaagtttttattctcttaattataacgataacgtcattaattataacggattatctcgctacaataactctatttttatcgttgatgaggcacataatatctttgggaataatactggagaacttatgaccgtgataaaaaataaaaacaagattccttttctactattgtctggatctcccattactaacacacctaatactctgggtcatattatagatttaatgtccgaagagacgatagattttggtgaaattattagtcgtggtaagaaagtaattcagacacttcttaacgaacgaggtgtgaatgtacttaaggatttgcttaaaggaagaatatcatattacgaaatgcctgataaagatctaccaacgataagatatcacggacgtaagtttctagatactagagtagtatattgtcacatgtctaaacttcaagagagagattatatgattactagacgacagctatgttatcatgaaatgtttgataaaaatatgtataacgtgtcaatggcagtattgggacaacttaatctgatgaataatttagatactttatttcaggaacaggataaggaattgtacccaaatctgaaaataaataatggcgtgttatacggagaagaattggtaacgttaaacattagttccaaatttaaatactttattaatcggatacagacactcaacggaaaacattttatatacttttctaattctacatatggcggattggtaattaaatatatcatgctcagtaatggatattctgaatataatggttctcagggaactaatccacatatgataaacggcaaaccaaaaacatttgctatcgttactagtaaaatgaaatcgtctttagaggatctattagatgtgtataattctcctgaaaacgatgatggtagtcaattgatgtttttgttttcatcaaacattatgtccgaatcctatactctaaaagaggtaaggcatatttggtttatgactatcccagatactttttctcaatacaaccaaattcttggacgatctattagaaaattctcttacgccgatatttctgaaccagttaatgtatatcttttagccgccgtatattccgatttcaatgacgaagtgacgtcattaaacgattacacacaggatgaattaattaatgttttaccatttgacatcaaaaagctgttgtatctaaaatttaagacgaaagaaacgaatagaatatactctattcttcaagagatgtctgaaacgtattctcttccaccacatccatcaattgtaaaagttttattgggagaattggtcagacaatttttttataataattctcgtattaagtataacgataccaagttacttaaaatggttacatcagttataaaaaataaagaagacgctaggaattacatagatgatattgtaaacggtcacttctttgtatcgaataaagtatttgataaatctcttttatacaaatacgaaaacgatattattacagtaccgtttagactttcctacgaaccatttgtttggggagttaactttcgtaaagaatataacgtggtatcttctccataaaactgatgagatatataaagaaataaatgtcgagctttgttaccaatggatacctttccgttacattggaaccacacgagctgacgttagacataaaaactaatattaggaatgccgtatataagacgtatctccatagagaaattagtggtaaaatggccaagaaaatagaaattcgtgaagacgtggaattacctctcggcgaaatagttaataattctgtagttataaacgttccgtgtgtaataacctacgcgtattatcacgttggggatatagtcagaggaacattaaacatcgaagatgaatcaaatgtaactattcaatgtggagatttaatctgtaaactaagtagagattcgggtactgtatcatttagcgattcaaagtactgcttttttcgaaatggtaatgcgtatgacaatggcagcgaagtcactgccgttctaatggaggctcaacaaggtatcgaatctagttttgtttttctcgcgaatatcgtcgactcataaaaaagagaatagcggtaagtataaacacgaatactatggcaataattgcgaatgttttattctcttcgatatatttttgataatatgaaaaacatgtctctctcaaatcggacaaccatctcataaaatagttctcgcgcgctggagaggtagttgccgctcgtataatctctccagaataatatacttgcgtgtcgtcgttcaatttatacggatttctatagttctctgttatataatgcggtttgccctcatgattagacgacgacaatagtgttctaaatttagatagttgatcagaatgaatgtttattggcgttggaaaaattatccatgcagcgtctgcagagtggttgatagttgttcctagatatgtaaaataatccaacttactaggcagcaaattgtctagataaaatactgaatcaaacggtgcagacgtattggcggatctaatggaatccaattgattaactatcttttgaaaatatacatttttatgatccaatacttgtaagaatatagaaataatgataagtccatcatcgtgtttttttgcctcttcataagaactatattttttcttattccaatgaacaagattaatctctccagagtatttgtacacatctatcaagtgattggatccataatcgtcttcctttccccaatatatatgtagtgatgataacacatattcattggggagaaaccctccacttatatatcctcctttaaaattaatccttactagttttccagtgttctggatagtggttggtttcgactcattataatgtatgtctaacggcttcaatcgcgcgttagaaattgcttttttagtttctatattaataggagatagttgttgcggcatagtaaaaatgaaatgataactgtttaaaaatagctcttagtatgggaattacaatggatgaggaagtgatatttgaaactcctagagaattaatatctattaaacgaataaaagatattccaagatcaaaagacacgcatgtgtttgctgcgtgtataacaagtgacggatatccgttaataggagctagaagaacttcattcgcgttccaggcgatattatctcaacaaaattcagattctatctttagagtatccactaaactattacggtttatgtactacaatgaactaagagaaatctttagacggttgagaaaaggttctatcaacaatatcgatcctcactttgaagagttaatattattgggtggtaaactagataaaaaggaatctattaaagattgtttaagaagagaattaaaagaggaaagtgatgaacgtataacagtaaaagaatttggaaatgtaattctaaaacttacaacacgggataaattatttaataaagtatatataagttattgcatggcgtgttttattaatcaatcgttggaggatttatcgcatactagtatttacaatgtagaaattagaaagattaaatcattaaatgattgtattaacgacgataaatacgaatatctgtcttatatttataatatgctagttaatagtaaatgaacttttacagatctagtataattagtcagattattaagtataatagacgactagctaagtctattatttgcgaggatgactctcaaattattacactcacggcattcgttaaccaatgcctatggtgtcataaacgagtatccgtgtccgctattttattaactactgataacaaaatattagtatgtaacagacgagatagttttctctattctgaaataattagaactagaaacatgtttagaaaaaaacgattatttctgaattattccaattatttgaacaaacaggaaagaagtatactatcgtcatttttttctctagatccagctactactgataatgatagaatagacgctatttatccgggtggcatacccaaaaggggtgagaatgttccagagtgtttatccagggaaattaaagaagaagttaatatagacaattcttttgtattcatagacactcggttttttattcatggcatcatagaagataccattattaataaattttttgaggtaatcttctttgtcggaagaatatctctaacgagtgatcaaatcattgatacatttaaaagtaatcatgaaatcaaggatctaatatttttagatccgaattcaggtaatggactccaatacgaaattgcaaaatatgctctagatactgcaaaacttaaatgttacggccatagaggatgttattatgaatcattaaaaaaattaactgaggatgattgattagaaaatataaattaatttaccatcgtgtatttttataacgggattgtccggcatatcatgtagatagttaccgtctacatcgtatactcgaccatctacgcctttaaatcctctatttattgacattaatctattagaattggaataccaaatattagtaccctcaattagtttattggtaatattttttttagacgatagatcgatggctcttgaaaccaaggttttccaaccggactcattgtcgatcggtgaaaagtctttttcattagcatgaatccattctaatgatgtatgtttaaacactctaaacaattggacaaattcttttgatttgctttgaatgatttcaaataggtcttcgtctacagtaggcataccattagataatctagccattataaagtgcacgtttacatatctacgttctggaggagtaagaacgtgactattgagacgaatggctcttcctactatctgacgaagagacgcctcgttccatgtcatatctaaaatgaagatatcattaattgagaaaaaactaataccctcgcctccactagaagagaatacgcatgttttaatgcattctccgttagtgtttgattcttggttaaactcagccaccgccttgattctagtatcttttgttctagatgagaactctatattagagataccaaagactttgaaatatagtaataagatttctattcctgactgattaacaaatggttcaaagactagacatttaccatgggatgctaatattcccaaacatacatctataaatttgacgcttttctcttttaattcagtaaatagagagatatcagccgcactagcatcccctttcaatagttctccctttttaaaggtatctaatgcggatttagaaaactctctatctcttaatgaatttttaaaatcattatatagtgttgctatctcttgcgcgtattcgcccggatcacgattttgtctttcaggaaagctatcgaacgtaaacgtagtagccatacgtctcagaattctaaatgatgatatacctgtttttatttcagcgagtttagccttttgataaatttcttcttgctttttcgacatattaacgtatcgcattaatactgttttcttagcgaatgatgcagacccttctacgtcatcaaaaatagaaaactcgttattaactatatacgaacatagtcctcctagtttggagactaattctttttcatcgactagacgtttattctcaaatagtgattggtgttgtaaggatcctggtcgtagtaagttaaccaacatggtgaattcttgcacactattgacgataggtgtagccgataaacaaatcatcttatggttttttaacgcaatggtcttagataaaaaattatatactgaacgagtaggacggatcttaccatcttctttgattaatgatttagaaatgaagttatgacattcatcaatgatgacgcatattctactcttggaattaatagttttgatattagtaaaaaatttatttctaaaattttgatcatcgtaattaataaaaatacaatccttcgttatctctggagcgtatctgagtatagtgttcatccaaggatcttctatcaaagcctttttcaccaataagataatagcccaattcgtataaatatccttaagatgtttgagaatatatacagtagtcattgttttaccgacacccgtttcatggaacaataaaagagaatgcatactgtctaatcctaagaaaactcttgctacaaaatgttgataatccttgaggcgtactacgtccgaccccatcatttcaacgggcatattagtagttctgcgtaaggcataatcgatataggccgcgtgtgatttactcatttatgagtgataagtaataactatgttttaaaaatcacagcagtagtttaactagtcttctctgatgtttgttttcgatactttttgaatcagaagtcatactagaataaagcaacgagtgaacgtaatagagagcttcgtatactctattcgaaaactctaagaacttattaatgaattccgtatccactggattgtttaaaatactaaattgaacactgttcacatccttccaagaagaagacttagtgacggacttaacatgagacataaataaatccaaattttttttacaaacatcactagccaccataatggcgctatctttcaaccagctatcgcttacgcattttagcagtctaacatttttaaagagactacaatatattctcatagtatcgattacacctctaccgaataaagttggaagtttaataatacaatatttttcgtttacaaaatcaaataatggtcgaaacacgtcgaaggttaacatcttataatcgctaatgtatagattgttttcagtgagatgattattagatttaatagcatctcgttcacgtttgaacagtttattgcgtgcgctgaggtcggcaactacggcgtccgctttagtactcctcccataatactttacgctattaatctttaaaatttcatagactttatctagatcgctttctggtaacatgatatcatgtgtaaaaagttttaacatgtcggtcggcattctatttagatcattaactctagaaatctgaagaaagtaattagctccgtattccagactaggtaatgggcttttacctagagacagattaagttctggcaatgtttcataaaatggaagaaggacatgcgttccctcccggatattttttacaatttcatccatttacaactctatagtttgttttcattattattagttattatctcccataatcttggtaatacttaccccttgatcgtaagataccttatacaggtcattacatacaactaccaattgtttttgtacataatagattggatggttgacatccatggtggaataaactactcgaacagatagtttatctttccccctagatacattagccgtaatagttgtcggcctaaagaatatctttggtgtaaagttaaaagttagggttcttgttccattattgctttttgtcagtagttcattataaattctcgagatgggtccgttctctgaatatagaacatcatttccaaatctaacttctagtctagaaataatatcggtcttattcttaaaatctattcccttgatgaagggatcgttaatgaacaaatccttggcctttgattcggctgatctattatctccgttatagacgttacgttgactagtccaaagacttacaggaatagatgtatcgatgatgttgatactatgtgatatgtgagcaaaaattgttctcttagtggcatcgctatatgttccagtaatggcggaaaactttttagaaatgttatatataaaagaattttttcgtgttccaaacattagcagattagtatgaagataaacactcatattatcaggaacattatcaatttttacatacacatcagcatcttgaatagaaacgataccatcttctggaacctctacgatctcggcagactccggataaccagtcggtgggccatcactaacaataactagatcatccaacaatctactcacatatgcatctatataatctttttcatcttgtgagtaccctggatacgaaataaatttattatccgtatttccataataaggtttagtataaacagagagcgatgttgccgcatgaacttcagttacagtcgccgttggttggtttatttgacctattactctcctaggtttctctataaatgatggtttaatttgtacattcttaaccatatatccaataaagctcaattcaggaacataaacaaattctttgttgaacgtttcaaagtcgaacgaagagtcacgaataacgatatcggatactggattgaaggttaccgttacggtaatttttgaatcggatagtttaagactgctgaatgtatcttccacatcaaacggagttttaatataaacgtatactgtagatggttctttaatagtgtcattaggagttaggccaatagaaatatcattaagttcactagaatatccagaatgtttcaaagcaattgtattattgatacaattattatataattcttcgccctcaatttcccaaataacaccgttacacgaagagatagatacgtgattaatacatttatatccaacatatggtacgtaactgaatcttcccatacctttaacttctggaagttccaaactcagaaccaaatgattaagcgcagtaatatactgatccctaatttcgaagctagcgatagcctgattgtctggaccatcgtttgtcataactccggatagagaaatatattgcggcatatataaagttggaatttgactatcgactgcgaagacattagaccgtttaatagagtcatccccaccgatcaaagaattaatgatagtattattcattttctatttaaaatggaaaaagcttacaataaactccgtagagaaatatctataatttgtgagttttccttaaagtaacagcttccgtaaacgccgtctttatctcttagtaggtttattgtatttatgaccttttccttatcttcatagaatactaaaggcaacaaagaaatttttggttcttctctaagagctacgtgagacttaaccatagacgccaacgaatccctacatattttagaacagaaataccctacttcaccacccttgtatgtctcaatactaataggtctaaaaaccaaatcttgattacaaaaccaacacttatcaattacactatttgtcttaatagacacatctgccatagatttataatactttggtagtatacaagcgagtgcttcttctttagcgggcttaaagactgctttaggtgctgaaataaccacatctggaaggcttactcgcttagccatttaattacggaactatttttttatacttctaatgagcaagtagaaaacctctcatctacaaaaacgtactcgtgtccataatcctctaccatagttacacgttttttagatctcatatgtgctaaaaagttttcccatactaattggttactattatttttcgtataatttttaacagtttgaggttttagatttttagttacagaagtgatatcgaatattttatccaaaaagaatgaataattaattgtcttagaaggagtgttttcttggcaaaagaataccaagtgcttaaatatttctactacttcattaatcttttctgtactcagattcagtttctcatcttttacttgattgattatttcaaagactaacttataatcctttttatttattctctcgttagccttaagaaaactagatacaaaatttgcatctacatcatccgtggatatttgatttttttccatgatatccaagagttccgagataatttctccagaacattgatgagacaataatctccgcaatacatttctcaaatgaataagtttattagacacatggaagtttgactttttttgtacctttgtacatttttgaaatacagactcgcaaaaaatacaatattcatatccttgttcagatactataccgttgtgtctacaaccgctacataatcgtagattcatgttaacactctacgtatctcgtcgtccaatattttatataaaaacattttatttctagacgttgccagaaaatcctgtaatatttttagttttttgggctgtgaataaagtatcgccctaatatggttaccgtcttccgccaatatagtagttaaattatccgcacatgcagaagaacaccgcttaggcggattcagtacaatgttatatttttcgtaccaactcatttaaatatcataatctaaaatagttctgtaatatgtctagcgctaatatattgatcataatcctgtgcataaattaagatacaacaatgtctcgaaatcatcgacatggcttcttccatagttagaagatcgtcgtcaaagttagcaacgtgattcatcaacatttgctgttttgaggcagcaaatactgaaccgtcgccattcaaccattcataaaaaccatcgtctgaatccattgataatttcttgtactggtttttgagagctcgcatcaatctagcatttctagctcccggattgaaaacagaaagaggatcgtacatccagggtccattttctgtaaatagaatcgtataatgtcccttcaagaagatatcagacgatccacaatcaaagaattggtctccgagtttgtaacaaacagcggactttaacctatacatgataccgtttagcataatttctggtgatacgtcaatcggagtatcatctattagagatctaaagccggtgtaacattctccaccaaacatattcttattctgacgtcgttctacataaaacatcattgctccattaacgataacaggggaatgaacagcactacccatcacattagttcccaatggatcaatgtgtgtaactccagaacatcttccatatcctatgttaggaggagcgaacaccactcttccactattgccatcgaatgccatagaataaatatccttggaattgatagaaatcggactgtcggatgttgtgatcatcttcataggattaacaactatgtatggtgccgcctgaagtttcatatcgtaactgatgccgtttataggtctagccacagaaaccaacgtaggtctaaatccaactatagacaaaatagaagccaatatctgttcctcatctgtcataacttgagagcatccagtatgaataatcttcattagatggggatctaccgcatcatcatcgttacaataaaaaattcccattctaatgttcataattgcttttctaatcatggtatgcatgtttgctctctgaatctctgtggaaattagatctgatacacctgtaatcactatcggattatcctccgtaagacgattaaccaacaacatataattataagactttacttttctaaattcataaagttgctggattaggctataggtgtctccatgtacatacgcgttctcgagcgcaggaagtttaataccgaatagtgccatcagaataggatgaatatagtaattagtttctggttttctataaataaaagacaaatcttgtgaactagacatatcggtaaaatgcatggattggaatcgtgtagtcgacagaagaatatgatgattagatggagagtatattttatctaactctttgagttggtcaccgattctaggactagctcgagaatgaataagtactaaaggatgagtacatttcacagaaacactagcattgttcaatgtgctctttacatgggtaaggagttgaaatagctcgtttctatttgttctgacaatatttagtttattcataatgttaagcatatcctgaatagtaaagttagatgtgtcatacttgttagtagttagatatttagcaattgcattcccatcatttctcaatctcgtactccaatcatgtgtagatgctacttcgtcgatggaaaccatacaatcctttttgataggctgttgagattgatcatttcctgcacgtttaggtttggtacgttgatttctagcccctgcggatataaagtcatcgtctacaatttgggacaatgaattgcatacactacaagacaaagatttatcagaagtgtgaatatgatcttcatctaccaaagaaagagtttgattagtataactagattttagtcctgcgttagatgttaaaaaaacatcgctattgaccacggcttccattatttatattcgtagtttttactcgaaagcgtgattttaatatccaatcttattacttttggaatcgttcaaaacctttgactagttgtagaatttgatctattgccctacgcgtatactcccttgcatcatatacgttcgtcaccagatcgtttgtttcggcctgaagttggtgcatatctctttcaacattcgacatgagatccttaagggccatatcgtctagattttgttgagatgctgctcctggatttggattttgttgtgctgttgtacatactgtaccaccagtaggtgtaggagtacatacagtggccacaataggaggttgagaaagtgtaaccgttggagtagtacaagaaatacttccatccgattgttgtgtacatgtagttgttggtaacgtctgagaaggttgggtagatggcggcgtcgtcgttttttgatctttattaaatttagagataatatcctgaacagcattgctcggcgtcaacgctggaaggagtgaactcgccggcgcatcagtatcttcagacagccaatcaaaaagattagacatatcagatgatgtattagtttgttgtcgtggttttggtgtaggagcagtactactaggtagaagaataggagccgatgtagctgttggaaccggctgtggagttatatgaatagttggttgtagcggttggataggctgtctgctggcggccatcatattatctctagctagttgttctcgcaactgtctttgataatacgactcttgagactttagtcctatttcaatcgcttcatcctttttcgtatccggatccttttcttcagaataatagattgacgactttggtgtagaggattctgccagcctctgtgagaacttgttaaagaagtccatttaaggctttaaaattgaattgcgattataagattaaatggcagacacagacgatattatcgactatgaatccgatgatctcaccgaatacgaggatgatgaagaagaggaagaagatggagagtcactagaaactagtgatatagatcccaaatcttcttataagattgtagaatcagcatccactcatatagaagatgcgcattccaatcttaaacatatagggaatcatatatctgctcttaaacgacgctatactagacgtataagtctatttgaaatagcgggtataatagcagaaagctataacttgcttcaacgaggaagattacctctagtttcagaattttctgacgaaacgatgaagcaaaatatgctacatgtaattatacaagagatagaggagggttcttgtcctatagtcatcgaaaagaacggagaattgttgtcggtaaacgattttgacaaagatggtctaaaattccatctagactatattatcaaaatttggaaacttcaaaaacgatattagaatttatacgaatatcgttctctaaatgtcacaatcaagtctcgcatgttcagcaatttattgtcgtactttatatcgtgttcattaacgatatcttgcaaaatagtaatgattctatcttccttcgatagatattcttcagagattattgtcttatattctttcttgttatcagatatgaatttgataagactttgaacattattgatacccgtctgtttaattttttctacagatattttagttttggcagattctatcgtatctgtcaatagacatccaacatcgacattcgacgtcaattgtctataaatcaacgtataaattttagaaataacattagcgaattgttgtgcgttgatgtcgttattctgaaacagtatgattttaggtagcattttcttaacaaagagaacgtatttattgttactcagttgaacagatgatatatccagattactaacgcatctgattccgtataccaaactttcagaagaaatggtatacaattgtttgtattcattcaatgtctctttttcagaaattagtttagagtcgaatactgcaataattttcaagagatagttttcatcagataagattttatttagtgtagatatgataaaactattgttttgttggagaacttgatacgccgcgttctctgtagtcgacgctctcaaatgggaaacaatctccattatttttttggaatcggatactatatcttcggtatcttgacgcagtctagtatacatagagttaagagagattagagtttgtacattaagcaacatgtctctaaatgtggctacaaacttttcctttttcacatcatctagtttattatataccgatttcacaacggcaccagatttaaggaaccagaatgaaaaactctgataactacaatatttcatcatagttacgattttatcatcttctatagttggtgtaatagcgcatacctttttctccaagactggaaccaacgtcataaaaatgtttaaatcaaaatccatatcaacatctgatgcgctaagaccagtctcgcgttcaagattatctttactaatggtgacgaactcatcgtataaaactctaagtttgtccattatttatttacagatttagttgtttaatttatttgtgctcttccagagttgggatagtatttttctaacgtcggtattatattattaggatctacgttcatatgtatcataatattaatcatccacgttttgataaatctatctttagcttctgaaataacgtatttaaacaaaggagaaaaatatttagctacggcatcagacgcaataacattttttgtaaatgtaacgtatttagacgacagatcttcgttaaaaagttttccatctatgtagaatccatcggttgttaacaccattcccgcgtcagattgaataggagtttgaatagtttgttttggaaatagatccttcaataacttatagttgggtgggaaaaaatcgattttatcactagactctttcttttttactatcattacctcatgaactatttcttgaatgagtatatgtattttctttcctatatcggacgcgttcattggaaaatataccatgtcgttaactataagaatatttttatcctcgtttacaaactgaataatatcagatgtagttcgtaaacgaactatatcatcaccagcacaacatctaactatatgatatccactagtttcctttagccgtttattatcttgttccatattagcagtcattccatcatttaagaaggcgtcaaagataatagggagaaatgacattttggattctgttacgactttaccaaaattaaggatatacggacttactatctttttctcaacgtcaatttgatgaacacacgatgaaaatgtgcttctatgagattgatcatgtagaaaacaacaagggatacaatatttccgcatatcatgaaatatattaagaaatcccaccttattatatttccccaaaggatccatgcacgtaaacattatgccgttatcattaataaagacttctttctcatcggatctgtaaaagttgttactgatttttttcattccaggatctagataattaataatgatgggttttctattcttattctttgtattttggcatatcctagaccagtaaacagtttccactttggtaaaatcagcagacttttgaacgctattaaacatggcattaatggcaataactaaaaatgtaaaatatttttctatgttaggaatatggtttttcactttaatagatatatggtttttggccaaaatgatagatatttttttatccgaggatagtaaaatattattagtcgccgtctctataaaaatgaagctagtctcgatatccaattttattctagaattgataggagtcgccaaatgtaccttatacgttatatctcccttgatgcgttccatttgtgtatctatatcggacacaagatctgtaaatagttttacgttattaatcatcacggtatcgccgtcgctagataacgctaatgtaccatccaagtcccaaatggagagatttaactgttcatcgtttagaataaaatgattaccggtcatattaataaagtgttcatcgtatctagataacaacgacttataattaatgtccaagtcttgaactcgctgaatgatcttttttaacccagttagttttagattggtacgaaatatattgttaaactttgattctacagtaatgtccaaatctagttgtggaaatacttccatcaacattgtttcaaacttgataatattattatctacatcttcgtacgatccaaattccggaatagatgtatcgcacgctctggccacccagataaccaaaaagtcacacgctccaggatatacattgtataaaaagctatcgttttttagtagggtttttttctgcgtgtatacgaagggattaaaaatagtattatcaacgtaactatattccaaattattcttatgagaatagataataatatcgtccttaatatctaacaaatttcctaaatatccctttaattgagtcattcgaagcgtcaatagaatatgtctcttaactatttccggctgttgtatatttaaatgacttcgtaaaaaataatatatgggcgacttctcatctatgtaatcatatggagtgagatatagggctcgttctacctcctgccccttacccacctgtaataccaattgcggacttactatatatcgcatatttatatcgtggggtaaagtgaaaatctactaccgatgatgtaagtcttacaatgttcgaaccagtaccagatcttaatttggaggcctccgtagaactaggggaggtaaatatagatcaaacaacacctatgataaaggagaatagcggttttatatcccgcagtagacgtctattcgcccatagatctaaggatgatgagagaaaactagcactacgattctttttacaaagactttattttttagatcatagagagattcattatttgttcagatgcgttgacgctgtaaaagacgtcactattaccaaaaaaaataacattatcgtggcgccttatatagcacttttaactatcgcatcaaaaggatgcaaacttacagaaacaatgattgaagcattctttccagaactatataatgaacatagtaagaaatttaaattcaactctcaagtatccatcatccaagaaaaactcggataccagtttggaaactatcacgtttatgattttgaaccgtattactctacagtagctctggctattcgagatgaacattcatctggcatttttaatatccgtcaagagagttatctggtaagttcattatctgaaataacatatagattttatctaattaatctaaaatctgatcttgttcaatggagtgctagtacgggcgctgtaattaatcaaatggtaaatactgtattgattacagtgtatgaaaagttacaactggtcatagaaaatgattcacaatttacatgttcattggctgtggaatcaaaacttccaataaaattacttaaagatagaaatgaattatttacaaaattcattaacgagttaaaaaagaccagttcattcaagataagcaaacgcgataaggatacgctactaaaatattttacttaggactggagttagaatttatagacgactcatttcgtttatcattgttactattattactattactatcattattagtgttggcattattagtattcttcttgtcatcttgttcagaaatatacagcaatgctatacctaatactaaatacattatcatgctcgcaatggctctaacaacaacgaaccaaaatgaatttggtcgtagcttttgttcacaaaaatacataaagaaatgtctacataaatctatggcgccattggctacttgaaatagcgccagtcctcctacagattttaatatagctgtataacatgacatttattcatcatcaaaagagacagagtcaccatctgtcatatttagattttttttcatgtgttcaaagtatcctctactcatttcattataatagtttatcatacttagaattttaggacggatcaatgagtaagacttgactagatcgtcagtagtaatttgtgcatcgtctattctgcatccgcttcgtcgaataatgtatagcatcgctttgagattctccatagctatcaagtctttatacaatgacatggaaatatctgtgaatactttatacttctccaacatcgatgccttaacatcatcgcctactttagcattgaaaatacgttctattgtgtagatggatgtagcaagatttttaaacaacaatgccatcttacacgatgattgcctcaagtctccaatcgtttgtttagaacgattagctacagagtccaatgcttggctgactagcatattattatctttagaaattgtattcttcaatgaggcgtttatcatatctgtgatttcgttagtcatattacagtctgactgggttgtaatgttatccaacatatcacctatggatacggtacacgtaccagcatttgtaataatcctatctaagatgttgtatggcattgcgcagaaaatatcttctcctgtaatatctccactctcgataaatctactcagattattcttaaatgccttattctctggagaaaagatatcagtgtccatcatttcattaatagtatacgcagaaaagataccacgagtatcaattctatccaagatacttatcggttccgagtcacagataatggtttcctctccttcgggagatcctgcatagaaatatctaggacaatagtttctatactgtctgtaactctgataatctctaaagtcactaactgataccatgaaattgagaagatcaaacgctgaagtaattaatttttctgcctcgtttttactacaactagttttcatcaatgtagtgacgatgtattgtttagttacttttggtctaatactgatgatagagatattattgcttcccataatggatcttctagtagtcaccttaaagcccattgatgcgaatagcagatagataaagtcttggtatgactcctttctaatatagtacggactacctttgtcacccaactttatacccacataagccataacaacctctttaatagccgtttcatgaggtttatcagccatgagcctgagtagttggaagaatctcatgaatcccgtctcagaaagtcctatatgcatgatagatttatctttcctgggaaactctcgtatagtcatagatgaaatactctttaaagtttctgaaataagattagtaacagtcttacctccgactactctaggtaacaaacaaactctaataggtgttttctctgcggagataatatcagaaaggatagagcaataagtagtattattgtgattataaagaccgaatacataacaggtagaatttataaacatcatgtcctgaaggtttttagacttgtattcctcgtaatccataccgtcccaaaacatggatttggtaactttgatagccgtagatctttgttccttcgccaacaggttaaagaaattaataaagaatttgtggtttctacctatgtctacaaattgcacgtttggaagcgccacggttacattcactgcagcattttgaggatcgcgagtatgaagtacgatgttattgtttactggtatatctggaaagaaatctaccagtctaggaataagagattgatatcgcatagaaatagtaaagtttataatctcatcatcgaagagcattttgttaccattgtaataaatatccactctgtcatatgtataaatgaagtactgttcaaacatgatgagatgtttatatgttggcatagtagtgagatcgacgtttggtaatggcaatgtattaagattaactccataatgtctagcagcatctgcgatgttataagcgtcgtcaaagcggggtcgatcttgtattgttatatattgtctaacacctataagattatcaaaatcttgtctgcttaatacaccgttaacaatttttgccttgaattcttttattggtgcattaataacatccttatagaggatgttaaacaaataagtgttatcaaagttaagatctggatatttcttttctgctagaacatccattgagtcggagccatctggtttaatataaccaccgataaatctagctctgtattctgtatccgtcaatctaatattaagaaggtgttgagtgaaaggtggaagatcgtaaaagctgtgagtattaatgataggattagtttccgaactaatgttaattggggtattaataatatctatatttccagcgttaagtgtaacattaaacagttttaattcacgtgacgtggtatcaattaaataattaatgcccaatttggatatagcagcctgaagctcatcttgtttagttacggatcctaatgagttattaagcaatatatcgaacggatgaacgaaggttgttttaagttggtcacatactttgtaatctagacatagatgcggaagaacggtagaaactatacgaaataaatattcagagtcctctaattgatcaagagtaactattgacttaataggcatcatttatttagtattaaatgacgaccgtaccagtgacggatatacaaaacgatttaattacagagttttcagaagataattatccatctaacaaaaattatgaaataactcttcgtcaaatgtctattctaactcacgttaacaacgtggtagatagagaacataatgccgccgtagtgtcatctccagaggaaatatcctcacaacttaatgaagatctatttccagatgatgattcaccggccactattatcgaacgagtacaacctcatactactattattgacgatactccacctcctacgtttcgtagagagttattaatatcggaacaacgtcaacaacgagaaaaaagatttaatattacagtatcgaaaaatgctgaagcaataatggaatctagatctatgataacttctatgccaacacaaacaccatccttgggagtagtttatgataaagataaaagaattcagatgttagaggatgaagtggttaatcttagaaatcaacgatctaatacaaaatcatctgataatttagataattttaccaaaatactatttggtaagactccgtacaaatcaacagaagttaataagcgtatagccatcgttaattatgcaaatttgaacgggtcccccttatcagtcgaggacttggatgtttgttcggaggatgaaatagatagaatctataaaacgattaaacaatatcacgaaagtagaaaacgaaaaattatcgtcactaacgtgattattattgtcataaacattatcgagcaggcattgctaaaactcggatttgaagaaatcaaaggactgagtaccgatatcacttcagaaattatcgatgtggagatcggagatgactgcgatgctgtagcatcaaaactaggaatcggtaacagtccggttcttaatattgtattgtttatactcaagatattcgttaaacgaattaaaattatttaatttaatacattcccatatccagacaacaatcgtctggattaatctgttcctgtcgtctcataccggacgacatattaatctttttattagtgggcatctttttagatggtttctttttcccagcattaactgagtcgatacctagaagatcgtgattgatctctccgaccattccacgaacttctaattggccgtctctgacggtaccataaactattttaccagcattagtaacagcttggacaatctgaccatccatcgcattgtacgatgtagtagtaactgttgttctacgtctaggagcaccagaagtatttttggagcccttggatgttgatgtagaagaagacgaggattttgattttggtttacatgtaatacattttgaactctttgattttgtatcacatgcgccggcagtcacatctgtttgagaattaagattattgttgcctcctttgacggctgcatctccaccgatttgcgctagtagatttttaagctgtggtgtaatcttattaactgtttcgatataatcatcgtaactgcttctaacggctaaattttttttatccgccatttagaagctaaaaatatttttatttatgcagaagatttaactagattatacaatgaactaatatgatccttttccagattatttacaaacttggtattttttggttctggaggaggcgaatttaaattcggacttggattcggattttgtaagttcttgatcttattatacatcgagtataggatggcgacagtaactgctacacaaataccgatcaaaagaagaataccaatcatttattgacaataacttcactattgatcaagtatgcaatatatcatcttttcactaaataagtagtaataatgattcaacaatgtcgagatatatggacgataataatttagttcatggaaatatcgctatgattggtgtgaatgactccgctaactctgtggggtgcgcagtgctttccccacatagaataaattagcattccgactgtgataataataccaagtataaacgccataatactcaatactttccatgtacgagtgggactggtagacttactaaagtcaataaaggcgaagatacacgaaagaatcaaaagaatgattccagcgattagcacgccggaaaaataatttccaatcataagcatcatgtccatttaactaataaaaattttaaatcgccgaatgaacaaagtggaatataaaccatataaaaacaatagtttgtactgcaaaaataatatctatttttgttttcgaagatatggtaaaattaaatagtagtacacagcatgttataactaacagcagcaacggctcgtaattacttatcatttactagacgaaaaggtggtgggatattttcttgctcaaataatacgaatatatcacccatccattttatgcgatgtttatatactctaatctttaatagatctatagacgacgggtttaccaacaatatagattttatcgattcatctaatttaaacccttccttaaacgtgaatgatctattatctggcataacgatgaccctacctgatgaatcggacaatgtactgggccatgtagaataaattatcaacgaattatcgtctacgaacatttatatcatttgttttaattttaggacgcgaataaatggatataaaatagaaaataacagatattacaaccagtgttatggccgcgcccaaccaggtaggcagttttattttatcttttactacaggttctcctggatgtacgttaccaacggcggacgtagttctagtacaattagacgtaagttccgcttgggaattttttaacgctaaagagttaacgttaatcgtgcacccaacgtatttacatctagttcgttgaacatcttgattataatataaccattttctatctctagattcgtcagtgcactcatgtaaccaacataccctaggtcctaaatatttatctccggaattagattttggataattcgcgcaccaacaatttctatttcctttatgatcgttacaaaagacgtataatgccgtatccccaaaagtaaaataatcaggacgaataattctaataaactcagaacaatatctcgcatccatatgtttggagcaaatatcggaataagtagacatagccggtttccgttttgcacgtaaccattctaaacaattggggtttccaggatcgtttctacaaaatccagtcatgaaatcgtcacaatgttctgtcttgtaattattattaaatatttttggacagtgtttggtatttgtcttagaacaacattttgccacgctatcactatcgcccaggagataatccttttttataaaatgacatcgttgcccggatgctatataatcagtagcgtgttttaaatccttaatatattcaggagttacctcgttctgataatagattaatgatccaggacgaaatttgaaagaactacatggttctccatgaattaatacatattgtttagcaaattcaggaactataaaactactacaatgatctatcgacataccatctatcaaacaaaacttgggtttaatttctcccggagatgtttcataatagtacgtataactttcttctgcaaacttaacagctctattatattcaggataattaaaacctaattccatatatttgtctcgtatatctgctattcctggtgctattttgattctattaagagtaacagctgcccccattcttaataatcgtcagtatttaaactgttaaatgttggtatatcaacatctaccttatttcccgcagtataaggtttgttgcaggtatactgttcaggaatggttacatttatacttcttctatagtcctgtctttcgatgttcatcacatatgcaaagaacagaataaacaaaataatgtaagaaataatattaaatatctgtgaattcgtaaatacattgattgccataataattacagcagctacaatacacacaatagacattcccacagtgttgccattacctccacgatacatttgagttactaagcaataggtaataactaagctagtaagaggcaatagaaaagatgagataaatatcatcaatatagagattagaggagggctatatagagccaagacgaacaaaatcaaaccgagtaacgttctaacatcattatttttgaagattcccaaataatcattcattcctccataatcgttttgcatcatacctccatctttaggcataaacgattgctgctgttcctctgtaaataaatctttatcaagcactccagcacccgcagagaagtcgtcaagcatattgtaatatcttaaataactcatttatatattaaaaaatgtcactattaaagatggagtataatctttatgccgaactaaaaaaaatgacttgtggtcaacccctaagtctttttaacgaagacggggatttcgtagaagttgaaccgggatcatcctttaagtttctgatacctaagggattttacgcctctccttccgtaaagacgagtctagtattcgagacattaacaacgaccgataataaaatcactagtatcaatccaacaaatgcgccaaagttatatcctcttcaacgcaaagtcgtatctgaagtagtttctaatatgaggaaaatgatcgaatcaaaacgtcctctatacattactcttcacttggcgtgtggatttggtaagactattaccacgtgttatcttatggctacacacggtagaaaaaccgtcatttgcgtacccaataaaatgttaatacatcaatggaagacacaggtagaggcagtcggattggaacataagatatccatagatggagtaagtagtctattaaaggaactaaagactcaaagtccggatgtattaatagtagtcagtagacatctgacaaacgatgccttttgtaaatatatcaataagcattatgatttgttcatcttggatgaatcacatacgtataatctgatgaacaatacagcagttacaagatttttagcgtattatcctccgatgatgtgttattttttaactgctacacctagaccatctaaccgaatttattgtaacagtattattaatattgccaagttatccaatctaaaaaaaactatctatgcagtagatagtttttttgagccatattccacagataatattagacatatggtaaaacgactagatggaccatctaataaatatcatatatataccgagaagttattatctgtagacgagcctagaaatcaacttattcttgataccctggtagaagaattcaagtcaggaactattaatcgcattttagttattactaaactacgtgaacatatggtattattctacaaacgattattagattttttcggaccagaggttgtatttataggagacgcccaaaatagacgtactccagatatggtcaaatcaatcaaggaactaaatagatttatattcgtatccaccttattttattccggtactggtttagatattcctagtttggattcgttgttcatttgctcggcagtaatcaacaatatgcaaatagagcaattactagggagggtatgtcgagaaacagaactattagataggacggtatatgtatttcctaacacatccatcaaagaaataaagtacatgataggaaatttcatgcaacgaattattagtctgtctgtagataaactaggatttaaacaaaaaagttatcggaaacatcaagaatccgatcccacttctgtatgtacaacatcctccagagaagaacgtgtattaaatagaatatttaactcgcaaaatcgttaagaagtttaagcgacgatccgcatgctgcgcaggccagtgtattacccctcatagtattaatataatccaatgatacttttgtgatgtcggaaatcttaaccaatttagactgacaggcagaacacgtcatgcaatcatcatcgtcatcgataactgtagtcttgggcttctttttgcggctcttcattccggaacgcacattggtgctatccatttaggtagtaaaaaataagtcagaatatgccctataacacgatcgtgcaaaacctggtatatcgtctctatctttatcacaatatagtgtatcgacatttttattattattgacctcgtttatcttggaacatggaatgggaacatttttgttatcaacggccacctttgccttaattccagatgttgtaaaattataactaaacagtctatcatcgacacaaatgaaattcttgtttagacgtttgtagtttacgtatgcggctcgttcgcgtctcattttttcagatattgcaggtactataatattaaaaataagaatgaaataacataggattaaaaataaagttatcatgacttctagcgctgatttaactaacttaaaagaattacttagtctgtacaaaagtttgagattttcagattctgcggctatagaaaagtataattctttggtagaatggggaacatctacttactggaaaataggcgtgcaaaaggtagctaatgtcgagacgtcaatatctgattattatgatgaggtaaaaaataaaccgtttaatattgatccgggctattacattttcttaccggtatattttgggagcgtctttatttattcgaagggtaaaaatatggtagaacttggatctggaaactcttttcaaataccagatgatatgcgaagtgcgtgtaacaaagtattagacagcgataacggaatagactttctgagatttgttttgttaaacaatagatggataatggaagatgctatatcaaaatatcagtctccagttaatatatttaaactagctagtgagtacggattaaacatacccaaatatttagaaattgaaatagaggaagacacattatttgacgacgagttatactctattatagaacgctctttcgatgataaatttccaaaaatatccatatcgtatattaagttgggagaacttagacggcaagttgtagactttttcaaattctcattcatgtatattgagtccatcaaggtagatcgtataggagataatatttttattcctagcgttataacaaaatcaggaaaaaagatattagtaaaagatgtagaccatttaatacgatccaaggttagagaacatacatttgtaaaagtaaaaaagaaaaacacattttccattttatacgactatgatggaaacggaacagaaactagaggagaagtaataaaacgaattatagacactataggacgagactattatgttaacggaaagtatttctctaaggttggtagtgcaggcttaaagcaattgactaataaattagatattaatgagtgcgcaactgtcgatgagttagttgatgagattaataaatccggaactgtaaaacgaaaaataaaaaaccaatcagcatttgatttaagcagagaatgtttgggatatccagaagcggattttataacgttagttaataacatgcggttcaaaatagaaaattgtaaggttgtaaatttcaatattgaaaatactaattgtttaaataacccgagtattgaaactatatatggaaactttaaccagttcgtctcaatctttaatgtcgtcaccgatgtcaaaaaaagattattcgagtgaaataatatgcgcctttgatataggtgcaaaaaatcctgccagaactgttttagaagtcaaggataactccgttagggtattggatatatcaaaattagactggagttctgattgggaaaggcgcatagctaaagatttgtcacaatatgaatacactacagttcttctagaacgtcagcctagaaggtcgccgtatgttaaatttatctattttattaaaggctttttatatcatacatcggctgccaaagttatttgcgtctcgcctgtcatgtctggtaattcatatagagatcgaaaaaagagatcggtcgaagcatttcttgattggatggacacattcggattgcgagactccgttccggatagacgcaaattagacgatgtagcggatagtttcaatttggctatgagatacgtattagataaatggaatactaattatacaccttataataggtgtaaatctagaaattacataaaaaaaatgtaataacgttagtaacgccattatggataatctatttacctttctacatgaaatagaagatagatatgccagaactatttttaactttcatctaataagttgcgatgaaataggagatatatatggtcttatgaaagaacgcatttcctcagaggatatgtttgataatatagtgtataataaagatatacatcctgccattaagaaactagtgtattgcgacatccaacttactaaacacattattaatcagaatacgtatccggtatttaacgattcttcacaagtgaaatgttgtcattatttcgacataaactcagataatagcaatattagctctcgtacagtagagatatttgagagggaaaagtcatctcttgtatcatatattaaaactaccaataagaagagaaaggtcaattacggcgaaataaagaaaactgttcatggaggcactaatgcaaattacttttccggtaaaaagtctgacgagtatctgagtactacagttagatccaacattaatcaaccttggatcaaaaccatctctaagaggatgagagttgatatcattaatcactctatagtaacgcgtggaaaaagctctatattacaaactatagaaattatttttactaatagaacatgtgtgaaaatattcaaggattctactatgcacattattctatccaaggacaaggatgaaaaggggtgtatacacatgattgacaaattattctatgtctattataatttatttctgttgttcgaagatatcatccaaaacgagtactttaaagaagtagctaatgttgtaaaccacgtactcacggctacggcattagatgagaaattattcctaattaagaaaatggctgaacacgatgtttatggagttagcaatttcaaaatagggatgtttaacctgacatttattaagtcgttggatcataccgttttcccctctctgttagatgaggatagcaaaataaagttttttaaggggaaaaagctcaatattgtagcattacgatctctggaggattgtataaattacgtgactaaatccgagaatatgatagaaatgatgaaggaaagatcgactattttaaatagcatagatatagaaacggaatcggtagatcgtctaaaagaattgcttctaaaatgaaaaaaaacactaattcagaaatggatcaacgactagggtataagtttttggtgcctgatcctaaagccggagttttttatagaccgttacatttccaatatgtatcgtattctaattttatattgcatcgattgcatgaaatcttgaccgtcaagcggccactcttatcgtttaagaataatacagaacgaattatgatagaaattagcaatgttaaagtgactcctccagattactcacctataatcgcgagtattaaaggtaagagttatgacgcattagccacgttcactgtaaatatctttaaagaggtaatgaccaaagagggtatatccatcactaaaataagtagttatgagggaaaagattctcatttgataaaaattccgctactaataggatacgggaataaaaatccacttgatacagccaagtatcttgttcctaatgtcataggtggagtctttatcaataaacaatctgtcgaaaaagtaggaattaatctagtagaaaagattacaacatggccaaaatttagggttgttaagccaaactcattcactttctcgttttcctccgtatcccctcctaatgtattaccgacaagatatcgccattacaagatatctctggatatatcacaattggaagcgttgaatatatcatcgacaaagacatttataacggtcaatattgttttgctgtctcaatatttatctagagtgagtctagaattcattagacgtagtttatcatacgatatgcctccagaagttgtctatctagtaaacgcgataatagatagtgctaaacgaattactgaatctattactgactttaatattgatacatacattaatgacctggtggaagctgaacacattaaacaaaaatctcagttaacgattaacgagttcaaatatgaaatgctgcataactttttacctcatatgaactatacacccgatcaactaaagggattttatatgatatctttactaagaaagtttctctactgtatcttccacacttctagatatccagatagagattcgatggtttgtcatcgcatcctaacgtacggcaaatattttgagacgttggcacatgatgaattagagaattacataggcaacatccgaaacgatatcatgaacaatcacaagaacagaggcacttacgcggtaaacattcatgtactaacaactcccggacttaatcacgcgttttctagcttattgagtggaaagttcaaaaagtcagacggtagttatcgaacacatcctcactattcatggatgcagaatatttctattcctaggagtgttggattttatccggatcaagtaaagatttcaaagatgttttctgtcagaaaataccatccaagtcaatatctttacttttgttcatcagacgttccggaaagaggtcctcaggtaggtttagtatctcaattgtctgtcttgagttccattacaaatatactaacgtctgagtatttggatttggaaaagaaaatttgtgagtatatcagatcatattataaagatgatataagttactttgaaacaggatttccaatcactatagaaaatgctctagtcgcatctcttaatccaaatatgatatgtgattttgtaactgactttagacgtagaaaacggatgggattcttcggtaacttggaggtaggtattactttagttagggatcacatgaatgaaattcgcattaatattggagcgggaagattagtcagaccattcttggttgtggataacggagagctcatgatggatgtgtgtccggagttagaaagcagattagacgacatgacattctctgacattcagaaagagtttccgcatgtcatcgaaatggtagatatagaacaatttacttttagtaacgtatgtgaatcggttcaaaaatttagaatgatgtcaaaggatgaaagaaagcaatacgatttatgtgactttcctgccgaatttagagatggatatgtagcatcttcactagtgggaatcaatcacaattctggacccagagctattcttggatgtgctcaagctaaacaagctatctcttgtctgagttcggatatacgaaataaaatagacaatggaattcatttgatgtatccagagaggccaatcgtgattagtaaggctttagaaacttcaaagattgcggctaattgcttcggccaacatgttactatagcattaatgtcgtacaaaggtatcaatcaagaggatggaattatcatcaaaaaacaatttattcagagaggcggtctcgatattgttacagccaagaaacatcaagtagaaattccattggaaaactttaataacaaagaaagagataggtctaacgcctattcaaaattagaaagtaatggattagttagactgaatgctttcttggaatccggagacgctatggcacgaaatatctcatcaagaactcttgaagatgattttgctagagataatcagattagctttgatgtttccgagaaatataccgatatgtacaaatctcgcgttgaacgagtacaagtagaacttactgacaaagttaaggtacgagtattaaccatgaaagaaagaagacccattctaggagacaaatttaccactagaacgagtcaaaagggaacagtcgcgtatgtcgcggatgaaacggaacttccatacgacgaaaatggtatcacaccagatgtcattattaattctacatccatcttctctagaaaaactatatctatgttgatagaggttattttaacagccgcatattctgctaagccgtacaacaataagggagaaaaccgacctgtctgttttcctagtagtaacgaaacatccatcgatacatatatgcaattcgctaaacaatgttatgagcattcaaatccgaaattgtccgatgaagaattatcggataaaatcttttgtgaaaagattctctatgatcctgaaacggataagccttatgcatccaaagtattttttggaccaatttattacttgcgtctgaggcatttaactcaggacaaggcaaccgttagatgtagaggtaaaaagacgaagctcattagacaggcgaatgagggacgaaaacgtggaggaggtatcaagttcggagaaatggagagagactgtttaatagcgcatggtgcagccaatactattacagaagttttgaaagattcggaagaagattatcaagatgtgtatgtttgtgaaaattgtggagacatagcagcacaaatcaagggtattaatacatgtcttagatgttcaaaacttaatctctctcctctcttaacaaaaattgataccacgcacgtatctaaagtatttcttactcaaatgaacgccagaggcgtaaaagtcaaattagatttcgaacgaaggcctccttcgttttataaaccattagataaagttgatctcaagccgtcttttctggtgtaatattctagtttggtagtagatacatatcaatatcatcaaattcgagatccgaattataaaatgggcgtggattgttaactatagaatcggacgtctgatattcgaaaatctgtggagtttcaggttttggtggaggtgtaactgctacttgggatactgaagtctgatattcagaaagctgtggatgttctggttcggcatccaccgatggtgtcacatcactaatcggttcggtaacgtctgtggatggaggtgctacttctacagaacctgtagcctcagttgtcaacggagatacatttttaatgcgagaaaatgtataatttggtaatggtttcttatgtggatctgaagaagaggtaagatatctactagaaagataccgatcacgttctagttctcttttgtagaacttaactttttctttctccgcatctagttgatattccaacctcttcacgttactacgttcagattccaattcacgttcgcatgggttacctccgcagtttttacgagcgatttcacgttcagccttcatgcgtctctccctctctctatcgagtttatcagagcagtctttctgaaggcgatcgaactccataaatttctccaacgctttgattgtttccatagatttccgaagttcagcttttaggactgtgattctttttctttcgaattcacagctggatgtacaaccgtttccattaccgccatctctaagtttcttttctagatcggcaacatttcatccccatgccttttacattcctcgagtctactgtcgtcgaaatatcgttccagctccttttcgacatcaataactttagcacgttgtctctcaagctctcttttgtagttatctgattccctggcacgtttaagatcttcatgcaattgagtcagctcttaacttcctctcttgcttcttcgtcatagtacgcgcaatcactgtgagatccattgttaccacgtctacactcggcgagctcgcgtttaagagattcaatttcccgtttgtattggtccatgtttccattgctaccaccattagatttacaggctgctagttgtcgttcgagatcagaaatacgggttttcttggaattgatttcgtcgatgtacttggcatcgaaacacttattaagttctttttccaattctacgattttatttctttcgcgagtcaattccctcctgtagtaactatctgttttgtcagattcacgctctctacgtagactttcttgcaagttactaatttgttccctagcacgtccgagtttagttttatatgctgaatagagttctgattcatcctttgagcagatctctagcgatcgtttaagattcctaattctagtctttagcctatttacctcctcagaagatgttccgttaccgttgcgtttacactcgttaagctgtctatcaagatccatgattctatctctaagacgttgcatctctctttccatatcagcattgctttcattattacgtctgcagtcactcaactgtctttcaatatctgagattctatctctaagacgtcgcatctctctctgtttcggcattggtttcattattacgtttacagtcgttcaactgtctttcaagatctgatattctagattggagtctgctaatctctgtagcattttcacggcattcactcagttgtctttcaagatctgaaattttagattggagtctgctaatctctgtaagatttcctcctccgctctcgatgcagtcggtcaacttattctctagttctctaatacgcgaacgcagtgcatcaacttcttgcgtgtcttcctggttgcgtgtacattcatcgagatctctaacgcgtcgtcgttcttcctcaagttctctgcgtactacagaaagcgtgtccttatcttgttgatatttagcaatttctgattctagagtactgattttgcttacgtagttactaatatttgtcttggccttatcaagatcctccttgtatttgtcgcattccttgatatccctacgaagtctggacagttcccattcgacattacgacgtttatcgatttcagctcggagatcgtcatcgcgttgttttagccacatacgactgagttcaagttctcgttgacaagatccatctacttttccattcctaatagtatccagttccttttctagttctgaacgcatttctcgttccctatcaagcgattctctcaattctcggatagtcttcttatcaatttctaataaatctgaaccatcatctgtcccattttgaatatccctgtgttctttgatctcttttgtaagtcggtcgattctttcggttttataaacagaatccctttccaaagtcctaatcttactgagtttatcactaagttctgcattcaattcggtgagttttctcttggcttcttccaactctgttttaaactctccactatttccgcattcttcctcgcatttatctaaccattcaattagtttattaataactagttggtaatcagcgattcctatagccgttcttgtaattgtgggaacataattaggatcttctaatggattgtatggcttgatagcatcatctttatcattattagggggatggacaaccttaattggttggtcctcatctcctccagtagcgtgtggttcttcaataccagtgttagtaataggcttaggcaaatgcttgtcgtacgcgggcacttcctcatccatcaagtatttataatcgggttctacttcagaatattcttttctaagagacgcgacttcgggagttagtagaagaactctgtttctgtatctatcaacgctggaatcaatactcaagttaaggatagcgaatacctcatcgtcatcatccgtatcttctgaaacaccatcatatgacatttcatgaagtctaacgtattgataaatagaatcagatttagtattaaacagatccttaacctttttagtaaacgcatatgtatattttagatctccagatttcataatatgatcacatgccttaaatgtcagtgcttccatgatataatctggaacactaatgggtgacgaaaaagatacagcaccatatgctacgttgataaataaatctgaaccactaagtagataatgattaatgttaaggaaaagaaaatattcagtgtataggtatgtcttggcgtcatatcttgtactaaacacgctaaacagtttgttaatgtgatcaatttccaatagattaattagagcagcgggaataccaacaaacatattaccacatccgtattttctatgaatatcacatatcatgttaaaaaatcttgatagaagagcgaatatctcgtctgacttaatgagtcgtagttcagcagcaacataagtcataactgtaaatagaacatactttcctgtagtgttgattctagactccacatcaacaccattattaaaaatagttttatatacatctttaatctgctctccgttaatcgtcgaacgttctagtatacggaaacactttgatttcttatctgtagttaatgacttagtgatatcacgaagaatattacgaattacatttcttgtttttcttgagagacctgattcagaactcaactcatcgttccatagtttttctacctcagtggcgaaatctttggagtgcttggtacatttttcaataaggttcgtgacctccatttattataaaaaatttattcaaaacttaactacaatcgggtaattataaaatcgtagatctcccatgtggcggaatactaccatctatcgcatgtggatggacagtaggtaatggccatgggaacagtaatgtttgcatatttatctttcttgccagtattactgcatattgtcccaatgtttcgatgtgatgttctaacctatcaactgccgctgtatcacaacaatagtgtccgatgaaattaagattatgatccaatgtgtttaatatatgattatcaagtcttatacgatccgcgtcttttttgacaggatcaggttcttctacaggaagaagtttcggcctcttatgatattcatgtctgggaaacggtggtctagggtgaggctccggtatcggagtgggttttggattataatcatcatcgtctatgacatcatcttcgacttcgatatttattttgctatcttgatgatgtcctgtatcagttgcattttcagcactcgactgaatattagcgcattcattgtctattattaccatatttctaaacccaaaatgtatgtgttgaacatcagtactatcgttgatgagtcttatagcatgaattcgcttatcgttatcgggtttatcttctgtcaccttagcaattccttttttattaaactctacataatcatatccatttctattgtttgttctaatataaacgagtatagcatcattgctaaatttttcaatagtatcaaaaacagaatatcctaaaccatataatatatattcaggaacactcaaactaaatgtccaggattctcctaaatacgtaaactttaatagtgcgaaatcattcaaaaatctaccacttatagatagatagtacataaatgcgtatagtagtctacctatctctttattatgaaaaccggcattacgatcatatatgtcgtgatatacctgtgatccgtttacgttaaaccataaatacatgggtgatcctataaacatgaatttatttctaattctcagagctatagttaattgaccgtgtaatatttgcttacatgcatacttgatacgcttattaataagatttttatcattgctcgttatttcagaatcgtatatataaggagtaccatcgtgattcttaccagatattatacaaaatactatatataaaatatattgacccacgttagtaatcatataaatgtttaacgttttaaattttgtattcaatgatccattatcatacgctatcatggtcttgtaatattcattctttaaaatataatattgtgttagccattgcattggggctcctaatggagattttttattctcatccattttaggataggctttcataaagtccctaataacttcgtgaataatgtttctatgttttctactgatgcatgtatttgcttcgatttttttatcccatgtttcatctatcatagatttaaacgcagtaatgctcgcaacattaacatcttgaaccgttggtacaattccgttccataaatttataatgttcgccatttatataactcattttttgaatatacttttaattaacaaaagagttaagttactcatatggacgccgtccagtctgaacatcaatctttttagccagagatatcatagccgctcttagagtttcagcgtgattttccaacctaaatagaacttcatcgttgcgtttacaacacttttctatttgttcaaactttgttgttacattagtaatctttttttccaaattagttagccgttgtttgagagtttcctcattgtcgtcttcatcggctttaacaattgcttcgcgtttagcctctggctttttagcagcctttgtagaaaaaaattcagttgctggaattgcaagatcgtcatctccggggaaaagagttccgtccatttaaagtacagattttagaaactgacactctgcgttatttatatttggtacaacacatggattataaatattgatgttaataacatcagaaaatgtaaagtctatacattgttgcatcgtgttaaattttctaatggatctagtattattgggtccaacttctgcctgaaatccaaatatggaagcggatacaaaaccgtttcctggataaaccacacatctccacttttgctttacatcagaaattgtgtcgttgacatcttgaactctcctatctaatgccggtgttccacctatagattttgaatattcgaatgctgcatgagtagcattaaattccttaatattgccataattttcatatattgagtaaccctggataaaaagtaaacacaccgcagccgtcgctaccacaataaaaaaaattgatagagagttcatttataatctattagaagctgacaaaatttttttacacgcatcagacaatgctttaataaatagttcaacatctacttttgtcatatcgaaccgatggtatgattctaacctagaattacatccgaaaaagttgactatgttcatagtcattaagtcattaacaaacaacattccagactctggattataagacgatactgtttcgtcacaattacctaccttaatcatgtgattatgaatattggctattagagcaccttctaagaaatctataatatctttgaaacacgatttaaaatcaaaccacgaatatacttctacgaagaaagttagtttacccataggagaaataactataaatggagatctaaatacaaaatccggatctatgatagttttaacattattatattctctattaaatacctccacatctaaaaatgttaattttgaaactatgtcttcgtttattaccgtacctgaactaaacgctataagctctattgtttgagaactctttaaacgatattcttgaaatacatgtaacaaagtttcctttaactcggtcggtttatctaccatagttacagaatttgtatccttatctataatataataatcaaaatcgtataaagttatataattatcgcgttcagattgggatcttttcaaatagactaaaaaccccatttctctagtaagtatcttatgtatatgtttgtaaaatatcttcatggtgggaatatgctctaccgcagttagccattcctcattgacagcggtagatgtattagacaaaactattccaatgtttaacaagggccattttacgagattattaaatccttgtttgataaatgtagccaatgagggttcgagttcaacgacgattgaattctcttcccgcggatgctgcatgatgaacgacgggatgttgttcgattgatttggaattctttttcgactttttgtttatattaaatattttaaaatttatagcggatagcaattcatgtaccacggataatgtagacgcgtattgcgcatcgatatctttattattagataaatttatcaataaatgtgagaagtttgcctcgttaaggtcttccatttaaatattatataaacatttgtgtttgtaacttattcgtcttttatggaatagttttttactagtaaagctgcaattacacactttgtccgtaaaacataaatataaacaccagcttttatcaatcgttccaaaaagtcgacggcggacatttttaacatggcatctattttaaatacacttaggtttttggaaaaaacatcattttataattgtaacgattcaataactaaagaaaagattaagattaaacataagggaatgtcatttgtattttataagccaaagcattctaccgttgttaaatacttgtctggaggaggtatatatcatgatgatttggttgtattggggaaggtaacaattaataatctaaagatgatgctattttacatggatttatcatatcatggagtgacaagtagtggagcaatttacaaattgggatcgtctatcgatagactttctctaaataggactattgttacaaaagttaataattatgatgatacattttttgacgacgatgattgatcgctattgcacaattttgtttttgtactttctaatatagtgtttaggttctttttcatatgagaatattgatttactaaaatatctatgtttaacttttgttctatgacgtccttatcggcggtatcggtacatatacgtaattcaccttcacaaaatacggagtcttcgataataatagccaatcgattattggatctagctgtctgtatcatattcaacatgtttaatatatcctttcgtttcccctttacaggcatcgatcgtagcatattttccgcgtctgatatggaaatgttaaaactacaaaaatgcgtaatgttagcccgtcctaatattggtacgtgtctataagtttggcatagtagaataatagacgtgtttaaatgccttccaaagtttaagaattctattagagtattgcattttgatagtttatcgcctacatcatcaaaaataagtaaaaagtgtgctgattttttatgattttgtgcgacagcaatacatttttctatgttacttttagttcgtatcagattatattctagagattcctgactactaacgaaattaatatgatttggccaaatgtatccatcataatctgggttataaacgggtgtaaacaagaatatatgtttatattttttaactagtgtagaaaacagagatagtaaatagatagtttttccagatccagatcctcctgttaaaaccattctaaacggcatttttaataaattttctcttgaaaattgtttttcttggaaacaattcataattatatttacagttactaaattaatttgataataaatcaaaatatggaaaactaaggttgttagtagggaggagaacaaagaaggcacatcgtgatataaataacatttattatcatgatgacaccagaaaacgacgaagagcagacatctgtgttctccgctactgtttacggagacaaaattcagggaaagaataaacgcaaacgcgtgattggtctatgtattagaatatctatggttatttcactactatctatgattaccatgtccgcgtttctcatagtgcgcctaaatcaatgcatgtctgctaacgaggctgctattactgacgccgctgttgccgttgctgctgcatcatctactcatagaaaggttgcgtctagcactacacaatatgatcacaaagaaagctgtaatggtttatattaccagggttcttgttatatattacattcagactaccagttattctcggatgctaaagcaaattgcactgcggaatcatcaacactacccaataaatccgatgtcttgactacctggctcattgattatgttgaggatacatggggatctgatggtaatccaattacaaaaactacatccgattatcaagattctgatgtatcacaagaagttagaaagtatttttgtgttaaaacaatgaactaatatttatttttgtacattaataaatgaaatcgcttaatagacaaactgtaagtaggtttaagaagttgtcggtgccggccgctataatgatgatactctcaaccattattagtggcataggaacatttctgcattacaaagaagaactgatgcctagtgcttgcgccaatggatggatacaatacgataaacattgttatttagatactaacattaaaatgtctacagataatgcggtttatcagtgtcgtaaattacgagctagattgcctagacctgatactagacatctgagagtattgtttagtattttttataaagattattgggtaagtttaaaaaagaccaatgataaatggttagatattaataatgataaagatatagatattagtaaattaacaaattttaaacaactaaacagtacgacggatgctgaagcgtgttatatatacaagtctggaaaactggttaaaacagtatgtaaaagtactcaatctgtactatgtgttaaaaaattctacaagtgacaacaaaaaatgaattaataataagtcgttaacgtacgccgccatggacgccgcgtttgttattactccaatgggtgtgttgactataacagatacattgtatgatgatctcgatatctcaatcatggactttataggaccatacattataggtaacataaaaactgtccaaatagatgtacgggatataaaatattccgacatgcaaaaatgctactttagctataagggtaaaatagttcctcaggattctaatgatttggctagattcaacatttatagcatttgtgccgcatacagatcaaaaaataccatcatcatagcatgcgactatgatatcatgttagatatagaagataaacatcagccattttatctattcccatctattgatgtttttaacgctacaatcatagaagcgtataacctgtatacagctggagattatcatctaatcatcaatccttcagataatctgaaaatgaaattgtcgtttaattcttcattctgcatatcagacggcaatggatggatcataattgatgggaaatgcaatagtaattttttatcataaaagttgtaaagtaaataataaaacaataaatattgaactagtagtacgtatattgagcaatcagaaatgatgctggtacctcttatcacggtgaccgtagttgcgggaacaatattagtatgttatatattatatatttgtaggaaaaagatacgtactgtctataatgacaataaaattatcatgacaaaattaaaaaagataaagagttctaattccagcaaatctagtaaatcaactgatagcgaatcagactgggaggatcactgtagtgctatggaacaaaacaatgacgtagataatatttctaggaatgagatattggacgatgatagcttcgctggtagtttaatatgggataacgaatccaatgttatggcgcctagcacagaacacatttacgatagtgttgctggaagcacgctgctaataaataatgatcgtaatgaacagactatttatcagaacactacagtagtaattaatgaaacggagactgttgaagtacttaatgaagataccaaacagaatcctaactattcatccaatcctttcgtaaattataataaaaccagtatttgtagcaagtcaaatccgtttattacagaacttaacaataaatttagtgagaataatccgtttagacgagcacatagcgatgattatcttaataagcaagaacaagatcatgaacacgatgatatagaatcatcggtcgtatcattggtgtgattagtttcctttttataaaattgaagtaatatttagtattattgctgccgtcacgttgtacaaatggagatattccctgtattcggcatttctaaaattagcaattttattgctaataatgactgtagatattatatagatacagaacatcaaaaaattatatctgatgagatcaatagacagatggatgaaacggtacttcttaccaacatcttaagcgtagaagttgtaaatgacaatgagatgtaccatcttattcctcatagattatcgacgattatactctgtattagttctgtcggaggatgtgttatctctatagataatgacatcaatggcaaaaatattctaacctttcccattgatcatgctgtaatcatatccccactgagtaaatgtgtcgtagttagcaagggtcctacaaccatattggttgttaaagcggatatacctagcaaacgattggtaacatcgtttacaaacgacatactatatgtaaacaatctgtcactgattaattatttgccgttgtctgtattcattattagacgagtcaccgactatttggatagacacatatgcgatcagatatttgctaataataagtggtattcccttataaccatcgacgataagcaatatcctattccatcaaactgtataggtatgtcctctgccaagtacataaattctagcatcgagcaagatactttaatccatgtttgtaacctcgagcatccgttcgactcagtatacaaaaaaatgcagtcgtacaattctctacctatcaaggaacaaatattgtacggtagaattgataatataaatatgagcattagtatttctgtggattaatagatttctagtatggggatcattaatcatctctaatctctaaatacctcataaaacgaaaaaaaagctattatcaaatactgtacggaatggattcattctcttctctttttatgaaactctgttgtatatctactgataaaactggaagcaaaaaatctgatagaaagaataagaataagatcaaggattatatggaacacgattattataaaataacaatagttcctggttcctcttccacgtctactagctcgtggtattatacacatgcctagtaatagtctctttgcgttgacggaaagcagactagaaataacaggctaaaatgttcagacaccataatagttcccaacccagataataacagagttccatcaacacattcctttaaactcaatcccaaacccaaaaccgttaaaatgtatccggccaattgatagtagataatgaggtgtacagcgcatgataatttacacagtaaccaaaatgaaaatactttagtaattataagaaatatagacggtaatgtcatcatcaacaatccgataatatgcctgagagtaaacattgacggataaaacaaaaatgctccgcataactctatcatggcaataacacaaccaaatacttgtaagattcctaaattagtagaaaatacaacgaatatcgatgtataagtgatctcgagaaataataagaataaagtaatgcccgtaaagataaacatcaacattgtttggtaatcattaaaccaattagtatgaagttgaactaatttcacagtagattttattccagtgttatcctcgcatgtataagtacctggtaagatatctttatattccataatcaatgagacatcactatctgataacgaatgaagtctagcactagtatgccatttacttaatattgtcgtcttggaagttttattataagttaaaatatcatggttatccaatttccatctaatatactttgtcggattatctatagtacacggaataatgatggtatcattacatgctgtatactctatggtctttgtagttgttataacaaccaacgtatagaggtatatcaacgatattctaactcttgacattttttatttatttaaaatgatacctttgttatttattttattctattttgctaacggtattgaatggcataagtttgaaacgagtgaagaaataatttctacttacttattagacgacgtattatacacgggtgttaatggggcggtatacacattttcaaataataaactaaacaaaactggtttaactaataataattatataacaacatctataaaagtagaggatgcggataaggatacattagtatgcggaaccaataacggaaatcccaaatgttggaaaatagacggttcagacgacccaaaacatagaggtagaggatacgctccttatcaaaatagcaaagtaacgataatcagtcacaacggatgtgtactatctgacataaacatatcaaaagaaggaattaaacgatggagaagatttgacggaccatgtggttatgatttattcacggcggataacgtaattccaaaagatggtttacgaggagcattcgtcgataaagatggtacttatgacaaagtttacattcttttcactgatactatcggctcaaagagaattgtcaaaattccgtatatagcacaaatgtgcctaaacgacgaaggtggtccatcatcattgtctagtcatagatggtcgacgtttctcaaagtcgaattagaatgtgatatcgacggaagaagttatagacaaattattcattctagaactataaaaacagataatgatacgatactatatgtattcttcgatagtccttattccaagtccgcattatgtacctattctatgaataccattaaacaatctttttctacgtcaaaattggaaggatatacaaagcaattgccgtctccagctcctggtatatgtttaccagctggaaaagttgttccacataccacgtttgaagtcatagaacaatataatgtactagatgatattataaagcctttatctaaccaacctatcttcgaaggaccgtctggtgttaaatggttcgatataaaggagaaggaaaatgaacatcgggaatatagaatatacttcataaaagaaaattctatatattcgttcgatacaaaatctaaacaaactcgtagctcgcaagtcgatgcgcgactattttcagtaatggtaactgcgaaaccgttatttatagcagatatagggataggagtaggaatgccacaaatgaaaaaaatacttaaaatgtaatcttaatcgagtacaccacacgacaatgaacaaacataagacagattatgctggttatgcttgctgcgtaatatgcggtctaattgtcggaattatttttacagcgacactattaaaagttgtagaacgtaaattagttcatacaccattaatagataaaacgataaaagatgcatatattagagaagattgtcctactgactggataagctataataataaatgtatccatttatctactgatcgaaaaacctgggaggaaggacgtaatgcatgcaaagctctaaatccaaattcggatctaattaagatagagactccaaacgagttaagttttttaagaagccttagacgaggctattgggtaggagaatccgaaatattaaaccagacaaccccatataattttatagctaagaatgccacgaagaatggaactaaaaaacggaaatatatttgtagcacaacgaatactcccaaactgcattcgtgttacactatataacaattacactacatttttatcataccactacttcggttagatgttttagaaaaaaataaatatcgccgtaccgttcttgtttttataaaaataacaattaacaattatcaaattttttctttaatattttacgtggttgaccattcttggtggtaaaataatctcttagtgttggaatggaatgctgtttaatgtttccgcactcatcgtatattttgacgtatgcagtcacatcgtttacgcaatagtcagactgtagttctatcatgcttcctacatcagaaggaggaacagttttaaagtctcttggttttaatctattaccgttagttttcatgaaatcctttgttttatccacttcacattttaaataaatgtccactatacattcttttgttaattttactagatcgtcatgggtcatagaatttataggttccgtagtccatggatccaaactagcaaacttcgcgtatacggtatcgcgattagtgtatacaccaactgtatgaaaattaagaaaacagtttaataaatcaacagaaatatttaatcctccgtttgatacagatgcgccatatttatggatttcggattcacacgttgtttgtctgaggtgttcgtctagtgttgcttctacgtaaacttcgattcccatatattctttattgtcagaatcgcataccgatttatcatcatacactgtttgaaaactaaatggtatacacatcaaaataataaataataacgagtacattctgcaatattgttatcgtaattggaaaaatagtgttcgagtgagttggattatgtgagtattggattgtatattttattttatattttgtaataagaataaaatgctaatgtcaagtttattccaatagatgtcttattaaaaacatatataataaataacaatggctgaatggcataaaattatcgaggatatctcaaaaaataataagttcgaggatgccgccatcgttgattacaagactacaaagaatgttctagctgctattcctaacagaacatttgccaagattaatccgggtgaaattattcctctcatcactaatcgtaatattctaaaacctcttattggtcagaaatattgtattgtatatactaactctctaatggatgagaacacgtatgctatggagttgcttactgggtacgcccctgtatctccgatcgttatagcgagaactcataccgcacttatatttttgatgggtaagccaacaacatccagacgtgacgtgtatagaacgtgtagagatcacgctacccgtgtacgtgcaactggtaattaaaataaaaagtaatattcatatgtagtgtcaattttaaatgatgatgatgaaatggataatatccatattgacgatgtcaataatgccggtattggcatacagttcatcgatttttagatttcattcagaggatgtggaattatgttatgggcatttgtattttgataggatctataatgtagtaaatataaaatataatccgcatattccatatagatataattttattaatcacacgttaaccgtagatgaactagacgataatgtcttttttacacatggttattttttaaaacacaaatatggttcacttaatcctagtttgattgtctcattatcaggaaacttaaaatataatgatatacaatgctcagtaaatgtatcgtgtctcattaaaaatttggcaacgagtacatctactatattaacatctaaacataagacttattctctacatcggtccacgtgtattactataataggatacgattctattatatggtataaagatataaatgacaagtataatgacatctatgattttactgcaatatgtatgctaatagcgtctacattgatagtgaccatatacgtgtttaaaaaaataaaaatgaactcttaattatgctatgctattagaaatggataaaatcaaaattacggttgattcaaaaattggtaatgttgttaccatatcgtataacttggaaaagataactattgatgtcacacctaaaaagaaaaaagaaaaggatgtattattagcgcaatcagttgctgtcgaagaggcaaaagatgtcaaggtagaagaaaaaaatattatcgatattgaagatgacgatgatatggatgtagaaagcgcgtaatacgatctataaaaataagtatataaatactttttatttactgtactcttactgtgtagtggtgataccctactcgattatttttttaaaaaaaaaatacttattctgattcttctagccatttccgtgttcgtttgaatgccacatcgacgtcaaagataggggagtagttgaaatctagttctgcattgttggtacgcacctcaaatgtagtgttggatatcttcaacgtatagttgttgagtagtgatggttttctaaatagaattctcttcatatcattcttgcacgcgtacatttttagcatccatcttggaatcctagatccttgttctattcccaatggtttcatcaatagaagattaaacatatcgtacgaacacgatggagagtaatcgtagcaaaagtaagcatttcctttaatcttagatcccggatactggatatattttgcagccaacacgtgcatccatgcagcatttcctacatatacccggctatgcaccgcgtcatcatcgactgtacgatacataatgttaccgtgttgcttacattgctcgtaaaagactttcatcaatttgtctccttctccgtaaattccagtgggtcttaggcaacaagtatacaattttgctccattcatgattacggaattattggctttcataaccagttgctcggccatacgtttactttttgcgtatacatgtcctggtgatatatcataaagggtatgctcatggccgatgaatggatcaccgtgtttattgggtcctattgcttccatgctactagtatagatcaaatacttgattcctaggtccacacaagctgccaaaatagtctgtgttccataatagtttactttcatgatttcattatcggtgtattttccaaatacatccactagagcagccgtatgaataatcagatttaccccatctagcgcttctctcaccttatcaaagtcgtttatatcacattgtatatagtttataaccttaactttcgaggttattggttgtggatcttctacaatatctatgactctgatttcttgaacatcatctgcactaattaacagttttactatatacctgcctagaaatccggcaccaccagtaaccgcgtacacggccattgctgccactcataatatcagactacttattctattttactaaataatggctgtttgtataatagaccacgataatatcagaggagttatttactttgaaccagtccatggaaaagataaagttttaggatcagttattggattaaaatccggaacgtatagtttgataattcatcgttacggagatattagtcaaggatgtgattccataggcagtccagaaatatttatcggtaacatctttgtaaacagatatggtgtagcatatgtttatttagatacagatgtaaatatatttacaattattggaaaggcgttatctatttcaaaaaatgatcagagattagcgtgtggagttattggtatttcttacataaatgaaaagataatacattttcttacaattaacgagaatggcgtttgatatatcagttaatgcgtctaaaacaataaatgcattagtttacttttctactcagcaaaataaattagtcatacgtaatgaagttaatgatacacactacactgtcgaatttgatagggacaaagtagttgacacgtttatttcatataatagacataatgacaccatagagataagaggggtgcttccagaggaaactaatattggttgcgcggttagtatgacttacttgtataataagtatagttttaaactgattttagcagaatatataagacacagaaatactatatccggcaatatttattcggcattgatgacactagatgatttggctattaaacagtatggagacattgatctattatttaatgagaaacttaaagtagactccgattcgggactatttgactttgtcaactttgtaaaggatatgatatgttgtgattctagaatagtagtagctctatctagtctagtatctaaacattgggaattgacaaataaaaaatataggtgtatggcattagccgaacatatatctgatagtattccaatatctgagctatctagactacgatacaatctatgtaagtatctacgcggacacactgagagcatagaggataaatttgattattttgaagacgatgattcgtctacatgttctgccgtaaccgacagggaaacggatgtataattttttttatagcgtgaaggatatgataaaaaatataattgttgtatttatcccattccaatcaccttatatgattctgtaacacaataaaggagtcttatagatgtatagaggtcagatactggtttgataaactgtttattccacataagtatgtttgactttatggttagacccgcatactttaacaaatcactgaaaattggagttaggtattgacctctcagaatcagttgccgttctggaacattaaatgtattttttatgatatactccaacgcatttatgtgggcatacaacaagtcattactaatggaatattccaagagttttagttgtctagtatttaacaagagaagagatttcaacagactgtttatgaactcgaatgccgcctcattgtcgcttatattgatgatgtcgaattctcccaatatcatcaccgatgagtagctcatcttgttatcgggatccaagttttctaaagatgtcattaaaccctcgatcatgaatggatttatcatcatcgtttttatgttggacatgagcttagtccgtttgtccacatctatagaagatgatttctgaattatttcatatatctctctctttaactccaggaacttgtcaggatggtctactttaatatgttctcgtctaagagatgaaaatctttggatggttgcacgcgacttttctctaaaggatgacgttgcccaagatcctctcttaaatgaatccatcttatccttggacaagatggacagtctattttccttagatggtttaatatttttgttacccatgatctataaaggtagacctaatcgtctcggatgaccatatatttattttcagttttattatacgcataaattgtaaaaaatatgttaggtttacaaaaatgtctcgtggggcattaatcgtttttgaaggattggacaaatctggaaaaacaacacaatgtatgaacatcatggaatctataccggcaaacacgataaaatatcttaactttcctcagagatccactgtcactggaaaaatgatagatgactatctaactcgtaaaaaaacctataatgatcatatagttaatctattattttgtgcaaatagatgggagtttgcatcttttatacaagaacaactagaacagggaattactttaatagttgatagatacgcattttctggagtagcgtatgccgccgctaaaggcgcgtcaatgactctcagtaagagttatgaatctggattgcctaaacccgacttagttatattcttggaatctggtagcaaagaaattaatagaaacgtcggtgaggaaatttatgaagatgttacattccaacaaaaggtattacaagaatataaaaaaatgattgaagaaggagatattcattggcaaattatttcttctgaattcgaggaagatgtaaagaaggagttgattaagaatatagttatagaggctatacacacggttactggaccagtggggcaactgtggatgtaatagtgaaattacattttttataaatagatgttagtacagtgttataaatggatgaagcatattactctggcaacttggaatcagtactcggatacgtgtccgatatgcataccgaactcgtatcaatatctcaattagttattgccaagatagaaactatagataatgatatattaaacaaggacattgtaaattttatcatgtgtagatcaaacttggataatccatttatctctttcctagatactgtatatactattatagatcaagagatctatcagaccgaattgattaattcattagacgacaatgaaattatcgattgtatagttaataagtttatgagcttttataaggataacctagaaaatatagtagatgctatcattactctaaaatatataatgaataatccagattttaaaactacgtatgcagaagtactcggttccagaatagccgatatagatattaaacaagtgatacgtaagaatatactacaattgtctaataatatccgcgaacgatatttgtgaaaatattaaaaaaaaatactttttttattaaatgacgtcgcttcgcgaatttagaaaattatgctgtgatatatatcacgcatcaggatataaagaaaaatctaaattaattagagactttataacagatagggatgataaatatttgatcattaagctattgcttcccggattagacgatagaatttataacatgaacgataaacaaattataaaattatatagtataatatttaaacaatctcaggaagatatgctacaagatttaggatacggatatataggagacactattaggactttcttcaaagagaacacagaaatccgtccacgagataaaagcattttaactttagaagaagtggatagttttttaactacgttatcatccgtaactaaagaatcgcatcaaataaaattattgactgatgtagcatccgtttgtacatgtaatgatttaaaatgtgtagtcatgcttattgataaagatctaaaaattaaagcgggtcctcggtacgtacttaacgctattagtcctaatgcctatgatgtgtttagaaaatctaataacttgaaagagataatagaaaatgcatctaaacaaaatctagactctatatctatttctgttatgactccaattaatcccatgttagcggaatcgtgtgattctgtcaataaggcgtttaaaaaatttccatcaggaatgtttgcggaagtcaaatacgatggtgaaagagtacaagttcataaaaataataacgagtttgccttctttagtagaaacatgaaaccagtactctctcataaagtggattatctcaaagaatacataccgaaagcatttaaaaaagctacgtctatcgtattggattctgaaattgttcttgtagacgaacataatgtaccgctcccgtttggaagtttaggaatacacaaaaagaaagaatataaaaactctaacatgtgtttgttcgtgtttgactgtttgtactttgatggattcgatatgacggacattccattgtacgaacgaagatcttttctcaaagatgttatggttgaaatacccaatagaatagtattctcagagttgacgaatattagtaacgagtctcagttaactgacgtattggatgatgcactaacgagaaaattagaaggattggtcttaaaagatattaatggagtatacgaaccgggaaagagaagatggttaaaaataaagcgagactatttgaacgagggttccatggcagattctgccgatttagtagtactaggtgcttactatggtaaaggagcaaagggtggtatcatggcagtctttctaatgggttgttacgacgataaatccggtaaatggaagacggttaccaagtgttcaggacacgatgataatacgttaagggagttgcaagaccaattaaagatggttaaaattaacaaggatcccaaaaaaattccagagtggttggtagttaataaaatctatattcccgattttgtagtagaggatccaaaacaatctcagatatgggaaatttcaggagcagagtttacatcttccaagtcccataccgcaaatggaatatccattagatttcctagatttactaggataagagaggataaaacgtggaaagaatctactcatctaaacgatttagtaaacttgactaaatcttaatagttacatacaaactgaaaattaaaataacactatttagttggtggtcgccatggatggtgttattgtatactgtctaaacgcgctagtaaaacatggcgaggaaataaatcatataaaaaatgatttcatgattaaaccatgttgtgaaagagtttgtgaaaaagtcaagaacgttcacatcggcggacaatctaaaaacaatacagtgattgcagatttgccatatctggataatgcggtatccgatgtatgcaattcactgtataaaaagaatgtatcaagaatatccagatttgataaagatagatgacgatgacaagactcctactggtgtatataattattttaaacctaaagatgccattcctgttattatatccataggaaaggatagagatgtttgtgaactattaatctcatctgataaagcgtgtgcgtgtatagagttaaattcatataaagtagccattcttcccatggatgtttccttttttaccaaaggaaatgcatcattgattattctcctgtttgatttctctatcgatgcggcacctctcttaagaagtgtaaccgataataatgttattatatctagacaccagcgtctacatgacgagcttccgagttccaattggttcaagttttacataagtataaagtccgactattgttctatattatatatggttgttgatggatctgtgatgcatgcgatagctgataatagaactcacgcaattattagcaaaaatatattagacaatactacgattaacgatgagtgtagatgctgttattttgaaccacagattaggattcttgatagagatgagatgctcaatggatcatcgtgtgatatgaacagacattgtattatgatgtaggcaaatttggatctagtatgttggggaaatatgaacctgacatgattaagattgctctttcggtggctggtaatttaataagaaatcgagactacattcccgggagacgaggctatagcctctagataatttttttaagcacgaaataaaaaacataattttaaaccaatctatttcatactattttgtgtgatcaccatggacataaagatagatattagtatttctggtgataaatttacggtgactactaggagggaaaatgaagaaagaaaaaaatatctacctctccaaaaagaaaaaactactgatgttatcaaacctgattatcttgagtacgatgacttgttagatagagatgagatgtttactattctagaggaatattttatgtacagaggtctattaggcctcagaataaaatatggacgactctttaacgaaattaaaaaattcgacaatgatgcggaagaacaattcggtactatagaagaactcaagcagaaacttagattaaattctgaagagggagcagataactttatagattatataaaggtacaaaaacaggatatcgtcaaacttactgtatacgattgcatatctatgataggattgtgtgcatgcgtggtagatgtttggagaaatgagaaactgttttctagatggaaatattgtttacgagcgattaaactgtttattaatgatcacatgcttgataagataaaatctatactgcagaatagactagtatatgtggaaatgtcatagaaagttaaaagttaatgagagcaaaaatatataaggttgtattccatatttgttattttttctgtaatagttaaaaaatacattcgatggtctatctatcagattattatgtgttataaggtactttttctcataataaactagagtatgagtaagatagtgtttttcaaaacatataaatctaaaattgatggatgagatatacagctattaatttcgaaaatatattttaatctgataactttaaacatggatttttgatggtggtttaacgttttaaaaaaagattttgttattgtagtatatgataatattaaaagatggatataaagaatttgctgactgcatgtactattttttacattactacattggctacggcagatatacctacttcgtcactgccacacgctccggtaaacggggcatgtgacgagggagaatatcttgataagaggcataatcaatgttgtaatcagtgtccacctggagaatttgccaaggtcagatgtaatggtaacgataacacaaaatgtgaacgctgcccacctcatacatataccgcaatccccaattactctaatggatgtcatcaatgtagaaaatgcccaacaggatcatttgataaggtaaagtgtaccggaacacagaacagtaaatgttcgtgtcttcctggttggtattgcgctactgattcttcacagactgaagattgtcgagattgtataccaaaaaggagatgtccatgcggatactttggtggaatagatgaacaaggaaatcctatttgtaaatcgtgttgtgttggtgaatattgcgactacctacgtaattatagacttgatccatttcctccatgcaaactatctaaatgtaattaattatgattttgatgataatgttaccatacattatatcgctacttggttagtgtattattcagtatgaagacctattaataattacttatcttttgacgatcttgttataattataatataaaaacttatggcatagtaacttataattgctgacgcgataaattcgtaataatctgttttgttcaaaggaatctacaggcataaaaataaaaatataatttataatatactcttacagcgcgccatcatgaataacagcagtaaattaattgctgttattaatggatttagaaatagtggacgattttgtgatattaatatagttattaatgatgaaaggataaacgctcacagactcatcctatctggagcctccgaatatttttccattctgttttccaataattttatcgattctaatgaatacgaagttaatctaagtcatttagattatcaaagtgttaacgatttgatcgattacatttatgggatacctttgagcctaactaacgataacgtgaaatatattctttcaaccgctgattttttacaaattggatctgctattacggagtgtgaaaattacatacttaaaaatctttgttctagaaactgtatcgatttctacatatacgctgataaatataataacaagaaaatagaatcagcgtcgtttaacacaatattacaaaatattttgagactcatcaacgatgaaaactttaaatacttaacagaggaatcaatgataaaaattttaagcgatgatatgttaaatataaaaaatgaggatttcgccccactaattctcattaaatggttagagagtactcaacaaccatgcaccgtcgagttacttaaatgcctcagaatatcattgctttccccacaagttataaaatcactttatagtcatcgactggttagttcaatctacgaatgtataacattcttaaacaatatagcattcttggatgaatcatttcctagataccatagcatcgagttgatatctatcggtataagtaattcgcatgataagatttccataaactgctacaatcataaaaaaaatacatgggaaatgatatcttcacgtagatataggtgtagtttcgcagtggccgtcctggataatattatttatatgatgggtggatatgatcagtccccgtatagaagttcaaaggttatagcgtacaatacatgtacaaattcttggatatatgatataccagagctaaaatatcctcgttctaattgtgggggactggctgatgacgaatacatttattgtataggcggcatacgcgatcaggattcatcgttgacatctagtattgatagatggaagccatcaaaaccatattggcagaagtatgctaaaatgcgcgaaccaaaatgtgatatgggggttgcgatgttaaacggattaatatatgttataggtggaatcgttaaaggtgacacgtgtaccgacgcactagagagtttatcagaagatggatggatgaagcatcaacgtcttccaataaaaatgtccaatatgtcgacgattgttcatgatggcaagatttatatatctggaggttacaacaatagtagtgtagttaatgtaatatcgaatctagtccttagctataattcgatatatgatgaatggaccaaattatcatcattaaacattcctagaattaatcccgctctatggtcagcgcataataaattatatgtaggaggaggaatatctgatgatgttcgaactaatacatctgagacatacgacaaagaaaaagattgttggacattggataatggtcacgtgttaccacgcaattatataatgtataaatgcgaaccgattaaacataaatatccattggaaaaaacacagtacacgaatgattttctaaagtatttggaaagttttataggtagttgatagaacaaaatacataattttgtaaaaataaatcactttttatactaatatgacacgattaccaatacttttgttactaatatcattagtatactctacaccttttcctcagacatctaaaaaaataggtgatgatgcaactctatcatgtaatcgaaataatacaaatgactacgttgttatgagtgcttggtataaggagcccaattccattattcttttagctgctaaaagcgacgtcttgtattttgataattataccaaggataaaatatcttacgactctccatacgatgatctagttacaactatcacaattaaatcattgactgctagagatgccggtacttatgtatgtgcattctttatgacatcgcctacaaatgacactgataaagtagattatgaagaatactccacagagttgattgtaaatacagatagtgaatcgactatagacataatactatctggatctacacattcaccggaaactagttctgagaaacctgattatatagataattctaattgctcgtcggtattcgaaatcgcgactccggaaccaattactgataatgtagaagatcatacagacaccgtcacatacactagtgatagcattaatacagtaagtgcatcatctggagaatccacaacagacgagactccggaaccaattactgataaagaagaagatcatacagtcacagacactgtctcatacactacagtaagtacatcatctggaattgtcactactaaatcaaccaccgatgatacgtacaatgataatgatacagtaccatcaactactgtaggcggtagtacaacctctattagcaattataaaaccaaggactttgtagaaatatttggtattaccgcattaattatattgtcggccgtggcaatattctgtattacgtattatatatgtaataaacgttcacgtaaatacaaaacagagaacaaagtctagatttttgacttacataaatgtctgggatagtaaaatctatcatattgagcggaccatctggtttaggaaagacagccatagccaaaagactatgggaatatatttggatttgtggtgtcccataccactagatttcctcgtcctatggaacgagaaggtgtcgattaccattacgttaacagagaggccatctggaagggaatagccgccggaaactttctagaacatactgagtttttaggaaatatttacggaacttctaaaactgctgtgaatacagcggctattaataatcgtatttgtgtgatggatctaaacatcgatggcgttagaagtcttaaaaatacgtacctaatgccttactcggtgtatataagacctacctctcttaaaatggttgagaccaagcttcgttgtagaaacactgaagcggatgatgagattcatcgtcgtgtgatgttggcaaaaactgacatggatgaggcaggtgaagccggtctattcgacactattattattgaagatgatgtgaatttagcatatagtaagttaattcagatactacaggaccgtattagaatgtattttaacactaattagagacttaagacttaaaacttgataattaataatataactcgtttttatatgtggctatttcaacgtctaatgtattagttaaatattaaaacttaccacgtaaaacttaaaatttaaaatggtatttcattgacagatagatcacacattatgaactttcaaggacttgtgttaactgacaattgcaaaaatcaatgggtcgttggaccattaataggaaaaggtggattcggtagtatttatactactaatgacaataattatgtagtaaaaatagagcccaaagctaacggatcattatttaccgaacaggcattttatactagagtacttaaaccatccgttatcgaagaatggaaaaaatctcacaatataaagcacgtaggtcttatcacgtgcaaggcatttggtctatacaaatccattaatgtggaatatcgattcttggtaattaatagattaggtgcagatctagatgcggtgatcagagccaataataatagattaccaaaaaggtcggtgatgttgatcggaatcgaaatcttaaataccatacaatttatgcacgagcaaggatattctcacggagatattaaagcgagtaatatagtcttggatcaaatagataagaataaattatatctagtggattacggattggtttctaaattcatgtctaacggcgaacatgttccatttataagaaatccaaataaaatggataacggtactctagaatttacacctatagattcgcataaaggatacgttgtatctagacgtggagatctagaaacacttggatattgtatgattagatggttgggaggtatcttgccatggactaagatatctgaaacaaagaattgtgcattagtaagtgccacaaaacagaaatatgttaacaatactgcgactttgttaatgaccagtttgcaatatgaacctagagaattgctgcaatatattaccatggtaaactctttgacatattttgaggaacccaattacgacaagtttcggcacatattaatgcagggtgtatattattaagtgtggtgtttggtcgataaaaattaaaaaataacttaatttattattgatctcgtgtgtacaaccgaaatcatggcgatgttttacgcacacgctctcggtgggtacgacgagaatcttcatgcctttcctggaatatcatcgactgttgccaatgatgtcagaaaatattctgttgtgttagtttataataacaagtatgacattgtaaaagacaaatatatgtggtgttacagtcaggtgaacaagagatatattggagcactgctgcctatgtttgagtgcaatgaatatctacaaattggagatccgatccatgatcaagaaggaaatcaaatctctatcatcacatatcgccacaaaaactactatgctctaagcggaatcgggtacgagagtctagacttgtgtttggaaggagtagggattcatcatcacgtacttgaaacaggaaacgctgtatatggaaaagttcaacatgattattctactatcaaagagaaggccaaagaaatgaatgcacttagtccaggacctatcatcgattaccacgtctggataggagattgtatctgtcaagttactgctgtggacgtacatggaaaggaaattatgagaatgagattcaaaaagggtgcggtgcttccgatcccaaatctggtaaaagttaaacttggggagaatgatacagaaaatctttcttctactatatcggcggcaccatcgaggtaaccacctctctggaagacagcgtgaataatgtactcatgaaacgtttggaaactatacgccatatgtggtctgttgtatatgatcattttgatattgtgaatggtaaagaatgctgttatgtgcatacgcattcatctaatcaaaatcctataccgagtactgtaaaaacaaatttgtacatgaagactatgggatcatgcattcaaatggattccatggaagctctagagtatcttagcgaactgaaggaatcaggtggatggagtcccagaccagaaatgcaggaatttgaatatccagatggagtggaagacactgaatcaattgagagattggtagaggagttcttcaatagatcagaacttcaggctggtgaatcagtcaaatttggtaattctattaattgttaaacatacatctgtttcagctaagcaactaagaacacgtatacggcagcagcttccttctatactctcatcttttaccaacacaaagggtggatatttgttcattggagttgataataatacacacaaagtatttggattcacggtgggttacgactacctcagactgatagagaatgatatagaaaagcatatcaaaagactttgtgttgtgtatttctgtgagaagaaagaggacatcaagtacgcgtgtcgattcatcaaggtatataaacctggggatgaggctacctcgacatacgtgtgcgctatcaaagtggaaagatgctgttgtgctgtgtttgcagattggccagaatcatggtatatggatactaatggtatcaagaagtattctccagatgaatgggtgtcacatataaaattttaattaatgtaactatagagaacaaataataaggttgtaatatcatatagacaataactaacaattaattagtaactgttatctcttttttaattaaccaactaactatatacctattaatacatcgtaattatagttcttaacatctattaatcattaattcgcttctttaattttttataaactaacattgttaattgaaaagggataacatgttacagaatataaattatatatggatttttttaaaaaggaaatacttgactggagtatatatttatctcttcattatatagcacgcgtgttttccaatttttccacatcccatataatacaggattataatctcgttcgaacatacgagaaagtggataaaacaatagttgattttttatctaggttgccaaatttattccatattttagaatatggggaaaatattctacatatttattctatggatgatgctaatacgaatattataattttttttctagatagagtattaaatattaataagaacgggtcatttatacacaatctcgggttatcatcatccattaatataaaagaatatgtatatcaattagttaataatgatcatccagataataggataagactaatgcttgaaaatggacgtagaacaagacattttttgtcctatatatcagatacagttaatatctatatatgtattttaataaatcatggattttatatagatgccgaagacagttacggttgtacattattacatagatgtatatatcactataagaaatcagaatcagaatcatacaatgaattaattaagatattgttaaataatggatccgatgtagataaaaaagatacgtacggaaacacaccttttatcctattatgtaaacacgatatcaacaacgtggaattgtttgagatatgtttagagaatgctaatatagactctgtagactttaatagatatacacctcttcattatgtctcatgtcgtaataaatatgattttgtaaagttattaatttctaaaggagcaaatgttaatgcgcgtaataaattcggaactactccattttattgtggaattatacacggtatctcgcttataaaactatatttggaatcagacacagagttagaaatagataatgaacatatagttcgtcatttaataatttttgatgctgttgaatctttagattatctattatccagaggagttattgatattaactatcgtactatatacaacgaaacatctatttacgacgctgtcagttataatgcgtataatacgttggtctatctattaaacaaaaatggtgattttgagacgattactactagtggatgtacatgtatttcggaagcagtcgcaaacaacaacaaaataataatggaagtactattgtctaaacgaccatctttgaaaattatgatacagtctatgatagcaattactaaacataaacagcataatgcagatttattgaaaatgtgtataaaatatactgcgtgtatgaccgattatgatactcttatagatgtacagtcgctacagcaatataaatggtatattttaagatgtttcgatgaaatagatatcatgaagagatgttatataaaaaataaaactgtattccaattagttttttgtatcaaagacattaatactttaatgagatacggtaaacatccttctttcgtgaaatgcactagtctcgacgtatacggaagtcgtgtacgtaatatcatagcatctattagatatcgtcagagattaattagtctattatccaagaagctggatcctggagataaatggtcgtgttttcctaacgaaataaaatataaaatattggaaaactttaacgataacgaactatccacatatctaaaaatcttataaacattattaaaatataaaatctaagtaggataaaatcacactacatcattgtttccttttagtgctcgacagtgtatactatttttaacgctcataaataaaaatgaaaacgatttccgttgttacgttgttatgcgtactacctgctgttgtttattcaacatgtactgtacccactatgaataacgctaaattaacgtctaccgaaacatcgtttaatgataaccagaaagttacgtttacatgtgatcagggatatcattctttggatccaaatgctgtctgtgaaacagataaatggaaatacgaaaatccatgcaaaaaaatgtgcacagtttctgattatgtctctgaactatataataaaccgctatacgaagtgaattccaccatgacactaagttgcaacggcgaaacaaaatattttcgttgcgaagaaaaaaatggaaatacttcttggaatgatactgttacgtgtcctaatgcggaatgtcaacctcttcaattagaacacggatcgtgtcaaccagttaaagaaaaatactcatttggggaatatatgactatcaactgtgatgttggatatgaggttattggtgcttcgtacataagttgtacagctaattcttggaatgttattccatcatgtcaacaaaaatgtgatatgccgtctctatctaacggattaatttccggatctacattttctatcggtggcgttatacatcttagttgtaaaagtggttttacactaacggggtctccatcatccacatgtatcgacggtaaatggaatcccatactcccaatatgtgtacgaactaacgaaaaatttgatccagtggatgatggtcccgacgatgagacagatttgagcaaactctcgaaagacgttgtacaatatgaacaagaaatagaatcgttagaagcaacttatcatataatcatagtggcgttgacaattatgggcgtcatatttttaatctccgttatagtattagtttgttcctgtgacaaaaataatgaccaatataagttccataaattgctaccgtaaatataaatccgttaaaataattaataatttaataacaaacaagtatcaaaagattaaagacttatagctagaatcaattgagatgtcttcttcagtggatgttgatatctacgatgccgttagagcatttttactcaggcactattataacaagagatttattgtgtatggaagaagtaacgccatattacataatatatacaggctatttacaagatgcgccgttataccgttcgatgatatagtacgtactatgccaaatgaatcacgtgttaaacaatgggtgatggatacacttaatggtataatgatgaatgaacgcgatgtttctgtaagcgttggcaccggaatactattcatggaaatgtttttcgattacaataaaaatagtatcaacaatcaactaatgtatgatataattaatagcgtatctataattctagctaatgagagatatagaagcgcttttaacgacgatggtatatacatccgtagaaatatgattaacaagttgtacggatacgcatctctaactactattggcacgatcgctggaggtgtttgttattatctgttgatgcatctagttagtttgtataaataattatttcaatatactagttaaaattttaagattttaaatgtataaaaaactaataacgtttttatttgtaataggtgcattagcatcctattcgaataatgagtacactccgtttaataaactgagtgtaaaactctatatagatggagtagataatatagaaaattcatatactgatgataataatgaattggtgttaaattttaaagagtacacaatttctattattacagagtcatgcgacgtcggatttgattccatagatatagatgttataaacgactataaaattattgatatgtataccattgactcgtctactattcaacgcagaggtcacacgtgtagaatatctaccaaattatcatgccattatgataagtacccttatattcacaaatatgatggtgatgagcgacaatattctattactgcagagggaaaatgctataaaggaataaaatatgaaataagtatgatcaacgatgatactctattgagaaaacatactcttaaaattggatctacttatatatttgatcgtcatggacatagtaatacatattattcaaaatatgatttttaaaaatttaaaatatattatcacttcagtgacagtagtcaaataacaaacaacaccatgagatatattataattctcgcagttttgttcattaatagtatacatgctaaaataactagttataagtttgaatccgtcaattttgattccaaaattgaatggactggggatggtctatacaatatatcccttaaaaattatggcatcaagacgtggcaaacaatgtatacaaatgtaccagaaggaacatacgacatatccgcatttccaaagaatgatttcgtatctttctgggttaaatttgaacaaggcgattataaagtggaagagtattgtacgggactatgcgtcgaagtaaaaattggaccaccgactgtaacattgactgaatacgacgaccatatcaatttgtacatcgagcatccgtatgctactagaggtagcaaaaagattcctatttacaaacgcggtgacatgtgtgatatctacttgttgtatacggctaacttcacattcggagattctaaagaaccagtaccatatgatatcgatgactacgattgcacgtctacaggttgcagcatagactttgtcacaacagaaaaagtgtgcgtgacagcacagggagccacagaagggtttctcgaaaaaattactccatggagttcgaaagtatgtctgacacctaaaaagagtgtatatacatgcgcaattagatccaaagaagatgttcccaatttcaaggacaaaatggccagagttatcaagagaaaatttaatacacagtctcaatcttatttaactaaatttctcggtagcacatcaaatgatgttaccacttttcttagcatgcttaacttgactaaatattcataactaatttttattaatgatacaaaaacgaaataaaactgcatattatacactggttaacgcccttataggctctaaccattttcaagatgaggtccctgattatagtccttctgttcccctctatcatctactccatgtctattagacgatgtgagaagactgaagaggaaacatggggattgaaaatagggttgtgtataattgccaaagatttctatcccgaaagaactgattgcagtgttcatctcccaactgcaagtgaaggattgataactgaaggcaatggattcagggatatacgaaacaccgataaattataaaaaaagcaatgtgtccgctgtttccgttaataatactattttcgtaactggcggattattcataaataactctaatagcacgatcgtggttaacaatatggaaaaacttgacatttataaagacaaacaatggtcgattatagaaatgcctatggctagggtatatcacggcattgactcgacatttggaatgttatattttgccggaggtctatccgttaccgaacaatatggtaatttagagaaaaacaacgagatatcttgttacaatcctagaacgaataagtggtttgatatttcatatactatttataagatatccatatcatcattgtgtaaactaaataacgtcttctatgtatttagtaaggacattggatatgtggaaaagtatgatggtgcatggaagttagtacatgatcgtctccccgctataaaggcattatcaacttctccttattgattgaaaatgaaaatataaatagtttttatgtatagcagtattaccctatagttttattgcttactactaacatggatacagatgttacaaatgtagaagatatcataaatgaaatagatagagagaaagaagaaatactaaaaaatgtagaaattgaaaataataaaaacattaacaagaatcatcccaatgaatatattagagaagcactcgttattaataccagtagtaatagtgattccattgataaagaagttatagaatgtatcagtcacgatgtaggaatatagatcatatctactaatttttataatcgatacaaaacataaaaaacaactcgttattacatagcaggcatggaatccttcaagtattgttttgataacgatggcaagaaatggattatcggaaatactttatattctggtaattcaatactatataaggtcagaaaaaatttcactagttcgttctacaattacgtaatgaagatagatcacaaatcacacaagccattgttgtctgaaatacgattctatatatctgtattggatcctttgactatcgacaactggacacgggaacgtggtataaagtatttggctattccagatctgtatggaattggagaaaccgatgattatatgttcttcgttataaagaattcgggaagagtattcgccccaaaggatactgaatcagtcttcgaagcatgcgtcactatgataaacacgttagagtttatacactctcaaggatttacccatggaaaaatagaaccgaggaatatactgattagaaataaacgtctttcactaattgactattctagaactaacaaactatacaagagtggaaactcacatatagattacaacgaggacatgataacttcaggaaatatcaattatatgtgtgtagacaatcatcttggagcaacagtttcaagacgaggagatttagaaatgttgggatattgcatgatagaatggttcggtggcaaacttccatggaaaaacgaaagtagtataaaagtaataaaacaaaaaaaagaatataaaaaatttatagctactttctttgaggactgttttcctgaaggaaatgaacctctggaattagttagatatatagaattagtatacacgttagattattctcaaactcctaattatgacagactacgtaaactgtttatacaagattgaaattatattcttttttttatagagtgtggtagtgttacggatatctaatattaatattagactatctctatcgcgctacacgaccaatatcgattactatggatatcttctatgaaaggagagaatgtatttatttctccagcgtcaatctcgtcagtattgacaatactgtattatggagctaatggatccactgctgaacagctatcaaaatatgtagaaacggaggagaacacggataaggttagcgctcagaatatctcattcaaatccatgaataaagtatatgggcgatattctgccgtgtttaaagattcctttttgagaaaaattggcgataagtttcaaactgttgacttcactgattgtcgcactatagatgcaatcaacaagtgtgtagatatctttactgaggggaaaatcaatccactattggatgaaccattgtctcctagcaattagtgccgtatactttaaagcaaaatggttgacgccattcgaaaaggaatttaccagtgattatcccttttacgtatctccgacggaaatggtagacgtaagtatgatgtctatgtacggcaaggcatttaatcacgcatctgtaaaagaatcattcggcaacttttcaatcatagaactgccatatgttggagatactagtatgatggtcattcttccagacaagattgatggattagaatccatagaacaaaatctaacagatacaaattttaagaaatggtgtgactttatggatgctatgtttatagatgttcacattcccaagtttaaggtaacaggctcgtataatctggtggatactctagtaaagtcaggactgacagaggtgttcggttcaactggagattatagcaatatgtgtaatttagatgtgagtgtcgacgctatgatccacaaaacgtatatagatgtcaatgaagagtatacagaagcagctgcagcaacttctgtactagtggcagactgtgcatcaacaattacaaatgagttctgtgcagatcatccgttcatctatgtgattaggcatgttgatggaaaaattcttttcgttggtagatattgctctccgacaactaattgttaaccattttttttaaaaaaaatagaaaaaacatgtggtattagtgcaggtcgttgttcttccaattgcaattggtaagatgacggccaactttagtacccacgtcttttcaccacagcactgtggatgtgacagactgaccagtattgatgacgtcaaacaatgtttgactgaatatatttattggtcgtcctatgcataccgcaacaggcaatgcgctggacaattgtattccacactcctctcttttagagatgatgcggaattagtgttcatcgacattcgcgagctggtaaaaaatatgccgtgggatgatgtcaaagattgtacagaaatcatccgttgttatataccggatgagcaaaaaaccatcagagagatttcggccatcatcggactttgtgcatatgctgctacttactggggaggtgaagaccatcccactagtaacagtctgaacgcattgtttgtgatgcttgagatgctaaattacgtggattataacatcatattccggcgtatgaattgatgagttgtacatcttgacattttctttcttctcttctccctttcttctcttctcccttcctccctcttctccctttcccagaaacaaacttttttacccactataaaataaaatgagtatactacctgttatatttctttctatatttttttattcttcattcgttcagacttttaacgcgcctgaatgtatcgacaaagggcaatattttgcatcattcatggagttagaaaacgagccagtaatcttaccatgtcctcaaataaatacgctatcatccggatataatatattagatattttatgggaaaaacgaggagcggataatgatagaattataccgatagataatggtagcaatatgctaattctgaacccgacacaatcagactctggtatttatatatgcattaccacgaacgaaacctactgtgacatgatgtcgttaaatttgacaatcgtgtctgtctcagaatcaaatatagattttatctcgtatccacaaatagtaaatgagagatctactggcgaaatggtatgtcccaatattaatgcatttattgctagtaacgtaaacgcagatattatatggagcggacatcgacgccttagaaataagagacttaaacaacggacacctggaattattaccatagaagatgttagaaaaaatgatgctggttattatacatgtgttttagaatatatatacggtggcaaaacatataacgtaaccagaattgtaaaattagaggtacgggataaaataataccttctactatgcaattaccagatggcattgtaacttcaataggtagtaatttgactattgcatcgttgagacctcccacaacggatgcagacgtcttttggataagtaatggtatgtattacgaagaagatgatggggacggaaacggtagaataagtgtagcaaataaaatctatatgaccgataagagacgtgttattacatcccggttaaacattaatcctgtcaaggaagaagatgctacaacgtttacgtgtatggcgtttactattcctagcatcagcaaaacagttactgttagtataacgtgaatgtatgttgttacatttccatgtcaattgagtttataagaatttttatacattatcttccaacaaacaattgacgaacgtattgctatgattaactcccacgatactatgcatattattaatcattaacttgcagactatacctagtgctattttgacatactcatgttcttgtgtaattgcggtatctatattattaaagtacgtaaatctagctatagttttattatttaattttagataatataccgtctccttatttttaaaaattgccacatcctttattaaatcatgaatgggaatttctatgtcatcgttagtatattgtgaacaacaagagcagatatctataggaaagggtggaatgcgatacattgatctatgtagttttaaaacacacgcgaactttgaagaatttatataaatcattccatcgatacatccttctatgttgagatgtatatatccaggaattcgtttattaatatcgggaaatgtataaactaaaacattgcccgaaagcggtgcctctatctgcgttatatccgttcttaacttacaaaatgtaaccaatacctttgcatgacttgttttgttcggcaacgttagtttaaacttgacgaatggattaattacaatagcatgatccgcgcatctattaagtttttttactttaacgcccttgtatgtttttacagagactttatctaaatttctagtgcttgtatgtgttataaatataacgggatatagaaccgaatcacctaccttagatacccaattacattttatcagatccagataataaacaaattttgtcgccctaactaattctatattgttatatattttacaattggttatgatatcatgtaataacttggagtctaacgcgcatcgtcgtacgtttatacaattgtgatttagtgtagtatatctacacatgtatttttccgcactatagtattctggactagtgataaaactatcgttatatctatcttcaatgaactcatcgagatattgctctctgtcatattcatacacctgcataaactttctagacatcttacaatccgtgttattttaggatcatatttacatatttacgggtatatcaaagatgttagattagttaatgggaatcgtctataataatgaatattaaacaattatatgaggacttttaccacaaagcatcataaaaatgagtcgtcgtctgatttatgttttaaatatcaaccgcaaatcaactcataaaatacaagagaatgaaatatatacatattttagtcattgcaatatagaccatacttctacagaacttgattttgtagttaaaaactatgatctaaacagacgacaacctgtaactgggtatactgcactacactgctatttgtataataattactttacaaacgatgtactgaagatattattaaatcatggagtggatgtaacgatgaaaaccagtagcggacgtatgcctgtttatatattgcttactagatgttgtaatatttcacatgatgtagtgatagatatgatagacaaagataaaaaccacttattacatagagactattccaacctattactagagtatataaaatctcgttacatgttattaaaggaagaggatatcgatgagaacatagtatccactttattagataagggaatcgatcctaactttaaacaagacggatatacagcgttacattattattatttgtgtctcgcacacgtttataaaccaggtgagtgtagaaaaccgataacgataaaaaaggccaagcgaattatttctttgtttatacaacatggagctaatctaaacgcgttagataattgtggtaatacaccattccatttgtatcttagtattgaaatgtgtaataatattcatatgactaaaatgctgttgacttttaatccgaatttcgaaatatgtaataatcatggattaacgcctatactatgttatataacttccgactacatacaacacgatattcttgttatgttaatacatcactatgaaacaaatgttggagaaatgccgatagatgagcgtcgtatgatcgtattcgagtttatcaaaacatattctacacgtccggcagattcgataacttatttgatgaataggtttaaaaatataaatatttatacccgctatgaaggaaagacattattacacgtagcatgtgaatataataatacacacgtaatagattatcttatacgtatcaacggagatataaatgcgttaaccgacaataacaaacacgctacacaactcattatagataacaaagaaaattccccatataccattaattgtttactgtatatacttagatatattgtagataagaatgtgataagatcgttggtggatcaacttccatctctacctatcttcgatataaaatcatttgagaaattcatatcctactgtatacttttagatgacacattttacgataggcacgttaagaatcgcgattctaaaacgtatcgatacgcattttcaaaatacatgtcgtttgataaatacgatggtataataactaaatgtcacgacgaaacaatgttactcaaactgtccactgttctagacactacactatatgcagttttaagatgtcataattcgagaaagttaagaagatacctcaacgagttaaaaaaatataataacgataagtcctttaaaatatattctaatattatgaatgagagataccttaatgtatattataaagatatgtacgtgtcaaaggtatatgataaactatttcctgttttcacagataaaaattgtctactaacattactaccttcagaaattatatacgaaatattatacatgctgacaattaacgatctttataatatatcgtatccacctaccaaagtatagttgtatttttctcatgcgatgtgtgtaaaaaaactgatattatataaatattttagtgccgtataataaagatgacgatgaaaatgatggtacatatatatttcgtatcattattgttattgctattccacagttacgccatagacatcgaaaatgaaatcacagaattcttcaataaaatgagagatactctaccagctaaagactctaaatggttgaatccagcatgtatgttcggaggcacaatgaatgatatagccgctctaggagagccattcagcgcaaagtgtcctcctattgaagacagtcttttatcgcacagatataaagactatgtggttaaatgggagaggctagaaaagaatagacggcgacaggtttctaataaacgtgttaaacatggtgatttatggatagccaactatacatctaaattcagtaaccgtaggtatttgtgcaccgtaactacaaagaatggtgactgtgttcagggtatagttagatctcatattaaaaaacctccttcatgcattccaaaaacatatgaactaggtactcatgataagtatggcatagacttatactgtggaattctttacgcaaaacattataataatataacttggtataaagataataaggaaattaatatcgacgacattaagtattcacaaacgggaaaggaattaattattcataatccagagttagaagatagcggaagatacgactgttacgttcattacgacgacgttagaatcaagaatgatatcgtagtatcaagatgtaaaatacttacggttataccgtcacaagaccacaggtttaaactaatactagatccgaaaatcaacgtaacgataggagaacctgccaatataacatgcactgctgtgtcaacgtcattattgatcgacgatgtactgattgaatgggaaaatccatccggatggcttataggattcgattttgatgtatactctgttttaactagtagaggcggtatcaccgaggcgaccttgtactttgaaaatgttactgaagaatatataggtaatacatataaatgtcgtggacacaactattattttgaaaaaacccttacaactacagtagtattggagtaaatacacaatgcatttttatatacattactgaattattattactgaattattattactgaattattattaattatatcgtatttgtgctatagaatggatgaagatacgcgactatctaggtatttgtatctcaccgatagagaacatataaatgtagactctattaaacagttgtgtaaaatatcagatcctaatgcatgttatagatgtggatgtacggctttacatgagtacttttataattatagatcagtcaacggaaaatacaagtatagatacaacggttactatcaatattattcatctagcgattatgaaaattataatgaatattattatgatagaactggtatgaacagtgagagtgataatatatcaatcaaaacagaatatgaattctatgatgaaacacaagatcaaagtacacaactagtaggttacgacattaaactcaaaaccaatgaggatgattttatggctatgatagatcagtgggtgtccatgattatatagatgaatcaattaataaagtagtatatggaagagagtctcacgtaagatggcgggatatatggcaagaacataatgatggcgtatacagtataggaaaggagtgcatagataatatatacgaagacaaccataccgtagacgaattctacaagatagacagcgtatcagatgtagatgacgcggaacacatatctcctataactaatgatgtatctacacaaacatgggaaaagaaatcagagttagatagatacatggaatcgtatcctcgtcatagatatagtaaacattctgtatttaagggattttctgataaagttagaaaaaatgatttagacatgaatgtggtaaaagaattactttctaacggtgcatctctaacaatcaaggatagcagtaataaggatccaattgctgtttattttagaagaacgataatgaatttagaaatgattgatattattaacaaacatacaactattgatgaacgaaagtatatagtacactcctatctaaaaaattatagaaatttcgattatccatttttcaggaagttagttttgactaataaacattgtctcaacaattattataatataagcgacagcaaatatggaacaccgctacatatattggcgtctaataaaaaattaataactcctaattacatgaagttattagtgtataacggaaatgatataaacgcacgaggtgaagatacacaaatgcgaaccaactcagaaatggttgttgtattattgggtgtataggtattattagctatgtaccaatttaccaaccctcttaatattgattgataatcacatcggttatccaatcaataactaaattgtagtgtatatatagaccatatatgtttctatttttttgacagttacgtatagtttcagtaagttttgattgttgtattcctgtatctctagataagttagtcatatagtcccttccggcgatacgttttttccaagcccgaaattgattagccaaatgtgtatttatttttgtgatattgatataatatttcggataatgcatactgttagtcttatatcatttggttcatctatgtattgtaatattgttacatgatctatagatgatgtattgattttggcaggatcgaattccatatccgcgactaaacagtgaaaaaaatgtaaatactttttaaattttaaattagtaaaacttttttttattttttatgattccaaaaatactgaatacaaagtcctaaattataaatatggagatcatactaccacaacttattattatgtatacaaggccggtgtaatagatagatatatataattctattacaccggcagacaattaccgaccggtatttgtcgttaccaacataccgtataatatgtaatatacaattccataacccattgacagttgttatacatcaaaattgcaattcttttgattacgatgttataagaatgtagttaattgatgtatgatgttaatgtgtcctctttcctcttataacatcgtaatcaaaaacttttttataatatatacctaataatgtgtcttaatagttctcgtgattcgtcaaacaatcattcttataaaatataataaagcaacgtaaaacacataaaaataagcgtaactaataagacaatggatatttacgacgataaaggtctacagactattaaactgtttaataatgaatttgattgtataaggaatgacatcagagaattatttaaacatgtaactgattccgatagtatacaacttccgatggaagacaattctgatattatagaaaatatcagaaaaatactatatagacgattaaaaaatgtagaatgtgttgacatcgataacacaataacttttatgaaatacgatccaaatgatgataataagcgtacgtgttctaattgggtacccttaactaataactatatggaatattgtctagtaatatatttggaaacaccgatatgtggaggcaaaataaaattataccaccctacaggaaatataaagtcggataaggatattatgtttgcaaagactctagactttaaatcaacgaaagtgttaactggacgtaaaacaattgccgttctagacatatccgtttcatataatagatcaatgactactattcactacaacgacgacgttgatatagatatacatactgataaaaatggaaaagagttatgttattgttatataacaatagatgatcattacttggttgatgtggaaactataggagttatagtcaatagatctggaaaatgtctgttagtaaataaccatctaggtataggtatcgttaaagataaacgtataagcgatagttttggagatgtatgtatggatacaatatttgacttttctgaagcacgagagttattttcattaactaatgatgataacaggaatatagcatgggacactgataaactagacgatgatacagatatatggactcccgtcacagaagatgattacaaatttctttctagactagtattgtatgcaaaatctcaatcggatactgtatttgactattatgttcttactggtgatacggaaccacccactgtattcattttcaaggtaactagattttactttaatatgccgaaataaaaaatttttgtataatatctagaggtagaggtattgtttagataaatacaaataacatagatacatcgcatacttagcatttttataaatatacataagacatacactttatacatttttgtaaaaatactcataaaaaaaatttataaaaattatggcacaaccatatcttgtataggtagtttagttcgtcgagtgaacctataaacagataatagacaacacataataatgcctactaatacaagcataataccgggagatgggatatatgacgttgtagtgtttgggttttctgaacgttgatagtctactaatactacatgctgacatctaatgcctgtataaccatgagagcatctacaatacataccgtcaatatctctagcgtggatacagtcaccgtgtaaacaatatccatctccctctggaccgcataatctgatagctggaatatctgttgtagcgtttgtaatttctggcaatgtcgtttcgatagcgttaccactatcggcgaatgatctgattatcatagcagcgaacaacaacatcagataatttatcaacatttttgatggattctgtgtttatgctgtttctcagtgtgtgtttatgacaagattgggaattttatattattaattcagtaatataaactaataatatattgttaattgtgtaaataatataaaaataacaatacaatattgaatgtgttgctgttaaaaatgtatgtgttaatataatagaataaaataaatgagtatgatcattttagataacgattgattttatcattaccgcttcattcttatattctttgcttacggaacctatatttagaaacatctactaacaattttttatgcttgcattattaatggtatgtaatatgattgattgtgtacgcaataccaatttgttaagtatgaatacggggtacaaacataaattgaaatttaacattatttatttatgatatatatcgttatcgttaggtctataccatggatatctttaaagaactaatcttaaaacaccctgatgaaaatgttttgatttctccagtttccattttatctactttatctattctaaatcatggagcagctggttctacagctgaacaactatcaaaatatatagagaatatgaatgagaatacacccgatgacaataatgatgacatggaggtagatattccgtattgtgcgacactagctaccgcaaataaaatatacggtagcgatagtatcgagttccacgcctccttcctacaaaaaataaaagacgattttcaaactgtaaactttaataatgctaaccaaacaaaggaactaatcaacgaatgggttaagacaatgacaaatggtaaaattaattccttattgactagtccgctatccattaatactcgtatgacagttgttagcgccgtccattttaaagcaatgtggaaatatccattttctaaacatcttacatatacagacaagttttatatttctaagaatatagttaccagcgttgatatgatggtgggtaccgagaataacttgcaatatgtacatattaatgaattattcggaggattctctattatcgatattccatacgagggaaactctagtatggtaattatactaccggacgacatagaaggtatatataacatagaaaaaaatataacagatgaaaaatttaaaaaatggtgtggtatgttatctactaaaagtatagacttgtatatgccaaagtttaaagtggaaatgacagaaccgtataatctggtaccgattttagaaaatttaggacttactaatatattcggatattatgcagattttagcaagatgtgtaatgaaactatcactgtagaaaaatttctacatacgacgtttatagatgttaatgaggagtatacagaagcatcggccgttacaggagtatttacgattaacttttcgatggtatatcgtacgaaggtctacataaaccatccattcatgtacatgattaaagacaccacaggacgtatactttttatagggaaatactgctatccgcaataaatataaacaaatagacttttataaagagtcttcaacgataagtatatcgacatactacttatgctgcgaaagattctgaacgagaacgactatctcaccctcttggatcatatccgcactgctaaatactaaatctccactacactttttatcatcttatgaggaatgattgccttcgtgaaataggaataattagcaccagaatagctatggattattgtggtagagagtgcactattctatgtcgtctactggatgaagatgtgacgtacaaaaaaataaaactagaaattgaaacgtgtcacaacttatcaaaacatatagatagacgaggaaacaatgcgctacattgttacgtctccaataaatgcgatacagacattaagattgttctctcgcggagtcgagagactttgtagaaacaacgaaggattaactccgctaggagtatacagtaagcatagatacgtcaaatctcagattgtgcatctactgatatccagctattcaaattcctctaacgaactcaagtcgaatataaatgatttcgatctgtattcggataatatcgacttacgtctgctaaaatacctaattgtggataaacggatacgtccgtccaagaatacgaattatgcaatcaatggtctcggattggtggatatatacgtaacgacgcctaatccgagaccagaagtattgctatggcttcttaaatcagaatgttacagcaccggttacgtatttcgtacctgtatgtacgacagtgatatgtgtaagaactctcttcattactatatatcgtctcatagagaatctcaatctctatccaaggatgtaattaaatgtttgatcgataacaatgtttccatccatggcagagacgaaggaggatctttacccatccaatactactggtctttctcaaccatagatatagagattgttaaattattattaataaaggatgtggacacgtgtagagtatacgacgtcagccctatattatctaaacaagcgatttagagtaaccccatataatgtagacatggaaatcgttaatcttcttattgagagacgtcatactcttgtcgacgtaatgcgtagtattacttcgtacgattccagagaatataaccactacatcatcgataacattctaaagagatttagacaacaggatgtacaagccatgttgataaactacttacattacggcgatatggtcgttcgatgcatgttagataacggacaacaactatcctctgcacgactactttgttaataataatctcgtcgatgtaaacgtcgtaaggtttatcgtggaaaatatggacacgcggctgtaaatcacgtatcgaacaatggccgtctatgtatgtacggtctgatattatcgagatttaataattgcgggtatcactgttatgaaaccatactgatagatgtatttgatatactaagcaagtacatggatgatatagatatgatcgataactctactatattacgcggtcgatgtcaataatatacaatttgcaaagcggttattggaatatggagcgagtgtcacgctcgataatcaatacggccatccagaaaagcagttaccaaagagaaaacaaaacgaagctagttgatttattactgagttaccatcccactctagagactatgattgacgcatttaatagagatatacgctatctatatcctgaaccattattcgcctgtatcagatacgccttaatcctagatgatgattttccttctaaagtaaagtatgatatcgccggtcgtcataaggaactaaagcgctatagagtagacattaatagaatgaagaatgtctacatatcaggcgtctccatgtttgatatattatttaaacgaagcaaacgccacaaattgagatacgcaaagaatccgacatcaaatggtacaaaaaagaactaacgtccatcattacagaaactgtaaagaacaatgagaggatcgactccatagtggacaacattaatacagacgataacttgatttcgaaattacccatggagatactttattactccattaaataatttatcatggagcgataatgtcctgtttcatttgtttccatgacatattacaaaatcgattccgtccaagatgataaaaacatttaccggcatcataaacacggagtttattttatatgtctcgcataaacattactaaaaaaatatattgttcggttttctttcacatctttaattatgaaaaagtaaatcattatgagatggacgagattgtacgcatcgttcgcgacagtatgtggtacatacctaacgtatttatggacgacggtaagaatgaaggtcacgtttctgtcaacaatgtctgtcatatgtattttacgttctttgatgtggatacatcgtctcatctgtttaagctagttattaaacactgcgatctgaataaacgaggtaactctccattacattgctatacgatgaatacacgatttaatccatctgtattaaagatattgttacaccacggcatgcgtaactttgatagcaaggatgaccactatcaatcgataacaagatctttgatatactaacggacaccattgatgactttagtaaatcatccgatctattgctgtgttatcttagatataaattcaatgggagcttaaactattacgttctgtacaaaggatccgaccctaattgcgccgacgaggatgaactcacttctcttcattactactgtaaacacatatccacgttctacgaaagcaattattacaagttaagtcacactaagatgcgagccgagaagcgattcatctacgcgataatagattatggagcaaacattaacgcggttacacacttaccttcaacagtataccaaacatagtcctcgtgtggtgtatgctcttttatctcgaggagccgatacgaggatacgtaataatcttgattgtacacccatcatggaacgattgtgcaacaggtcatattctcataatgttactcaattggcacgaacaaaaggaagaaggacaacatctactttatctattcataaaacataatcaaggatacactctcaatatactacggtatctattagataggttcgacattcagaaagacgaatactataataccgcctttcaaaattgtaacaacaatgttgcctcatacatcggatacgacatcaaccttccgactaaagacggtattcgacttggtgtttgaaaacagaaacatcatatacaaggcggatgttgtgaatgacatcatccaccacagactgaaagtatctctacctatgattaaatcgttgttctacaagatgtctctccctacgacgattactacgtaaaaaagatactagcctactgcctattaagggacgagtcattcgcggaactacatagtaaattctgtttaaacgaggactataaaagtgtatttatgaaaaatatatcattcgataagatagattccatcatcgtgacataagtcgccttaaagagattcgaatctccgacaccgacctgtatacggtatcacagctatcttaaagccatacattcagacagtcacatttcatttcccatgtacgacgatctcatagaacagtgccatctatcgatggagcgtaaaagtaaactcgtcgacaaagcactcaataaattagagtctaccatcggtcaatctagactatcgtatttgcctccggaaattatgcgcaatatcatctaaacagtatgttgtacggaaagaaccattacaaatattatccatgatagaaagaaaatatctatatgattggagaagtaggaaacaggaacaagacgacgattactacattattaaatcatgaagtccgtattatactcgtatatattgtttctctcatgtataataataaacggaagagatatagcaccgcatgcaccatccgatggaaagtgtaaagacaacgaatacaaacgccataatttgtgtccgggaacatacgcttccagattatgcgatagcaagactaacacacaatgtacgccgtgtggttcgggtaccttcacatctcgcaataatcatttacccgcttgtctaagttgtaacggaagacgcgatcgtgtaacacgactcacaatagaatctgtgaatgctctcccggatattattgtcttctcaaaggatcatccggatgcaaggcatgtgtttcccaaacaaaatgtagaataggatacggagtatccggagacgtcatctgttctccgtgtggtctcggaacatattctcacaccgtctcttccgcagataaatgcgaacccgtacccagtaatacctttaactatatcgatgtggaaattaacctgtatcccgtcaacgacacgtcgtgtactcggacgaccactaccggtctcagcgaatccatctcaacgtcggaactaactattactatgaatcataaagactgtaatcccgtctttcgtgatggatacttctccgttcttaataaggtagcgacttcaggtttctttacaggagaaaggtgtgcactctgaatttcgagattaaatgcaataacaaagattcttcctccaaacagttaacgaaagcaaagaatgatactatcatgccgcattcggagacagtaactctagtgggcgacatctatatactatatagtaataccaatactcaagactacgaaactgatacaatctcttatcatgtgggtaatgttctcgatgtcgatagccatatgcccggtagttgcgatatacataaactgatcactaattccaaacccacccactttttatagtaagtttttcacccataaataataaatacaataattaatttctcgtaaaagtagaaaatatattctaatttattgcacggtaaggaagtagaatcataaagaacagtactcaatcaatagcaattatgaaacaatatatcgtcctggcatgcatgtgcctggcggcagctgctatgcctgccagtcttcagcaatcatcctcatcctcctcctcgtgtacggaagaagaaaacaaacatcatatgggaatcgatgttattatcaaagtcacaaagcaagaccaaacaccgaccaatgataagatttgccaatccgtaacggaaattacagagtccgagtcagatccagatcccgaggtggaatcagaagatgattccacatcagtcgaggatgtagatcctcctaccacttattactccatcatcggtggaggtctgagaatgaactttggattcaccaaatgtcctcagattaaatccatctcagaatccgctgatggaaacacagtgaatgctagattgtccagcgtgtccccaggacaaggtaaggactctcccgcgatcactcatgaagaagctcttgctatgatcaaagactgtgaagtgtctatcgacatcagatgtagcgaagaagagaaagacagcgacatcaagacccatccagtactcgggtctaacatctctcataagaaagtgagttacgaagatatcatcggttcaacgatcgtcgatacaaaatgcgtcaagaatctagagtttagcgttcgtatcggagacatgtgcaaggaatcatctgaacttgaggtcaaggatggattcaagtatgtcgacggatcggcatctgaaggtgcaaccgatgatacttcactcatcgattcaacaaaactcaaagcgtgtgtctgaatcgataactctattcatctgaaattggatgagtagggttaatcgaacgattcagacacaccacgaattaaaaaagtgtaccggacactatattccggtttgcaaaacaaaaatgttcttaactacattcacaaaaagttacctctcgcgacttcttctttttctgtctcaatagtgtgatacgattatgacactattcctattcctattcctatttcctttcagagtatcacaaaaatattaaacctctttctgatggtctcataaaaaaagttttacaaaaatatttttattctctttctctctttgatggtctcataaaaaaagttttacaaaaatatttttattctctttctctctttgatggtctcataaaaaaagttttacaaaaatatttttattctctttctctctttgatggtctcataaaaaaagttttacaaaaatatttttattctctttctctctttgatggtctcataaaaaaagttttacaaaaatatttttattctctttctctctttgatggtctcataaaaaaagttttacaaaaatatttttattctctttctctctttgatggtctcataaaaaaagttttacaaaaatatttttattctctttctctctttgatggtctcataaaaaaagttttacaaaaatatttttattctctttctctctttgatggtctcataaaaaaagttttacaaaaatatttttattctctttctctctttgatggtctcataaaaaaagttttacaaaaatatttttattctctttctctctttgatggtctcataaaaaaagttttacaaaaatatttttattttctttctctctttgatggtctcataaaaaatattaaacctctttctgatggtgtcactaaaatatttttattctcattctcattttctctttctctcttcaatggagtcataaaatatttttattctctttctctcttcgatggtctcacaaaaatattaaacctctttctgatggtgtcactaaaatatttttattctcattctcattttctttttctctcttcaatggagtcataaaatatttttattctctttctctcttcgatggtctcacaaaaatattaaacctctttctgatggagtcgtaaaaaagttttatctctttctctcttcgatggtctcactaaaatattttttattctctttctgatgcatcaactatttcttaaacaataacgtccaacaacatatactcgtcgagcttatcaacatcccctatgcccatctaggttaccagacaattgtatatcataaaataatgtttataatttacacgttaaaatcatataataaaacgtagatcgtataatattttttggtatataaatgatctagtaaaatccatgtaggggatactgctcacattttttctttggtacaaaatttcacacaagtttttatacagacaaattcttgtccatatattttaaaacattgacttttgtactaagaaaaatatctagactaactatctc

SEQ ID NO: 22 - DNA, 187653 bp, Artificial Sequence
  LIVP 4.1.1
agaaagagaataaaaatatttttgtaaaactttttttatgagaccatcaaagagagaaagagaataaaaatatttttgtaaaactttttttatgagaccatcaaagagagaaagagaataaaaatatttttgtaaaactttttttatgagaccatcaaagagagaaagagaataaaaatatttttgtaaaactttttttatgagaccatcaaagagagaaagagaataaaaatatttttgtaaaactttttttatgagaccatcaaagagagaaagagaataaaaatatttttgtaaaactttttttatgagaccatcaaagagagaaagagaataaaaatatttttgtaaaactttttttatgagaccatcaaagagagaaagagaataaaaatatttttgtaaaactttttttatgagaccatcaaagagagaaagagaataaaaatatttttgtaaaactttttttatgagaccatcagaaagaggtttaatatttttgtgatactctgaaaggaaataggaataggaataggaatagtgtcataatcgtatcacactattgagacagaaaaagaagaagtcgcgagaggtaactttttgtgaatgtagttaagaacatttttgttttgcaaaccggaatatagtgtccggtacacttttttaattcgtggtgtgcctgaatcgttcgattaaccctactcatccaatttcagatgaatagagttatcgattcagacacacgctttgagttttgttgaatcgatgagtgaagtatcatcggttgcaccttcagatgccgatccgtcgacatacttgaatccatccttgacctcaagttcagatgattccttgcacatgtctccgatacgaacgctaaactctagattcttgacgcattttgtatcgacgatcgttgaaccgatgatatcttcgtaactcactttcttatgagagatgttagacccgagtactggatgggtcttgatgtcgctgtctttctcttcttcgctacatctgatgtcgatagacacttcacagtctttgatcatagcaagagcttcttcatgagtgatcgcgggagagtccttaccttgtcctggggacacgctggacaatctagcattcactgtgtttccatcagcggattctgagatggatttaatctgaggacatttggtgaatccaaagttcattctcagacctccaccgatgatggagtaataagtggtaggaggatctacatcctcgactgatgtggaatcatcttctgattccacctcgggatctggatctgactcggactctgtaatttccgttacggattggcaaatcttatcattggtcggtgtttggtcttgctttgtgactttgataataacatcgattcccatatgatgtttgttttcttcttccgtacacgaggaggaggatgaggatgattgctgaagactggcaggcatagcagctgccgccaggcacatgcatgccagtacgatatattgtttcataattgctattgattgagtactgttctttatgattctacttccttaccgtgcaataaattagaatatattttctacttttacgagaaattaattattgtatttattatttatgggtgaaaaacttactataaaaagtgggtgggtttggaattagtgatcagtttatgtatatcgcaactaccgggcatatggctatcgacatcgagaacattacccacatgataagagattgtatcagtttcgtagtcttgagtattggtattactatatagtatatagatgtcgcccactagagttactgtctccgaatgcggcatgatagtatcattctttgctttcgttaactgtttggaggaagaatctttgttattgcatttaatctcgaaattcagagtgcacacctttctcctgtaaagaaacctgaagtcgctaccttattaagaacggagaagtatccatcacgaaatacgggattacagtctttatgattcatagtaatagttagttccgacgttgagatggattcgctgagaccggtagtggtcgtccgagtacacgacgtgtcgttaactggatacaggttaatttccacatcgatatagttaaacgtatttctgggtacgggttcgcatttatctgcggaagagacggtgtgagaatatgttccgagaccacacggagaacagatgacgtctccggatactccgtatcctattccacattttgtttgggaaacacatgccttgcatccggatgatcctttgagaagacaataatatccgggagagcattcacagattctattgtgagtcgtgttacacgatcgcgtcttccgttacaacttagacaagcgggtaaatgattattgcgagatgtgaaggtacccgaaccacacggcgtacatcgtgtgttagtcttgctatcgcataatctggaagcgtatgttcccggacacagattatggcgtttgtattcgttgtctttacactttccatcggatggtgcatgcggtgctatatctcttccgtttattattatacatgagagaaacaatatatacgagtataatacggacttcataatttaataatgtagtaatcgttgtcttgttcctgtttcctacttctccaatcatggataatatttgtaatggttctttccgtacaacatactgtttagatgatattgcgcataatttccggaggcaaatacgatagtctagattggccatcgatggtagactctaatttattgagtgctttgtcgacgagtttcgatagatggcactgttctatgagatcgtcgtacatgggaaatgaaatgtgactgtctgaatgtatggctttaagatagctgtgataccgtatacaggtcggtgtcggagattcgaatctctttgaggcgacttatgtcacgatgatggaatctatcttatcgaatgatatatttttcataaatacacttttatagtcctcgtttaaacagaatttactatgtagttccgcgaatgactcgtcccttaataggcagtaggctagtatcttttttacgtagtaatcgtcgtagggagagacatcttgtagaacaacgatttaatcataggtagagatactttcagtctgtggtggatgatgtcattcacaacatccgccttgtatatgatgtttctgttttcaaacaccaagtcgaataccgtctttagtcggaaggttgatgtcgtatccgatgtatgaggcaacattgttgttacaattttgaaaggcggtattatagtattcgtctttctgaatgtcgaacctatctaatagataccgtagtatattgagagtgtatccttgattatgttttatgaatagataaagtagatgttgtccttcttccttttgttcgtgccaattgagtaacattatgagaatatgacctgttgcacaatcgttccatgatgggtgtacaatcaagattattacgtatcctcgtatcggctcctcgagataaaagagcatacaccacacgaggactatgtttggtatactgttgaaggtaagtgtgtaaccgcgttaatgtttgctccataatctattatcgcgtagatgaatcgcttctcggctcgcatcttagtgtgacttaacttgtaataattgctttcgtagaacgtggatatgtgtttacagtagtaatgaagagaagtgagttcatcctcgtcggcgcaattagggtcggatcctttgtacagaacgtaatagtttaagctcccattgaatttatatctaagataacacagcaatagatcggatgatttactaaagtcatcaatggtgtccgttagtatatcaaagatcttgttatcgattgatagtggtcatccttgctatcaaagttacgcatgccgtggtgtaacaatatctttaatacagatggattaaatcgtgtattcatcgtatagcaatgtaatggagagttacctcgtttattcagatcgcagtgtttaataactagcttaaacagatgagacgatgtatccacatcaaagaacgtaaaatacatatgacagacattgttgacagaaacgtgaccttcattcttaccgtcgtccataaatacgttaggtatgtaccacatactgtcgcgaacgatgcgtacaatctcgtccatctcataatgatttactttttcataattaaagatgtgaaagaaaaccgaacaatatatttttttagtaatgtttatgcgagacatataaaataaactccgtgtttatgatgccggtaaatgtttttatcatcttggacggaatcgattttgtaatatgtcatggaaacaaatgaaacaggacattatcgctccatgataaattatttaatggagtaataaagtatctccatgggtaatttcgaaatcaagttatcgtctgtattaatgttgtccactatggagtcgatcctctcattgttctttacagtttctgtaatgatggacgttagttcttttttgtaccatttgatgtcggattctttgcgtatctcaatctgtggcgtttgcttcgtttaaataatatatcaaacatggagacgcctgatatgtaggcattcttcattctattaatgtctactctatagcgctttagttccttatgacgaccggcgatatcatactttactttagaaggaaaatcatcatctaggattaaggcgtatctgatacatgccgataatggttcaggatatagatagcgtatatctctattaaatgcgtcaatcatagtctctagagtgggatggtaactcagtaataaatcaactatcctcgttttgttttctctttggtaactgcttttctggatggccgtattgattatcgagcgtgatgttgtgacactcgctccatattccaataaccgctttgcaaattgtatattattgacatcgaccgcgtaatatagtagagttatcgatcatatctatatcatccatgtacttgcttagtatatcaaatacatctatcagtatggtttcataacagtgatacccgcaattattaaatctcgataatatcagaccgtacatacatagacggccattgttcgatatgtgatttacagccgcgtgtccatattttccacgataaaccttacgacgtttacatcgacgagattattattaacaaagtagtcgtgtagaggatagttgttgtccgtcgtcttatccatggttgctccgttatctaacatgcattgaatgataggtatacttaccatatcgccgtaatgtaagtagtttatcaacatggcttgtacatcctgttgtctaaatctctttagaatgttatcgatgatgtagtggttatattctctggaatcgtacgaagtaatactacgcattacgtcgacaagagtatgacgtctctcaataagaagattaacgatttccatgtctacattatatggggttactctaaatcgcttgtttagataatacgcctctaatatagggctgacgtcgtatactctacacgtgtccacatcctttattaataataatttaacaatctctatatctatggttgagaaagaccagtagtattggatgggtaaagatcctccttcgtctctgccatggatggaaacattgttatcgatcaaacatttaattacatccttggatagagattgagattctctatgagacgatatatagtaatgaagagagttcttacacatatcactgtcgtacatacaggtacgaaatacgtaaccggtgctgtaacattctgatttaagaagccatagcaatacttctggtctcggattaggcgtcgttacgtatatatccaccaatccgagaccattgattgcataattcgtattcttggacggacgtatccgtttatccacaattaggtattttagcagacgtaagtcgatattatccgaatacagatcgaaatcatttatattcgacttgagttcgttagaggaatttgaatagctggatatcagtagatgcacaatctgagattttacgtatctatgcttactgtatactcctagcggagttaatccttcgttgtttctacaaagtctctcgactccgcgagagaacaatcttaatgtctgtatcgcatttattggagacgtaacaatgtagcgcattgtttcctcgtctatctatatgttttgataagttgtgacacgtttcaatttctagttttatttttttgtacgtcacatcttcatccagtagacgacatagaatagtgcactctaccacaataatccatagctattctggtgctaattattcctatttcacgaaggcaatcattcctcataagatgataaaaagtgtagtggagatttagtatttagcagtgcggatatgatccaagagggtgagatagtcgttctcgttcagaatctttcgcagcataagtagtatgtcgatatacttatcgttgaagactctttataaaagtctatttgtttatatttattgcggatagcagtatttccctataaaaagtatacgtcctgtggtgtctttaatcatgtacatgaatggatggtttatgtagaccttcgtacgatataccatcgaaaagttaatcgtaaatactcctgtaacggccgatgcttctgtatactcctcattaacatctataaacgtcgtatgtagaaatttttctacagtgatagtttcattacacatcttgctaaaatctgcataatatccgaatatattagtaagtcctaaattttctaaaatcggtaccagattatacggttctgtcatttccactttaaactttggcatatacaagtctatacttttagtagataacataccacaccattttttaaatttttcatctgttatatttttttctatgttatatataccttctatgtcgtccggtagtataattaccatactagagtttccctcgtatggaatatcgataatagagaatcctccgaataattcattaatatgtacatattgcaagttattctcggtacccaccatcatatcaacgctggtaactatattcttagaaatataaaacttgtctgtatatgtaagatgtttagaaaatggatatttccacattgctttaaaatggacggcgctaacaactgtcatacgagtattaatggatagcggactagtcaataaggaattaattttaccatttgtcattgtcttaacccattcgttgattagttcctttgtttggttagcattattaaagtttacagtttgaaaatcgtcttttattttttgtaggaaggaggcgtggaactcgatactatcgctaccgtatattttatttgcggtagctagtgtcgcacaatacggaatatctacctccatgtcatcattattgtcatcgggtgtattctcattcatattctctatatattttgatagttgttcagctgtagaaccagctgctccatgatttagaatagataaagtagataaaatggaaactggagaaatcaaaacattttcatcagggtgttttaagattagttctttaaagatatccatggtatagacctaacgataacgatatatatcataaataaataatgttaaatttcaatttatgtttgtaccccgtattcatacttaacaaattggtattgcgtacacaatcaatcatattacataccattaataatgcaagcataaaaaattgttagtagatgtttctaaatataggttccgtaagcaaagaatataagaatgaagcggtaatgataaaatcaatcgttatctaaaatgatcatactcatttattttattctattatattaacacatacatttttaacagcaacacattcaatattgtattgttatttttatattatttacacaattaacaatatattattagtttatattactgaattaataatataaaattcccaatcttgtcataaacacacactgagaaacagcataaacacagaatccatcaaaaatgttgataaattatctgatgttgttgttcgctgctatgataatcagatcattcgccgatagtggtaacgctatcgaaacgacattgccagaaattacaaacgctacaacagatattccagctatcagattatgcggtccagagggagatggatattgtttacacggtgactgtatccacgctagagatattgacggtatgtattgtagatgctctcatggttatacaggcattagatgtcagcatgtagtattagtagactatcaacgttcagaaaacccaaacactacaacgtcatatatcccatctcccggtattatgcttgtattagtaggcattattatgtgttgtctattatctgtttataggttcactcgacgaactaaactacctatacaagatatggttgtgccataatttttataaatttttttatgagtatttttacaaaaatgtataaagtgtatgtcttatgtatatttataaaaatgctaagtatgcgatgtatctatgttatttgtatttatctaaacaatacctctacctctagatattatacaaaaattttttatttcggcatattaaagtaaaatctagttaccttgaaaatgaatacagtgggtggttccgtatcaccagtaagaacataatagtcaaatacagtatccgattgagattttgcatacaatactagtctagaaagaaatttgtaatcatcttctgtgacgggagtccatatatctgtatcatcgtctagtttatcagtgtcccatgctatattcctgttatcatcattagttaatgaaaataactctcgtgcttcagaaaagtcaaatattgtatccatacatacatctccaaaactatcgcttatacgtttatctttaacgatacctatacctagatggttatttactaacagacattttccagatctattgactataactcctatagtttccacatcaaccaagtaatgatcatctattgttatataacaataacataactcttttccatttttatcagtatgtatatctatatcaacgtcgtcgttgtagtgaatagtagtcattgatctattatatgaaacggatatgtctagaacggcaattgttttacgtccagttaacactttcgttgatttaaagtctagagtctttgcaaacataatatccttatccgactttatatttcctgtagggtggtataattttattttgcctccacatatcggtgtttccaaatatattactagacaatattccatatagttattagttaagggtacccaattagaacacgtacgcttattatcatcatttggatcgtatttcataaaagttattgtgttatcgatgtcaacacattctacattttttaatcgtctatatagtatttttctgatattttctataatatcagaattgtcttccatcggaagttgtatactatcggaatcagttacatgtttaaataattctctgatgtcattccttatacaatcaaattcattattaaacagtttaatagtctgtagacctttatcgtcgtaaatatccattgtcttattagttacgcttatttttatgtgtttttacgttgctttattatattttataagaatgattgtttgacgaatcacgagaactattaagacacattattaggtatatattataaaaaagtttttgattacgatgttataagaggaaagaggacacattaacatcatacatcaattaactacattcttataacatcgtaatcaaaagaattgcaattttgatgtataacaactgtcaatgggttatggaattgtatattacatattatacggtatgttggtaacgacaaataccggtcggtaattgtctgccggtgtaatagaattatatatatctatctattacaccggccttgtatacataataataagttgtggtagtatgatctccatatttataatttaggactttgtattcagtatttttggaatcataaaaaataaaaaaaagttttactaatttaaaatttaaaaagtatttacatttttttcactgtttagtcgcggatatggaattcgatcctgccaaaatcaatacatcatctatagatcatgtaacaatattacaatacatagatgaaccaaatgatataagactaacagtatgcattatccgaaatattatatcaatatcacaaaaataaatacacatttggctaatcaatttcgggcttggaaaaaacgtatcgccggaagggactatatgactaacttatctagagatacaggaatacaacaatcaaaacttactgaaactatacgtaactgtcaaaaaaatagaaacatatatggtctatatatacactacaatttagttattaattggataaccgatgtgattatcaatcaatattaagagggttggtaaattggtacatagctaataatacctatacacccaataatacaacaaccatttctgagttggatatcatcaaaatactaaataaatacgaggacgtgtatagagtaagtaaagaaaaagaatgtggaatttgctatgaagttgtttactcaaaacgatagatactttggtttattggattcgtgtactcatatattttgcataacatgcatcaatatatggcatagaacacgaagagaaaccggtgcgtcggataattgtcctatatgccgtacccgttttagaaacataacaatgagcaagttctataagctagttaactaataaataaaaagtttaatttgttgacgacgtatgtcgttattttttctcgtataaaagattaatttgattctaatataatctttagtattggataaatatcaattcaaattaattccattagattatatcataaataaaaatagtagcacacaactacttcagccaaatattcttttttgaaacgccatctatcgtagtgaggacacaagtgaacctataattatcaaatttattagtatcggttacatgaaggactttacgtagagtgacgattccactatctgtggtacgaacggtttcatcttctttgatgccatcacccagatgttctataaacttggtatcctcgtccgatctcatatcctttgccaaccaatacatgtagctaaaattaggcataaatttcacacatcctgaacaatgaaattctccagaagatgttacaatgtctagatttggacatttggtttcaaccgcgttaacatatgagtgaacacacccatacatgaaagcgatgagaaataggattctcatcttgccaaaatatcactagaaaaaatttatttatcagttttaaaggtataaaaaatacttattgttgctcgaatattttgtatttgatggtatacggaagattagaaatgtaggtattatcatcaactgattctatggttttatgtattctatcatgtttcactattgcgttggaaataatatcatatgcttccacatatattttattttgttttaactcataatactcacgtaattctggattattggcatatctatgaataattttagctccatgatcagtaaatattaatgagaacatagtattaccacctaccattatttttttcatctcattcaattcttaattgcaaagatctatataatcattatagcgttgacttatggactctggaatcttagacgatgtacagtcatctataatcatggcatatttaatacattgttttatagcatagtcgttatctacgatgttagatatttctctcaatgaatcaatcacacaatctaatgtaggtttatgacataatagcattttcagcagttcaatgtttttagattcgttgatggcaatggctatacatgtatatccgttatttgatctaatgttgacatctgaaccggattctagcagtaaagatactagagattgtttattatatctaacagccttgtgaagaagtgtttctcctcgtttgtcaatcatgttaatgtctttaagataaggtaggcaaatgtttatagtactaagaattgggcaagcataagacatgtcacaaagacccttttttgtatgtataagtgtaaaaattataacatccatagttggatttacataggtgtccaatcgggatctctccatcatcgagataattgatggcatctcccttccttttttagtagatatttcatcgtgtaagaatcaatattaatatttctaaagtatccgtgtatagcctctttatttaccacagctccatattccactagagggatatcgccgaatgtcatatactcaattagtatatgttggaggacatccgagttcattgttttcaatatcaaagagatggtttccttatcatttctccatagtggtacaatactacacattattccgtgcggctttccattttccaaaaacaatttgaccaaatctaaatctacatctttattgtatctataatcactatttagataatcagccataattcctcgagtgcaacatgttagatcgtctatatatgaataagcagtgttatctattcctttcattaacaatttaacgatgtctatatctatatgagatgacttaatataatattgaagagctgtacaatagtttttatctataaaagacggcttgattccgtgattaattagacatttaacaacttccggacgcacatatgctctcgtatccgactctgaatacagatgagagatgatatacagatgcaatacggtaccgcaatttcgtagttgataatcatcatacgcgtatcagtactcgtcctcataaagaacactgcagccattttctatgaacaaatcaataattttagaaacaggatcattgtcattacataattttctataactgaacgatggttttcacatttaacactcaagtcaaatccatgttctaccaacacctttatcaagtcaacgtctacatttttggatttcatatagctgaatatattaaagttatttatgttgctaaatccagtggcttctagtagagccatcgctatatccttattaactttaacatgtctactatttgtgtattcttctaatggggtaagctgtctccaatttttgcgtaatggattagtgccactgtctagtagtagtttgacgacctcgacattattacaatgctcattaaaaaggtatgcgtgtaaagcattattcttgaattggttcctggtatcattaggatctctgtctttcaacatctgtttaagttcatcaagagccacctcctcattttccaaatagtcaaacattttgactgaatgagctactgtgaactctatacacccacacaactaatgtcattaaatatcatgtcaaaaacttgtacaattattaataaaaataatttagtgtttaaattttaccagttccagattttacacctccgttaatacctccattaaccccactggacgatcctcctccccacattccaccgccaccagatgtataagttttagatcctttattactaccatcatgtccatggataaagacactccacatgccgccactaccccctttagaagacatattaataagacttaaggacaagtttaacaataaaattaatcacgagtaccctactaccaacctacactattatatgattatagtttctatttttacagtaccttgactaaagtttctagtcacaagagcaatactaccaacctacactattatatgattatagtttctatttttataggaacgcgtacgagaaaatcaaatgtctaatttctaacggtagtgttgataaacgattgttatccgcggatacctcctctatcatgtcgtctattttcttactttgttctattaacttattagcattatatattatttgattataaaacttatattgcttattagcccaatctgtaaatatcggattattaacatatcgtttctttgtaggtttatttaacatgtacatcactgtaagcatgtccttaccatttattttaatttgacgcatatccgcaatttctttttcgcagtcggttataaattctatatatgatggatacatgctacatgtgtacttataatcgactaatatgaagtacttgatacatattttcagtaacgatttattattaccacctatgaataagtacctgtgatcgtctaggtaatcaactgttttcttaatacattcgatggttggtaatttactcagaataatttccaatatcttaatatataattctgctatttctgggatatatttatctgccagtataacacaaatagtaatacatgtaaacccatattttgttattatattaatgtctgcgccattatctattaaccattctactaggctgacactatgcgactcaatacaatgataaagtatactacatccatgtttatctattttgtttatatcatcaatatacggcttacaaagttttagtatcgataacacatccaactcacgcatagagaaggtagggaataatggcataatatttattaggttatcatcattgtcattatctacaactaagtttccattttttaaaatatactcgacaactttaggatctctattgccaaatttttgaaaatatttatttatatgcttaaatctatataatgtagctccttcatcaatcatacatttaataacattgatgtatactgtatgataagatacatattctaacaatagatcttgtatagaatctgtatatcttttaagaattgtggatattaggatattattacataaactattacacaattctaaaatataaaacgtatcacggtcgaataatagttgatcaactatataattatcgattttgtgatttttcttcctaaactgtttacgtaaatagttagatagaatattcattagttcatgaccactatagttactatcgaataacgcgtcaaatatttcccgtttaatatcgcatttgtcaagataataatagagtgtggtatgttcacgataagtataataacgcatctctttttcgtgtgaaattaaatagtttattacgtccaaagatgtagcataaccatcttgtgacctagtaataatataataatagagaactgttttacccattctatcatcataatcagtggtgtagtcgtaatcgtaatcgtctaattcatcatcccaattataatattcaccagcacgtctaatctgttctattttgatcttgtatccatactgtatgttgctacatgtaggtattcctttatccaataatagtttaaacacatctacattgggatttgatgttgtagcgtatttttctacaatattaataccatttttgatactatttatttctatacctttcgaaattagtaatttcaataagtctatattgatgttatcagaacatagatattcgaatatatcaaaatcattgatatttttatagtcgactgacgacaataacaaaatcacaacatcgtttttgatattattatttttcttggtaacgtatgcctttaatggagtttcaccatcatactcatataatggatttgcaccactttctatcaatgattgtgcactgctggcatcgatgttaaatgttttacaactatcatagagtatcttatcgttaaccatgattggttgttgatgctatcgcattttttggtttctttcatttcagttatgtatggatttagcacgtttgggaagcatgagctcatatgatttcagtactgtagtgtcagtactattagtttcaataagatcaatctctagatctatagaatcaaaacacgataggtcagaagataatgaatatctgtaggcttcttgttgtactgtaacttctggttttgttagatggttgcatcgtgctttaacgtcaatggtacaaattttatcctcgctttgtgtatcatattcgtccctactataaaattgtatattcagattatcatgcgatgtgtatacgctaacggtatcaataaacggagcacaccatttagtcataaccgtaatccaaaaatttttaaagtatatcttaacgaaagaagttgtgtcattgtctacggtgtatggtactagatcctcataagtgtatatatctagagtaatgtttaatttattaaatggttgataatatggatcctcgtgacaatttccgaagatggaaataagacataaacacgcaataaatctaattgcggacatggttactccttaaaaaaatacgaataatcaccttggctatttagtaagtgtcatttaacactatactcatattaatccatggactcataatctctatacgggattaacggatgttctatatacggggatgagtagttctcttctttaactttatactttttactaatcatatttagactgatgtatgggtaatagtgtttgaagagctcgttctcatcatcagaataaatcaatatctctgtttttttgttatacagatgtattacagcctcatatattacgtaatagaacgtgtcatctaccttattaactttcaccgcatagttgtttgcaaatacggttaatcctttgacctcgtcgatttccgaccaatctgggcgtataatgaatctaaactttaattgcttgtaatcattcgaaataatttttagtttgcatccgtagttatcccctttatgtaactgtaaatttctcaacgcgatatctccattaataatgatgtcgaattcgtgctgtatacccatactgaatggatgaacgaataccgacggcgttaatagtaatttactttttcatctttacatattgggtactagttttactatcataagtttataaattccacaagctactatggaataagccaaccatcttagtataccacacatgtcttaaagtttattaattaattacatgttgttttatatatatcgctacgaatttaaagagaaattagtttaggaagaaaaattatctatctacatcatcacgtctctgtattctacgatagagtgctactttaagatgcgacagatccgtgtcatcaaatatatactccattaaaatgattattccggcagcgaacttgatattggatatatcacaacctttgttaatatctacgacaatagacagcagtcccatggttccataaacagtgagtttatctttctttgaagagatattttgtagagatcttataaaactgtcgaatgacatcgcatttatatctttagctaaatcgtatatgttaccatcgtaatatctaaccgcgtctatcttaaacgtttccatcgctttaaagacgtttccgatagatggtctcatttcatcagtcatactgagccaacaaatataatcgtgtataacatctttgatagaatcagactctaaagaaaacgaatcggctttattatacgcattcatgataaacttaatgaaaaatgtttttcgttgtttaagttggatgaatagtatgtcttaataattgttattatttcattaattaatatttagtaacgagtacactctataaaaacgagaatgacataactaatcataactagttatcaaagtgtctaggacgcgtaattttcatatggtatagatcctgtaagcattgtctgtattctggagctattttctctatcgcattagtgagttcagaatatgttataaatttaaatcgaataacgaacataactttagtaaagtcgtctatattaactcttttattttctagccatcgtaataccatgtttaagatagtatattctctagttactacgatctcatcgttgtctagaatatcacatactgaatctacatccaattttagaaattggtctgtgttacatatctcttctatattattgttgatgtattgtcgtagaaaactattacgtagaccattttctttataaaacgaatatatagtactccaattatctttaccgatatatttgcacacataatccattctctcaatcactacatctttaagattttcgttgttaagatatttggctaaactatataattctattagatcatcaacagaatcagtatatatttttctagatccaaagacgaactctttggcgtcctctataatattcccagaaaagatattttcgtgttttagtttatcgagatctgatctgttcatatacgccatgattgtacggtacgttatgataaccgcataaaataaaaatccattttcatttttaaccaatactattcataattgagattgatgtaatactttgttactttgaacgtaaagacagtacacggatccgtatctccaacaagcacgtagtaatcaaatttggtgttgttaaacttcgcaatattcatcaatttagatagaaacttatactcatcatctgttttaggaatccatgtattattaccactttccaacttatcattatcccaggctatgtttcgtccatcatcgttgcgcagagtgaataattcttttgtattcggtagttcaaatatatgatccatgcatagatcggcaaagctattgtagatgtgatttttcctaaatctaatataaaactcgtttactagcaaacactttcctgatttatcgaccaagacacatatggtttctaaatctatcaagtggtggggatccatagttatgacgcagtaacatatattattacattcttgactgtcgctaatatctaaatatttattgttatcgtattggattctgcatatagatggcttgtatgtcaaagatatagaacacataaccaatttatagtcgcgctttacattctcgaatctaaagttaagagatttagaaaacattatatcctcggatgatgttatcactgtttctggagtaggatatattaaagtctttacagatttcgtccgattcaaataaatcactaaataatatcccacattatcatctgttagagtagtatcattaaatctattatattttatgaaagatatatcactgctcacctctatatttcgtacatttttaaactgtttgtataatatctctctgatacaatcagatatatctattgtgtcggtagacgataccgttacatttgaattaatggtgttccattttacaacgtttaacaagttgaccaattcatttttaatagtatcaaactctccatgattaaatattttaatagtatccattttatatcactacggacacaaagtagctgacataaaccattgtataatttttatgttttatgtttattagcgtacacattttggaagttccggcttccatgtatttcctggagagcaagtagatgatgaggaaccagataggttatatccgtacttgcacttaaagtttacattgtcgttgtatgagtatgatcttttaaacccgctagacaagtatccgtttgatattgtaggatgtggacatttaacaatctgacacgtgggtggatcggaccattctcctcctgaacacaggacactagagttaccaatcaacgaatatccactattgcaactataagttacaacgctcccatcggtataaaaatcctcgtatccgttatgtcttccgttggatatagatggaggggattggcatttaacagattcacaaataggtgcctcgggattccataccatagatccagtagatcctaattcacaatacgatttagattcaccgatcaactgatatccgctattacaagagtacgttatactagagccaaagtctactccaccaatatcaagttggccattatcgatatctcgaggcgatgggcatctccgtttaatacattgattaaagagtgtccatccagtacctgtacatttagcatatataggtcccattttttgctttctgtatccaggtagacatagatattctatagtgtctcctatgttgtaattagcattagcatcagtctccacactattcttaaatttcatattaatgggtcgtgacggaatagtacagcatgatagaacgcatcctattcccaacaatgtcaggaacgtcacgctctccaccttcatatttatttatccgtaaaaatgttatcctggacatcgtacaaataataaaaagcccatatatgttcgctattgtagaaattgtttttcacagttgctcaaaaacgatggcagtgacttatgagttacgttacactttggagtctcatctttagtaaacatatcataatattcgatattacgagttgacatatcgaacaaattccaagtatttgattttggataatattcgtattttgcatctgctataattaagatataatcaccgcaagaacacacgaacatctttcctacatggttaaagtacatgtacaattctatccatttgtcttccttaactatatatttgtatagataattacgagtctcgtgagtaattccagtaattacatagatgtcgccgtcgtactctacagcataaactatactatgatgtctaggcatgggagacttttttatccaacgatttttagtgaaacattccacatcgtttaatactacatatttctcatacgtggtataaactccacccattacatatatatcatcgtttacgaataccgacgcgcctgaatatctaggagtaattaagtttggaagtcttatccatttcgaagtgccgtgtttcaaatattctgccacacccgttgaaatagaaaattctaatcctcctattacatataactttccatcgttaacacaagtactaacttctgattttaacgacgacatattagtaaccgttttccattttttcgttttaagatctacccgcgatacggaataaacatgtctattgttaatcatgccgccaataatgtatagacaattatgtaaaacatttgcattatagaattgtctatctgtattaccgactatcgtccaatattctgttctaggagagtaatgggttattgtggatatataatcagagtttttaatgactactatattatgttttataccatttcgtgtcactggctttgtagatttggatatagttaatcccaacaatgatatagcattgcgcatagtattagtcataaacttgggatgtaaaatgttgatgatatctacatcgtttggatttttatgtatccactttaataatatcatagctgtaacatcctcatgatttacgttaacgtcttcgtgggataagatagttgtcagttcatcctttgataattttccaaattctggatcggatgtcaccgcagtaatattgttgattatttctgacatcgacgcattatatagttttttaattccatatcttttagaaaagttaaacatccttatacaatttgtgaaattaatattatgaatcatagtttttacacatagatctactacaggcggaacatcaattattatggcagcaactagtatcatttctacattgtttatggtgatgtttatcttcttccagcgcatatagtctaatagcgattcaaacgcgtgatagtttataccattcaatataatcgcttcatcctttagatggtgatcctgaatgcgtttaaaaaaattatacggagacgccgtaataatttccttattcacttgtataatttccccattgatagaaaatattacgctttccattcttaaagtactataagtaattatagtataatgtaaacgtttatatattcaatatttttataaaaatcattttgacattaattcctttttaaatttccgtctatcatctatagaaacgtattctatgaatttataaaatgcttttacgtgtcctatcgtaggcgatagaaccgctaaaaagcctatcgaatttctacaaaagaatctgttatatggtatagggagagtataaaacattaaatgtccgtacttattaaagtattcagtagccaatcctaactctttcgaatacttattaatggctcttgttctgtacgaatctatttttttgaacaacggacctagtggtatatcttgttctatgtatctaaaataatgtctgactagatccgttagtttaatatccgcagtcatcttgtctagaatggcaaatctaactgcgggtttaggctttagtttagtttctatatctacatctatgtctttatctaacaccaaaaatataatagctaatattttattacaatcatccggatattcttctacgatctcactaactaatgtttctttggttatactagtatagtcactatcggacaaataaagaaaatcagatgatcgatgaataatacatttaaattcatcatctgtaagatttttgagatgtctcattagaatattattagggttagtactcattatcattcggcagctattacttattttattatttttcaccatatagatcaatcattagatcatcaaaatatgtttcaatcatcctaaagagtatggtaaatgactcttcccatctaatttctgaacgttcaccaatgtctctagccactttggcactaatagcgatcattcgcttagcgtcttctatattattaactggttgattcaatctatctagcaatggaccgtcggacagcgtcattctcatgttcttaatcaatgtacatacatcgccgtcatctaccaattcatccaacaacataagctttttaaaatcatcattataataggtttgatcgttgtcatttctccaaagaatatatctaataagtagagtcctcatgcttagttaacaactattttttatgttaaatcaattagtacaccgctatgtttaatacttattcatattttagtttttaggattgagaatcaatacaaaaattaatgcatcattaattttagaaatacttagtttccacgtagtcaatgaaacatttgaactcatcgtacaggacgttctcgtacaggacgtaactataaaccggtttatatttgttcaagatagatacaaatccgataactttttttacgaattctacgggatccactttaaaagtgtcataccgggttctttttatttttttaaacagatcaatggtgtgatgttgattaggtcttttacgaatttgatatagaatagcgtttacatatcctccataatggtcaatcgccatttgttcgtatgtcataaattctttaattatatgacactgtgtattatttagttcatccttgttcattgttaggaatctatccaaaatggcaattatactagaactataggtgcgttgtatacacatattgatgtgtctgtttatacaatcaatgctactaccttcgggtaaaattgtagcatcatataccatttctagtactttaggttcattattatccattgcagaggacgtcatgatcgaatcataaaaaaatatattatttttatgttattttgttaaaaataatcatcgaatacttcgtaagatactccttcatgaacataatcagttacaaaacgtttatatgaagtaaagtatctacgatttttacaaaagtccggatgcataagtacaaagtacgcgataaacggaataataatagatttatctagtctatctttttctatagctttcatagttagatacatggtctcagaagtaggattatgtaacatcagcttcgataaaatgactgggttatttagtcttacacattcgctcatacatgtatgaccgttaactacagagtctacactaaaatgattgaacaatagatagtctaccattgtttcgtattcagatagtacagcgtagtacatggcatcttcacaaattatatcattgtctaatagatatttgacgcatcttatggatcccacttcaacagccatcttaaaatcggtagaatcatattgctttcctttatcattaataatttctagaacatcatctctatcataaaagatacaaatattaactgtttgatccgtaataacattgctagtcgatagcaatttgttaataagatgcgctgggctcaatgtcttaataagaagtgtaagaggactatctccgaatttgttttgtttattaacatccgttgatggaagtaaaagatctataatgtctacattcttgactgttttagagcatacaatatggagaggtgtatttccatcatgatctggttttgagggactaattcctagtttcatcatccatgagattgtagaagcttttggattgtctgacataagatgtctatgaatatgatttttgccaaatttatccactatcctggcttcgaatccgatggacattatttttttaaacactctttctgaaggatctgtacacgccaacaacggaccacatccttcttcatcaaccgagttgttaatcttggctccatactgtaccaataaatttattctctctatgacttcatcatctgttcccgagagataatatagaggcgttttatgctgtttatcacacgcgtttggatctgcgccgtgcgtcagcagcatcgcgactattctattattattaattttagaagctatatgcaatggataatttccatcatcatccgtctcatttggagagtatcctctatgaagaagttcttcgacaaatcgttcatctagtcctttaattccacaatacgcatgtagaatgtgataattatttccagaaggttcgatagcttgtagcatattcctaaatacatctaaatttttactattatatttggcataaagagatagataatactcggccgacataatgttgtccattgtagtataaaaattaatatttctatttctgtatatttgcaacaatttactctctataacaaatatcataacttagttcttttatgtcaagaaggcactggtttagttcatctataaatgtcacgccataactaccacgcatgccatactcagaattatgataaagatatttatccttggggtgtaggtaatggggattaatctttgttggatcagtctctaagttaacacatgtcacacatgatccatttatagttatatcacacgatgatgatttatgaattgattccggaagatcgctatcgtattttgtggttccacaattcatttccatacatgttattgtcacactaatattatgatgaactttatctagccgctgagtggtaaacaacagaacagatagtttattatctttaccaacaccctcagccgctgccacaaatctctgatccgtatccatgatggtcatgtttatttctagtccgtatccagtcaacactatgttagcatttctgtcgatatagctttcactcatatgacactcaccaataatagtagaattaatgtcgtaatttacaccaatagtgagttcggcggcaaagtaccaataccggtaatcttgtcgaggaggacatatagtattcttgtattctaccgaatacccgagagatgcgatacaaaagagcaagactaatttgtaaaccatcttactcaaaatatgtaacaatagtacgatgcaatgagtaagacaataggaaatctatcttatatacacataattattctatcaattttaccaattagttagtgtaatgttaacaaaaatgtgggagaatctaattagtttttctttacacaattgacgtacatgagtctgagttccttgtttttgctaattatttcatccaatttattattcttgacgatatcgagatcttttgtataggagtcaaacttgtattcaacatgcttttctataatcattttagctatttcggcatcatccaatagtacattttccagattagcagaatagatattaatgtcgtatttgaacagagcctgtaacatctcaatgtctttattatctatagccaatttaatgtccggaatgaagagaagggaattattggtgtttgtcgacgtcatatagtcgagcaagagaatcatcatatccacgtgtccattttttatagtgatgtgaatacaactaaggagaatagccagatcaaaagtagatggtatctctgaaagaaagtaggaaacaatacttacatcattaagcatgacggcatgataaaatgaagttttccatccagttttcccatagaacatcagtctccaatttttcttaacaaacagttttaccgtttgcatgttaccactatcaaccgcataatacaatgcggtgtttcccttgtcatcaaattgtgaatcatccagtccactgaatagcaaaatctttactattttggtatcttccaatgtggctgcctgatgtaatggaaattcattctctagaagatttttcaatgctccagcgttcaacaacgtacatactagacgcacgttattatcagctattgcataatacaaggcactatgtccatggacatccgccttaaatgtatctttactagagagaaagcttttcagctgcttagacttccaagtattaattcgtgacagatccatgtctgaaacgagacgctaattagtgtatattttttcattttttataattttgtcatattgcaccagaattaataatatctctaatagatctgattagtagatacatggctatcgcaaaacaacatatacacatttaataaaaataatatttattaagaaaattcagatttcacgtacccatcaatataaataaaataatgattccttacaccgtacccatattaaggagattccaccttacccataaacaatataaatccagtaatatcatgtctgatgatgaacacaaatggtgtattaaattccagtttttcaggagatgatctcgccgtagctaccataatagtagatgcctctgctacagttccttgttcgtcgacatctatctttgcattctgaaacattttataaatatataatgggtccctagtcatatgtttaaacgacgcattatctggattaaacatactaggagccatcatttcggctatcgacttaatatccctcttattttcgatagaaaatttagggagtttaagattgtacactttattccctaattgagacgaccaatagtctaattttgcagccgtgatagaatctgtgaaatgggtcatattatcacctattgccaggtacatactaatattagcatccttatacggaaggcgtaccatgtcatattctttgtcatcgattgtgattgtatttccttgcaatttagtaactacgttcatcatgggaaccgttttcgtaccgtacttattagtaaaactagcattgcgtgttttagtgatatcaaacggatattgccatatacctttaaaatatatagtattaatgattgcccatagagtattattgtcgagcatattagaatctactacattagacataccggatctacgttctactatagaattaattttattaaccgcatctcgtctaaagtttaatctatataggccgaatctatgatattgttgataatacgacggtttaatacacacagtattatctacgaaactttgataagttagatcagtgtacgtatatttagatgttttcagcttagctaatcctgatattaattctgtaaatgctggacccagatctctttttctcaaatccatagtcttcaataattctattctagtattacctgatgcaggcaatagcgacataaacatagaaaacgaatagccaaacggcgagaagacaatattatcatcttgaatatttttatacgctactataccggcattggtaaatccttgtagacgataggcggacgctgaacacgctaacgatagtatcaataacgcaatcatgattttatggtattaataattaaccttatttttatgttcggtataaaaattattgatgtctacacatccttttgtaattgacatctatatatccttttgtataatcaactctaatcactttaacttttacagttttccctaccagtttatccctatattcaacatatctatccatatgcatcttaacactctctgccaagatagcttcagagtgaggatagtcaaaaagataaatatatagagcataatcattctcgtatactctgccctttattacatcacccgcattgggcaacgaataacaaaatgcaagcatcttgttaacgggctcgtaaattgggataaaaattatgtttttattgattttatatctattttattcaagagaatattcaggaatttctttttccggttgtatctcgtcgcagtatatatcatttgtacattgtttcatattttttaatagtttacaccttttagtaggactagtatcgtacaattcatagctgtattttgaattccaatcacgcataaaaatatcttccaattgttgacgaagacctaatccatcatccggtgtaatattaatagatgctccacatgtatccgtaaagtaatttcctgtccaatttgaggtacctatataggccgttttatcggttaccatatatttggcatggtttaccctagaatacggaatgggaggatcagcatctggtacaataaatagctttacttctatatttatgtttttagattttagcatagcgatagatcttaaaaagtttctcatgataaacgaagatcgttgccagcaactaatcaatagcttaacggatacttgtctgtctatagcggatcttcttaattcatcttctatataaggccaaaacaaaattttacccgccttcgaataaataatagggataaagttcataacagatacataaacgaatttactcgcatttctaatacatgacaataaagcggttaaatcattggttctttccatagtacatagttgttgcggtgcagaagcaataaatacagagtgtggaacgccgcttacgttaatactaagaggatgatctgtattataatacgacggataaaagtttttccaattatatggtagattgttaactccaagataccagtatacctcaaaaatttgagtgagatccgctgccaagttcctattattgaagatcgcaatacccaattccttgacctgagttagtgatctccaatccatgttagcgcttcctaaataaatatgtgtattatcagatatccaaaattttgtatgaagaactcctcctaggatatttgtaatatctatgtatcgtacttcaactccggccatttgtagtctttcaacatcctttaatggtttgttagatttattaacggctactctaactcgtactcctcttttgggtaattgtacaatctcgtttaatattatcgtgccgaaattcgtacccacttcatccgataaactccaataaaaagatgatatatctagtgtttttgtggtattggatagaatttccctccacatgttaaatgtagacaaatatactttatcaaattgcatacctataggaatagtttctgtaatcactgcgattgtattatccggattcattttatttgttaaaagaataatcctatatcacttcactctattaaaaatccaagtttctatttctttcatgactgattttttaacttcatccgtttccttatgaagatgatgtttggcaccttcataaatttttatttctctattacaatttgcatgttgcatgaaataatatgcacctaaaacatcgctaatcttattgtttgttccctggagtatgagagtcgggggggtgttaatcttggaaattatttttctaaccttgttggtagccttcaagacctgactagcaaatccagccttaattttttcatgattgactaatgggtcgtattggtatttataaactttatccatatctctagatactgattctggacatagctttccgactggcgcatttggtgtgatggttcccataagtttggcagctagcagattcagtcttgaaacagcatctgcattaactagaggagacattagaatcattgctgtaaacaagtttggattatcgtaagaggctagctcccatggaatgacccaataagtagatttaatagttaccacgtgctgtaccaaagtcatcaatcatcattttttcaccattacttcttccatgtccaatatgatcatgtgagaatactaaaattcctaacgatgatatgttttcagctagttcgtcataacgtccagaatgtttaccagctccatgacttatgaatactaatgccttaggatatgtaataggtttccaatatttacaatatatgtaatcattgtccagattgaacatacagtttgcactcatgattcacgttatataactatcaatattaacagttcgtttgatgatcatattatttttatgttttattgataattgtaaaaacatacaattaaatcaatatagaggaaggagacggctactgtcttttgtgagatagtcatggcgactaaattagattatgaggatgctgttttttactttgtggatgatgataaaatatgtagtcgcgactccatcatcgatctaatagatgaatatattacgtggagaaatcatgttatagtgtttaacaaagatattaccagttgtggaagactgtacaaggaattgatgaagttcgatgatgtcgctatacggtactatggtattgataaaattaatgagattgtcgaagctatgagcgaaggagaccactacatcaattttacaaaagtccatgatcaggaaagtttattcgctaccataggaatatgtgctaaaatcactgaacattggggatacaaaaagatttcagaatctagattccaatcattgggaaacattacagatttgatgaccgacgataatataaacatcttgatactttttctagaaaaaaaattgaattgatgatataggggtcttcataacgcataattattacgttagcattctatatccgtgttaaaaaaaattatcctatcatgtatttgagagttttatatgtagcaaacatgatagctgtgatgccaataagctttagatattcacgcgtgctagtgttagggatggtattatctggtggtgaaatgtccgttatataatctacaaaacaatcatcgcatatagtatgcgatagtagagtaaacatttttatagtttttactggattcatacatcgtctacccaattcggttataaatgaaattgtcgccaatcttacacccaaccccttgttatccattagcatagtattaacttcgttatttatgtcataaactgtaaatgattttgtagatgccatatcatacatgatattcatgtccctattataatcattactaactttatcacaatatatgttgataatatctatatatgatctagtctttgtgggcaactgtctatacaagtcgtctaaacgttgtttactcatatagtatcgaacagccatcattacatggtcccgttccgttgatagataatcgagtatgttagtggacttgtcaaatctatataccatattttctggaagtggatatacatagtcgtgatcaacattattgctagcctcatcttctatatcctgtactataccattatctatatcatctacataatctatgatattattacacataaacatcgacaacatactattgtttattatctaagtcctgttgatccaaacccttgatctcctctatttgtactatctagagattgtacttcttccagttctggataatatatacgttgatagattagctgagctattctatctccagtatttacattaaacgtacattttccattattaataagaatgactcctatgtttcccctataatcttcgtctattacaccacctcctatatcaatgccttttagtgacagaccagacctaggagctattctaccatagcagaacttaggcatggacatactaatatctgtcttaattaactgtctttctcctggagggatagtataatcgtaagcgctatacaaatcatatccggcagcacccggcgattgcctagtaggagatttagctctgttagtttccttaacaaatctaactggtgagttaatattcatgttgaacataaaactaatattttatttcaaaattatttaccatcccatatattccatgaataagtgtgatgattgtacacttctatagtatctatatacgatccacgataaaatcctcctatcaatagcagtttattatccactatgatcaattctggattatccctcggataaataggatcatctatcagagtccatgtattgctggattcacaataaaattccgcatttctaccaaccaagaataaccttctaccgaacactaacgcgcatgatttataatgaggataataagtggatggtccaaactgccactgatcatgattgggtagcaaatattctgtagttgtatcagtttcagaatgtcctcccattacgtatataacattgtttatggatgccactgctggattacatctaggtttcagaagactcggcatattaacccaagcagcatccccgtggaaccaacgctcaacagatgtgggatttggtagacctcctactacgtataatttattgttagcgggtatcccgctagcatacagtctggggctattcatcggaggaattggaatccaattgtttgatatataatttaccgctatagcattgttatgtatttcattgttcatccatccaccgatgagatatactacttctccaacatgagtacttgtacacatatggaatatatctataatttgatccatgttcataggatactctatgaatggatacttgtatgatttgcgtggttgtttatcacaatgaaatattttggtacagtctagtatccattttacattatttatacctctgggagaaagataatttgacctgattacatttttgataaggagtagcagatttcctaatttatttcttcgctttatataccacttaatgacaaaatcaactacataatcctcatctggaacatttagttcatcgctttctagaataagtttcatagatagataatcaaaattgtctatgatgtcatcttccagttccaaaaagtgtttggcaataaagtttttagtatgacataagagattggatagtccgtattctatacccatcatgtaacactcgacacaatattcctttctaaaatctcgtaagataaagtttatacaagtgtagatgataaattctacagaggttaatatagaagcacgtaataaattgacgacgttatgactatctatatatacctttccagtatacgagtaaataactatagaagttaaactgtgaatgtcaaggtctagacaaaccctcgtaactggatctttatttttcgtgtatttttgacgtaaatgtgtgcgaaagtaaggagataactttttcaatatcgtagaattgactattatattgcctcctatggcatcaataattgttttgaatttcttagtcatagacaatgctaatatattcttacagtacacagtattgacaaatatcggcatttatgtttctttaaaagtcaacatctagagaaaaatgattatctttttgagacataactcccattttttggtattcacccacacgtttttcgaaaaaattagtttttccttccaatgatatattttccatgaaatcaaacggattggtaacattataaatttttttaaatcccaattcagaaatcaatctatccgcgacgaattctatatatgttttcatcatttcacaattcattcctataagtttaactggaagagccgcagtaagaaattcttgttcaatggataccgcatctgttataatagatctaacggtttcttcactcggtggatgcaataaatgtttaaacatcaaacatgcgaaatcgcagtgcagaccctcgtctctactaattagttcgttggaaaacgtgagtccgggcattaggccacgctttttaagccaaaatatggaagcgaatgatccggaaaagaagattccttctactgcagcaaaggcaataagtctctctccataaccggcgctgtcatgtatccacttttgagcccaatcggccttcttttttacacaaggcatcgtttctatggcattaaagagatagtttttttcattactatctttaacataagtatcgatcaaaagactatacatttccgaatgaatgttttcaatggccatctgaaatccgtagaaacatctagcctcggtaatctgtacttctgtacaaaatcgttccgccaaattttcattcactattccgtcactggctgcaaaaaacgccaatacatgttttataaaatatttttcgtctggtgttagtttattccaatcattgatatctttagatatatctacttcttccactgtccaaaatgatgcctctgcctttttatacatgttccagatgtcatgatattggattgggaaaataacaaatctatttggatttggtgcaaggatgggttccataactaaattaacaataacaataaattttttttcagttatctatatgcctgtacttggattttttgtacatcgatatcgccgcaatcactacaataattacaagtattattgatagcattgttattagtactatcataattaaattatctacattcatgggtgctgaataatcgttattatcatcattatcattttgtaattgtgacatcatactagataaatcgtttgcgagattgttgtgggaagcgggcatggaggatgcattatcattattatttaacgccttccatttggattcacaaatgttacgcacattcaacattttatggaaactataattttgtgaaaacaaataacaagaaaactcgtcatcgttcaaatttttaacgatagtaaaccgattaaacgtcgagctaatttctaacgctagcgactctgttggatatgggtttccagatatatatcttttcagttcccctacgtatctataatcatctgtaggaaatggaagatatttccatttatctactgttcctaatatcatatgtggtggtgtagtagaaccattaagcgcgaaagatgttatttcgcatcgtattttaacttcgcaataatttctggttagataacgcactctaccagtcaagtcaatgatattagcctttacagatatattcatagtagtcgtaacgatgactccatcttttagatgcgatactcctttgtatgtaccagaatcttcgtacctcaaactcgatatatttaaacaagttaatgagatattaacgcgttttatgaatgatgatatataaccagaagttttatcctcggtggctagcgctataaccttatcattataataccaactagtgtgattaatatgtgacacgtcagtgtgggtacaaatatgtacattatcgtctacgtcgtattcgatacatccgcatacagccaacaaatataaaatgacaaatactctaacgacgttcgtacccatcttgatgcggtttaataaatgttttgatttcaatttattgtaaaaaaagattcggttttatactgttcgatattctcattgcttatattttcatctatcatctccacacagtcaaatccgtggttagcatacacctcatcaaccggtaaaagactatcggactcttctatcattataactctagaatatttaatttggtcattattaatcaagtcaattatcttatttttaacaaacgtgagtattttactcattttttataaaaacttttagaaatatacagactctatcgtgtgtctatatcttctttttatatccaatgtatttatgtctgatttttcttcatttatcatatataatggtccaaattctacacgtgcttcggattcatccagatcattaaggttcttataattgtaacatccttctcttccctcttctacatcttccttcttattcttattcttagcgtcacagaatctaccacagcaggatcccatgacgagcgtcatattaaactaatccattttcaattataatatatgattagtaatgaccattaaaataaaaaatattcttcataaccggcaagaaagtgaaaagttcacattgaaactatgtcagtagtatacatcatgaaatgatgatatatatatactctattttggtggaggattatatgatataattcgtggataatcatttttaagacacatttctttattcgtaaatcttttcacgttaaatgagtgtccatattttgcaatttcttcatatgatggcggtgtacgtggacgaggctgctcctgttcttgttgtggtcgccgactgtcgtgtctgcgtttagatccctccattatcgcgattgcgtagatggagtactattttataccttgtaattaaatttttttattaattaaacgtataaaaacgttccgtatctgtatttaagagccagatttcgtctaatagaacaaatagctacagtaaaaataactagaataattgctacacccactagaaaccacggatcgtaatacggcaatcggttttcgataataggtggaacgtatattttatttaaggacttaacaattgtctgtaaaccacaatttgcttccgcggatcctgtattaactatctgtaaaagcatatgttgaccgggcggagccgaacattctccgatatctaatttctgtatatctataatattattaacctccgcatacgcattacagttcttttctagcttggataccgcactaggtacatcgtctagatctattcctatttcctcagcgatagctcttctatccttttccggaagcaatgaaatcacttcaataaatgattcaaccatgagtgtgaaactaagtcgagaattactcatgcatttgttagttattcggagcgcgcaatttttaaactgtcctataacctctcctatatgaatagcacaagtgacattagtagggatagaatgttgagctaatttttgtaaataactatctataaaaagattatacaaagttttaaactctttagtttccgccatttatccagtctgagaaaatgtctctcataataaatttttccaagaaactaattgggtgaagaatggaaacctttaatctatatttatcacagtctgttttggtacacatgatgaattcttccaatgccgtactaaattcgatatctttttcgatttctggatatgtttttaataaagtatgaacaaagaaatggaaatcgtaataccagttatgtttaactttgaaattgttttttattttcttgttaatgattccagccacttgggaaaagtcaaagtcgtttaatgccgatttaatacgttcattaaaaacaaactttttatcctttagatgaattattattggttcattggaatcaaaaagtaagatattatcgggtttaagatctgcgtgtaaaaagttgtcgcaacagggtagttcgtagattttaatgtataacagagccatctgtaaaaagataaactttatgtattgtaccaaagatttaaatcctaatttgatagctaactcggtatctactttatctgccgaatacagtgctaggggaaaaattataatgtttcctctttcatattcgtagttagttctcttttcatgttcgaaaaagtgaaacatgcggttaaaatagtttataacattaatattactgttaataactgccggataaaagtgggatagtaatttcacgaatttgatactgtcctttctctcgttaaacgcctttaaaaaaactttagaagaatatctcaatgagagttcctgaccatccatagtttgtatcaataatagcaacatatgaagaacacgtttatacagagtatgtaaaaatgttaatttatagtttaatcccatggcccacgcacacacgattaattttttttcatctccctttagattgttgtatagaaatttgggtactgtgaactccgccgtagtttccatgggactatataattttgtggcctcgaatacaaattttactacatagttatctatcttaaagactataccatatcctcctgtagatatgtgataaaaatcgtcgtttataggataaaatcgtttatccttttgttggaaaaaggatgaattaatgtaatcattctcttctatctttagtagtgtttccttattaaaattcttaaaataatttaacaatctaactgacggagcccaattttggtgtaaatctaattgggacattatattgttaaaatacaaacagtctcctaatataacagtatctgataatctatggggagacatccattgatattcaggggatgaatcattggcaacacccatttattgtacaaaaagccccaatttacaaacgaaagtccaggtttgatagagacaaacaattaactattttgtctctgtttttaacacctccacagtttttaatttctttagtaatgaaattattcacaatatcagtatcttctttatctaccagagattttactaacttgataaccttggctgtctcattcaatagggtagtaatatttgtatgtgtgatattgatatctttttgaattgtttcttttagaagtgattctttgatggtgccagcatacgaattacaataatgcagaaactcggttaacatgcaggaattatagtaagccaattccaattgttgcctgtgttgtattagagtgtcaatatgagcaatggtgtccttgcgtttctctgatagaatgcgagcagcgattttggcgttatcatttgacgatatttctggaatgacgaatcctgtttctactaactttttggtaggacaaagtgaaacaatcaagaagatagcttctcctcctatttgtggaagaaattgaactcctctagatgatctactgacgatagtatctccttgacagatattggaccgaattacagaagtacctggaatgtaaagccctgaaaccccctcattttttaagcagattgttgccgtaaatcctgcactatgcccaagatagagagctcctttggtgaatccatctctatgtttcagtttaaccaagaaacagtcagctggtctaaaatttccatctctatctaatacagcatctaacttgatgtcaggaactatgaccggtttaatgttatatgtaacattgagtaaatccttaagttcataatcatcactgtcatcagttatgtacgatccaaacaatgtttctaccggcatagtggatacgaagatgctatccatcagaatgtttccctgattagtattttctatatagctattcttctttaaacgattttccaaatcagtaactatgttcatttttttaggagtaggacgcctagccagtatggaagaggattttctagatcctctcttcaacatctttgatctcgatggaatgcaaaaccccatagtgaaacaaccaacgataaaaataatattgtttttcactttttataattttaccatctgactcatggattcattaatatctttataagagctactaacgtataattctttataactgaactgagatatatacaccggatctatggtttccataattgagtaaatgaatgctcggcaataactaatggcaaatgtatagaacaacgaaattatactagagttgttaaagttaatattttctatgagctgttccaataaattatttgttgtgactgcgttcaagtcataaatcatcttgatactatccagtaaaccgtttttaagttctggaatattatcatcccattgtaaagcccctaattcgactatcgaatatcctgctctgatagcagtttcaatatcgacggacgtcaatactgtaataaaggtggtagtattgtcatcatcgtgataaactacgggaatatggtcgttagtaggtacggtaactttacacaacgcgatatataactttccttttgtaccatttttaacgtagttgggacgtcctgcagggtattgttttgaagaaatgatatcgagaacagatttgatacgatatttgttggattcctgattattcactataatataatctagacagatagatgattcgataaatagagaaggtatatcgttggtaggataatacatccccattccagtattctcggatactctattgatgacactagttaagaacatgtcttctattctagaaaacgaaaacatcctacatggactcattaaaacttctaacgctcctgattgtgtctcgaatgcctcgtacaaggatttcaaggatgccatagattctttgaccaacgatttagaattgcgtttagcatctgatttttttattaaatcgaatggtcggctctctggtttgctaccccaatgataacaatagtcttgtaaagataaaccgcaagaaaatttatacgcatccatccaaataaccctagcaccatcggatgatattaatgtattattatagattttccatccacaattattgggccagtatactgttagcaacggtatatcgaatagattactcatgtaacctactagaatgatagttcgtgtactagtcataatatctttaatccaatctaaaaaatttaaaattagattttttacactgttaaagttaacaaaagtattacccgggtacgtggatatcatatatggcattggtccattatcagtaatagctccataaactgatacggcgatggtttttatatgtgtttgatctaacgaggaagaaattcgcgcccacaattcatctctagatatgtatttaatatcaaacggtaacacatcaatttcgggacgcgtatatgtttctaaatttttaatccaaatataatgatgacctatatgccctattatcatactgtcaactatagtacacctagggaacttacgatacatctgtttcctataatcgttaaattttacaaatctataacatgctaaaccttttgacgacagccattcattaatttctgatatggaatctgtattctcgataccgtatcgttctaaagccagtgctatatctccctgttcgtgggaacgctttcgtataatatcgatcaacggataatctgaagtttttggagaataatatgactcatgatctatttcgtccataaacaatctagacataggaattggaggcgatgatcttaattttgtgcaatgagtcgtcaatcctataacttctaatcttgtaatattcatcatcgacataatactatctatgttatcatcgtatattagtataccatgaccttcttcatttcgtgccaaaatgatatacagtcttaaatagttacgcaatatctcaatagtttcataattgttagctgttttcatcaaggtttgtatcctgtttaacatgatggcgttctataacgtctctattttctatttttaattttttaaatttttaacgatttactgtggctagatacccaatctctctcaaatatttttttagcctcgcttacaagctgtttatctatactattaaaactgacgaatccgtgattttggtaatgggttccgtcgaaatttgccgaagtgatatgaacatattcgtcgtcgactatcaacaattttgtattattctgaatagtgaaaaccttcacagatagatcattttgaacacacaacgcatctagacttttggcggttgccatagaatatacgtcgttcttatcccaattaccaactagaagtctgatcttaactcctctattaatggctgcttctataatggagttgtaaatgtcgggccaatagtagctattaccgtcgacacgtgtagtgggaactatggccaaatgttcaatatctatactagtcttagctgacctgagtttatcaataactacatcggtatctagatctctagaatatcccaataggtgttccggagaatcagtaaagaacactccacctataggattcttaatatgatacgcagtgctaactggcaaacaacaagccgcagagcataaattcaaccatgaattttttgcgctattaaaggctttaaaagtatcaaatcttctacgaagatctgtggccagcgggggataatcagaatatacacctaacgttttaatcgtatgtatagatcctccagtaaatgacgcgtttcctacataacatctttcatcatctgacacccaaaaacaaccgagtagtagtcccacattattttttttatctatattaacggttataaaatttatatccgggcagtgactttgtagctctcccagatttcttttccctcgttcatctagcaaaactattattttaatccctttttcagatgcctcttttagtttatcaaaaataagcgctcccctagtcgtactcagaggattacaacaaaaagatgctatgtatatatatttcttagctagagtgataatttcgttaaaacattcaaatgttgttaaatgatcggatctaaaatccatattttctggtagtgtttctaccagcctacattttgctcccgcaggtaccgatgcaaatggccacatttagttaacataaaaacttatacatcctgttctatcaacgattctagaatatcatcggctatatcgctaaaattttcatcaaagtcgacatcacaacctaactcagtcaatatattaagaagttccatgatgtcatcttcgtctatttctatatccgtatccattgtagattgttgaccgattatcgagtttaaatcattactaatactcaatccttcagaatacaatctgtgtttcattgtaaatttataggcggtgtatttaagttggtagattttcaattatgtattaatatagcaacagtagttcttgctcctccttgattctagcatcctcttcattattttcttctacgtacataaacatgtccaatacgttagacaacacaccgacgatggcggccgctacagacacgaatatgactaaaccgatgaccatttaaaaacccctctctagctttcacttaaactgtatcgatcattcttttagcacatgtataatataaaaacattattctatttcgaatttaggcttccaaaaatttttcatccgtaaaccgataataatatatatagacttgttaatagtcggaataaatagattaatgcttaaactatcatcatctccacgattagagatacaatatttacattctttttgctgtttcgaaactttatcaatacacgttaatacaaacccaggaaggagatattgaaactgaggctgttgaaaatgaaacggtgaatacaataattcagataatgtaaaatcatgattccgtattctgatgatattagaactgctaatggatgtcgatggtatgtatctaggagtatctattttaacaaagcatcgatttgctaatatacaattatccttttgattaattgttattttattcatattcttaaaaggtttcatatttatcaattcttctacattaaaaatttccatttttaatttatgtagccccgcaatactcctcattacgtttcattttttgtctataatatccattttgttcatctcggtacatagattatccaattgagaagcgcatttagtagttttgtacattttaagtttattgacgaatcgtcgaaaactagttatagttaacattttattatttgataccctgatattaatacccctgccgttactattatttataactgatgtaatccacgtaacattggaattaactatcgatagtaatgcatcgacgcttccaaaattgtctattataaactcaccgataatttttttattgcatgttttcatattcattaggattatcaaatctttaatcttattacgattgtatgcgttgatattacaagacgtcattctaaaagacggaggatctccatcaaatgccagacaatcacgtacaaagtacatggaaataggttttgttctattgcgcatcatagatttatatagaacacccgtagaaatactaatttgttttactctataaaatactaatgcatctatttcatcgttttgtataacgtctttccaagtgtcaaattccaaatttttttcattgatagtaccaaattcttctatctctttaactacttgcatagataggtaattacagtgatgcctacatgccgttttttgaaactgaatagatgcgtctagaagcgatgctacgctagtcacaatcaccactttcatatttagaatatatatatgtaaaaatatagtagaatttcattttgtttttttctatgctataaatgaattctcattttgcatctgctcatactccgttttatattaataccaaagaaggaagatatctggttctaaaagccgttaaagtatgcgatgttagaactgtagaatgcgaaggaagtaaagcttcctgcgtactcaaagtagataaaccctcatcgcccgcgtgtgagagaagaccttcgtccccgtccagatgcgagagaatgaataaccctggaaaacaagttccgtttatgaggacggacatgctacaaaatatgttcgcggctaatcgcgataatgtagcttctagacttttgtcctaaaatactattatatccttttcgatattaataaatccgtgtcgtccaggttttttatctctttcagtatgtgaatagataggtattttatctctattcatcatcgaatttaagagatccgataaacattgtttgtattctccagatgtcagcatctgatacaacaatatatgtgcacataaacctctggcacttatttcatgtaccttccccttatcactaaggagaatagtatttgagaaatatgtatacatgatattatcatgaattagatatacagaatttgtaacactctcgaaatcacacgatgtgtcggcgttaagatctaatatatcactcgataacacattttcatctagatacactagacattttttaaagctaaaatagtctttagtagtaacagtaactatgcgattattttcatcgatgatacatttcatcggcatattattacgcttaccatcaaagactataccatgtgtatatctaacgtattctagcatggttgccatacgcgcattaaacttttcaggatctttggatagatcttccaatctatctatttgagaaaacatttttatcatgttcaatagttgaaacgtcggatccactatatagatattatctataaagattttaggaactacgttcatggtatcctggcgaatattaaaactatcaatgatatgattatcgttttcatcttttatcaccatatagtttctaagatatgggattttacttaatataatattatttcccgtgataaattttattagaaaggccaaatctataagaaaagtcctagaattagtctgaagaatatctatatcgccgtatagtatatttggattaattagatatagagaatatgatccgtaacatatacaacttttattatggcgtctaagatattcttccatcaacttattaacatttttgactagggaagatacattatgacgtcccattacttttgccttgtctattactgcgacgttcatagaatttagcatatctcttgccaattcttccattgatgttacattataagaaattttagatgaaattacatttggagctttaatagtaagaactcctaatatgtccgtgtatgtggtcactaatacagattgtagttctataatcgtaaataatttacctatattatatgtttgagtctgtttagaaaagtagctaagtatacgatcttttatttctgatgcagatgtattaacatcggaaaaaaatctttttttattcttttttactaaagatacaaatatgtctttgttaaaaacagttattttctgaatatttctagcttgtaattttaacatatgatattcgttcacactaggtactctgcctaaataggtttctataatctttaatgtaatattaggaaaagtattctgatcaggattcctattcattttgaggatttaaaactctgattattgtctaatatggtctctacgcaaactttttcacagagcgatagagtttttgataactcgtttttcttaagaaatataaaactactgtctccagagctcgctctatcttttattttatctaattcgatacaaactcctgatactggttcagaaagtaattcattaattttcagtcctttatagaagatatttaatatagataatacaaaatcttcagtttttgatatcgatctgattgatcctagaactagatatattaataacgtgctcattaggcagtttatggcagcttgataattagatatagtatattccagttcatatttattagataccgcattgcccagattttgatattctatgaattcctctgaaaataaatccaaaataactagacattctattttttgtggattagtgtactctcttccctctatcatgttcactactggtgtccacgatgataaatatctagagggaatataatatagtccataggatgccaatctagcaatgtcgaataactgtaattttattcttcgctcttcattatgaattgattcttgaggtataaacctaacacaaattatattattagacttttcgtatgtaatgtctttcatgttataagtttttaatcctggaatagaatctattttaatgaggcttttaaacgcagagttctccaacgagtcaaagcataatactctgttgtttttcttatatacgatgttacgattttcttctttgaatggaataggtttttgaattagtttataattacaacataatagataaggaagtgtgcaaatagtacgcggaaaaaacataatagctcccctgttttcatccatggttttaagtaaatgatcactggcttctttagtcaatggatattcgaacattaaccgtttcatcatcattggacagaatccatatttcttaatgtaaagagtgatcaaatcattgtgtttattgtaccatcttgttgtaaatgtgtattcggttatcggatctgctcctttttctattaaagtatcgatgtcaatctcgtctaagaattcaactatatcgacatatttcatttgtatacacataaccattactaacgtagaatgtataggaagagatgtaacgggaacagggtttgttgattcgcaaactattctaatacataattcttctgttaatacgtcttgcacgtaatctattatagatgccaagatatctatataattattttgtaagatgatgttaactatgtgatctatataagtagtgtaataattcatgtattttgatatatgttccaactctgtctttgtgatgtctagtttcgtaatatctatagcatcctcaaaaaatatattcgcatatattcccaagtcttcagttctatcttctaaaaaatcttcaacgtatggaatataataatctattttacctcttctgatatcattaatgatatagtttttgacactatcttctgtcaattgattcttattcactatatctaagaaacggatagcgtccctaggacgaactactgccattaatatctctattatagcttctggacataattcatctattataccagaattaatgggaactattccgtatctatctaacatagttttaagaaagtcagaatctaagacctgatgttcatatattggttcatacatgaaatgatctctattgatgatagtgactatttcattctctgaaaattggtaactcattctatatatgctttccttgttgatgaaggatagaatatactcaatagaatttgtaccaacaaactgttctcttatgaatcgtatatcatcatctgaaataatcatgtaaggcatacatttaacaattagagacttgtctcctgttatcaatatactattcttgtgataatttatgtgtgaggcaaatttgtccacgttctttaattttgttatagtagatatcaaatccaatggagctacagttcttggcttaaacagatatagtttttctggaacaaattctacaacattattataaaggactttgggtaaataagtgggatgaaatcctattttaattaatgcgatagccttgtcctcgtgcagatatccaaacgcttttgtgatagtatggcattcattgtctagaaacgctctacgaatatctgtgacagatatcatctttagagaatatactagtcgcgttaatagtactacaatttgtattttttaatctatctcaataaaaaaattaatatgtatgattcaatgtataactaaactactaactgttattgataactagaatcagaatctaatgatgacgtacccaagaagtttatctactgccaatttagctgcattatttttagcatctcgtttagattttccatctgccttatcgaatactcttccgtcgatatctacacaggcataaaatgtaggagagttactaggcccaactgattcaatacgaaaagaccaatctctcttagttatttggcagtactcattaataacggtgacagggttagcatctttccaatcaataatttttttagccggaataacatcatcaaaagacttatgatcctctctcattgatttttcgcgggatacatcatctattatgacgtcagccataacatcagcatccggcttatccgcctccgttgtcataaaccaacgaggaggaatatcgtcggagctgtacaccatagcactacgttgaagatcgtacagagctttattaacttctcgcttctccatattaagttgtctagttagttgtgcagcagtagctccttcgattccaatggttttaatagcctcacacacaatctctgcgttagaacgttcgtcgatatagattttagacatttttagagagaactaacacaaccagcaataaaactgaacctactttatcatttttttattcatcatcctctggtggttcgtcgttcctatcaaatgtagctctgattaacccgtcatctataggtgatgctggttctggagattctggaggagatggattattatctggaagaatctctgttatttccttgttttcatgtatcgattgcgttgtaacattaagattgcgaaatgctctaaatttgggaggcttaaagtgttgtttgcaatctctacacgcgtgtctaactagtggaggttcgtcagctgctctagtttgaatcatcatcggcgtagtattcctacttttacagttaggacacggtgtattgtatttctcgtcgagaacgttaaaataatcgttgtaactcacatcctttattttatctatattgtattctactcctttcttaatgcattttataccgaataagagatagcgaaggaattctttttcggtgccgctagtacccttaatcatatcacatagtgttttatattccaaatttgtggcaatagacggtttatttctatacgatagtttgtttctggaatcctttgagtattctataccaatattattctttgattcgaatttagtttcttcgatattagattttgtattacctatattcttgatgtagtactttgatgatttttccatggcccattctattaagtcttccaagttggcatcatccacatattgtgatagtaattctcggatatcagtagcggctaccgccattgatgtttgttcattggatgagtaactactaatgtatacattttccatttataacacttatgtattaactttgttcatttatattttttcattattatgttgatattaacaaaagtgaatatatatatatgttaataattgtattgtggttatacggctacaattttataatgagtgaaagtcagtgtccgatgatcaatgacgatagctttactctgaaaagaaagtatcaaatcgatagtgcggagtcaacaataaaaatggataagaagaggataaagtttcagaatagagccaaaatggtaaaagaaataaatcagacaataagagcagcacaaactcattacgagacattgaaactaggatacataaaatttaagagaatgattaggactactactctagaagatatagcaccatctattccaaataatcagaaaacttataaactattctcggacatttcagccatcggcaaagcatcacagaatccgagtaagatggtatatgctctgctgctttacatgtttcccaatttgtttggagatgatcatagattcattcgttatagaatgcatccaatgagtaaaatcaaacacaagatcttctctcctttcaaacttaatcttattagaatattagtggaagaaagattctataataatgaatgcagatctaataaatggaaaataattggaacacaagttgataaaatgttgatagctgaatctgataaatatacaatagatgcaaggtataacctaaaacccatgtatagaatcaagggagaatctgaagaagataccctcttcatcaaacagatggtagaacaatgtgtgacatcccaggaattggtggaaaaagtgttgaagatactgtttagagatttgttcaagagtggagaatacaaagcgtacagatacgatgatgatgtagaaaatggattcattggattggatacactaaaattaaacattgttcatgatatagttgaaccatgtatgcctgttcgtaggccagtggctaagatactgtgtaaagaaatggtaaataaatactttgagaatccgctacatattattggtaaaaatcttcaagagtgcattgactttgttagtgaataggcatttcatctttctccaatactaattcaaattgttaaattaataatggatagtataaatagttattagttataagatagtaaaaataattattagaataagagtgtagtatcatagataactctcttctataaaaatggattttattcgtagaaagtatcttatatacacagtagaaaataatatagattttttaaaggatgatacattaagtaaagtaaacaattttaccctcaatcatgtactagctctcaagtatctagttagcaattttcctcaacatgttattactaaggatgtattagctaataccaatttttttgttttcatacatatggtacgatgttgtaaagtgtacgaagcggttttacgacacgcatttgatgcacccacgttgtacgttaaagcattgactaagaattatttatcgtttagtaacgcaatacaatcgtacaaggaaaccgtgcataaactaacacaagatgaaaaatttttagaggttgccgaatacatggacgaattaggagaacttataggcgtaaattatgacttagttcttaatccattatttcacggaggggaacccatcaaagatatggaaatcatttttttaaaactgtttaagaaaacagacttcaaagttgttaaaaaattaagtgttataagattacttatttgggcatacctaagcaagaaagatacaggcatagagtttgcggataatgatagacaagatatatatactctatttcaacaaactggtagaatcgtccatagcaatctaacagaaacgtttagagattatatctttcccggagataagactagctattgggtgtggttaaacgaaagtatagctaatgatgcggatatcgttcttaatagacccgccattaccatgtatgataaaattcttagttatatatactctgagataaaacaaggacgcgttaataaaaacatgcttaagttagtttatatctttgagcctgaaaaagatatcagagaacttctgctagaaatcatatatgatattcctggagatatcctatctattattgatgcaaaaaacgacgattggaaaaaatattttattagtttttataaagctaattttattaacggtaatacatttattagtgatagaacgtttaacgaggacttattcagagttgttgttcaaatagatcccgaatatttcgataatgaacgaattatgtctttattctctacgagtgctgcggacattaaacgatttgatgagttagatattaataacagttatatatctaatataatttatgaggtgaacgatatcacattagatacaatggatgatatgaagaagtgtcaaatctttaacgaggatacgtcgtattatgttaaggaatacaatacatacctgtttttgcacgagtcggatcccatggtcatagagaacggaatactaaagaaactgtcatctataaaatccaagagtagacggctgaacttgtttagcaaaaacattttaaaatattatttagacggacaattggctcgtctaggtcttgtgttagatgattataaaggagacttgttagttaaaatgataaaccatcttaagtctgtggaggatgtatccgcattcgttcgattttctacagataaaaaccctagtattcttccatcgctaatcaaaactattttagctagttataatatttccatcatcgtcttatttcaaaggtttttgagagataatctatatcatgtagaagaattcttggataaaagcatccatctaaccaagacggataagaaatatatacttcaattgataagacacggtagatcatagaacagaccaaatatattattaataatttgtatatacatagatataattatcacacatttttgataaatgggaactgctgcaacaattcagactcccaccaaattaatgaataaagaaaatgcagaaatgattttggaaaaaattgttgatcatatagttatgtatattagtgacgaatcaagtgattcagaaaataatcctgaatatattgattttcgtaacagatacgaagactatagatctctcattataaaaagtgatcacgagtttgtaaagctatgtaaaaatcatgcggagaaaagttctccagaaacgcaacaaatgattatcaaacacatatacgaacaatatcttattccagtatctgaagtactattaaaacctataatgtccatgggtgacataattacatataacggatgtaaagacaatgaatggatgctagaacaactctctaccctaaactttaacaatctccgcacatggaactcatgtagcataggcaatgtaacgcgtctgttttatacattttttagttatctgatgaaagataaactaaatatataagtataatcccattctaatactttaacctgatgtattagcatcttattagaatattaacctaactaaaagacataacataaaaactcattacatagttgataaaaagcggtaggatataaatattatggctgccaccgttccgcgttttgacgacgtgtacaaaaatgcacaaagaagaattctagatcaagaaacattttttagtagaggtctaagtagaccgttaatgaaaaacacatatctatttgataattacgcgtatggatggataccagaaactgcaatttggagtagtagatacgcaaacttagatgcaagtgactattatcccatttcgttgggattacttaaaaagttcgagtttctcatgtctctatataaaggtcctattccagtatacgaagaaaaagtaaatactgaattcattgctaatggatctttctccggtagatacgtatcatatcttagaaagttttctgctcttccaacaaacgagtttattagttttttgttactgacttccattccaatctataatatcttgttctggtttaaaaatactcagtttgatattactaaacacacattattcagatacgtctatacagataatgccaaacacctggcgttggctaggtatatgtatcaaacaggagactataagcctttgtttagtcgtctcaaagagaattatatatttaccggtcccgttccaatatgtatcaaagatatagatcaccctaatcttagtagagcaagaagtccatccgattatgagacattagctaatattagtactatattgtactttaccaagtatgatccggtattaatgtttttattgttttacgtacctgggtattcaattactacaaaaattactccagccgtagaatatctaatggataaactgaatctaacaaagagcgacgtacaactgttgtaaattattttatgcttcgtaaaatgtaggttttgaaccaaacattctttcaaagaatgagatgcataaaactttattatccaatagattgactatttcggacgtcaatcgtttaaagtaaacttcgtaaaatattctttgatcactgccgagtttaaaacttctatcgataattgtttcatatgttttaatatttacaagttttttggtccatggtccattaggacaaatatatgcaaaataatatcgttctccaagttctatagtctctggattatttttattatattcagtaaccaaatacatattagggttatctgcggatttataatttgagtgatgcattcgactcaacataaataattctagaggagacgatctactatcaaattcggatcgtaaatctgtttctaaagaacggagaatatctatacatacctgattagaattcatccgtccttcagacaacatctcagacagtctggttttgtacatcttaatcatattcttatgaaacttggaaacatctcttctagtttcactagtacctttattaattctctcaggtacagattttgaattcgacgatgctgagtatttcatcgttgtatatttcttcttcgattgcataatcagattcttatataccgcctcaaactctattttaaaattattaaacaatactctattattaatcagtcgttctaactctttcgctatttctatagacttatctacatcttgactgtctatctctgtaaacacggagtcggtatctccatacacgctacgaaaacgaaatctgtaatctataggcaacgatgttttcacaatcggattaatatctctatcgtccatataaaatggattacttaatggattggcaaaccgtaacataccgttagataactctgctccatttagtaccgattctagatacaagatcattctacgtcctatggatgtgcaactcttagccgaagcgtatgagtatagagcactatttctaaatcccatcagaccatatactgagttggctactatcttgtacgtatattgcatggaatcatagatggccttttcagttgaactggtagcctgttttagcatctttttatatctggctctctctgccaaaaatgttcttaatagtctaggaatggttccttctatcgatctatcgaaaattgctatttcagagatgaggttcggtagtctaggttcacaatgaaccgtaatatatctaggaggtggatatttctgaagcaatagctgattatttatttcttcttccaatctattggtactaacaacgacaccgactaatgtttccggagatagatttccaaagatacacacattaggatacagactgttataatcaaagattaatacattattactaaacattttttgttttggagcaaataccttaccgccttcataaggaaacttttgttttgtttctgatctaactaagatagttttagtttccaacaatagctttaacagtggacccttgatgactgtactcgctctatattcgaataccatggattgaggaagcacatatgttgacgcacccgcgtctgtttttgtttctactccataatactcccacaaatactgacacaaacaagcatcatgaatacagtatctagccatatctaaagctatgtttagattataatccttatacatctgagctaaatcaacgtcatcctttccgaaagataatttatatgtatcattaggtaaagtaggacataatagtacgactttaaatccattttcccaaatatctttacgaattactttacatataatatcctcatcaacagtcacataattacctgtggttaaaacctttgcaaatgcagcggctttgcctttcgcgtccgtagtatcgtcaccgatgaacgtcatttctctaactcctttatttaatactttacccatgcaactgaacgcgttcttggatatagaatccaatttgtacgaatccaatttttcaaatttttgaatgaatgaatatagatcgaaaaatatagttccattattgttattaacgtgaaacgtagtattggccatgccgcctactcccttatgactagactgatttctctcataaatacagagatgtacagcttcctttttgtccggagatctaaagataatcttctctcctgttaataactctagacgattagtaatatatctcagatcaaagttatgtccgttaaaggtaacgacatagtcgaacgttagttccaacaattgtttagctattcgtaacaaaactatttcagaacataaaactagttctcgttcgtaatccatttccattagtgactgtatcctcaaacatcctctatcgacggcttcttgtatttcctgttccgttaacatctcttcattaatgagcgtaaacaataatcgtttaccacttaaatcgatataacagtaacttgtatgcgagattgggttaataaatacagaaggaaacttcttatcgaagtgacactctatatctagaaataagtacgatcttgggatatcgaatctaggtatttttttagcgaaacagttacgtggatcgtcacaatgataacatccattgttaatctttgtcaaatattgctcgtccaacgagtaacatccgtctggagatatcccgttagaaatataaaaccaactaatattgagaaattcatccatggtggcattttgtatgctgcgtttctttggctcttctatcaaccacatatctgcgacggagcattttctatctttaatatctagattataacttattgtctcgtcaatgtctatagttctcatctttcccaacggcctcgcattaaatggaggaggagacaatgactgatatatttcgtccgtcactacgtaataaaagtaatgaggaaatcgtataaatacggtctcaccatttcgacatctggatttcagatataaaaatctgttttcaccgtgactttcaaaccaattaatgcaccgaacatccatttatagaatttagaaatatattttcatttaaatgaatcccaaacattggggaagagccgtatggaccattatttttatagtactttcgcaagcgggtttagacggcaacatagaagcgtgtaaacgaaaactatatactatagttagcactcttccatgtcctgcatgtagacggcacgcgactatcgctatagaggacaataatgtcatgtctagcgatgatctgaattatatttattattttttcatcagattatttaacaatttggcatctgatcccaaatacgcgatcgatgtgacaaaggttaaccctttataaacttaacccattataaaacttatgattagtcacaactgaaataaccgcgtgattattttttggtataattctacacggcatggtttctgtgactatgaattcaacccccgttacattagtgaaatctttaacaaacagcaagggttcgtcaaagacataaaactcattgtttacaatcgaaatagaccccctatcacacttaaaataaaaaatatccttatcctttaccaccaaataaaattctgattggtcaatgtgaatgtattcacttaacagttccacaaatttatttattaactccgaggcacatacatcgtcggtattttttatggcaaactttactcttccagcatccgtttctaaaaaaatattaacgagttccatttatatcatccaatattattgaaatgacgttgatggacagatgatacaaataagaaggtacggtacctttgtccaccatctcctccaattcatgctctattttgtcattaactttaatgtatgaaaacagtacgccacatgcttccatgacagtgtgtaacactttggatacaaaatgtttgacattagtataattgttcaagactgtcaatctataatagatagtagctataatatattctatgatggtattgaagaagatgacaaccttggcatattgatcatttaacacagacatggtatcaacagatagcttgaatgaaagagaatcagtaattggaataagcgtcttctcgatagagtgtccgtataccaacatgtctgatattttgatgtattccattaaattatttagttttttctttttattctcgttaaacagcatttctgtcaacggaccccaacatcgttgaccgattaagttttgattgatttttccgtgtaaggcgtatctagtcagatcgtatagcctatccaataatccatcatctgtgcgtagatcacatcgtacactttttaattctctatagaagagcgacagacatctggagcaattacagacagcaatttctttattctctacagatgtaagatacttgaagacattcctatgatgatgcagaattttggataacacggtattgatggtatctgttaccataattcctttgatggctgatagtgtcagagcacaagatttccaatctttgacaatttttagcaccattatctttgttttgatatctatatcagacagcatggtgcgtctgacaacacagggattaagacggaaagatgaaatgattctctcaacatcttcaatagataccttgctattttttctggcattatctatatgtgcgagaatatcctctagagaatcagtatcctttttgatgatagtggatctcaatgacatgggacgtttaaaccttcttattctatcaccagattgcatggtgatttgtcttctttcttttatcataatgtaatctctaaattcatcggcaaattgtctatatctaaaatcataatatgagatgtttacctctacaaatatctgttcgtccaatgttagagtatttacatcagttttgtattccaaattaaacatggcaacggatttaattttatattcctctattaagtcctcgtcgataataacagaatgtagataatcatttaatccatcgtacatggttggaagatgcttgttgacaaaatctttaattgtcttgatgaaggtgggactatatctaacatcttgattaataaaatttataacattgtccataggatactttgtaactagttttatacacatctcttcatcggtaagtttagacagaatatcgtgaacaggtggtatattatattcatcagatatacgaagaacaatgtccaaatctatattgtttaatatattatatagatgtagcgtagctcctacaggaatatctttaactaagtcaatgatttcatcaaccgttagatctattttaaagttaatcatataggcattgatttttaaaaggtatgtagccttgactacattctcattaattaaccattccaagtcactgtgtgtaagaagattatattctatcataagcttgactacatttggtcccgataccattaaagaattcttatgatataaggaaacagcttttaggtactcatctactctacaagaattttggagagccttaacgatatcagtgacgtttattatttcaggaggaaaaaacctaacattgagaatatcggaattaatagcttccagatacagtgattttggcaatagtccgtgtaatccataatccagtaacacgagctggtgcttgctagacaccttttcaatgtttaatttttttgaaataagctttgataaagccttcctcgcaaattccggatacatgaacatgtcggcgacatgattaagtattgttttttcattattttctcaataccccaatagatgatagaatatcacccaatgcgtccatgttgtctatttccaacaggtcgctatatccaccaatagaagtttttccaaaaaagattctaggaacagttctaccaccagtaatttgttcaaaatagtcacgcaattcattttcgggtttaaattctttaatatcgacaatttcatacgctcctcttttgaaactaaacttatttagaatatccagtgcatttctacaaaaaggacatgtatacttgacaaaaattgtcactttgttattggccaacctttgttgtacaaattcctcggccattttaatatttaagtgatataaaactatctcgacttatttaactctttagtcgagatatatggacgcagatagctatatgatagccaactacagaaggcaaacgctataaaaaacataattacgacgagcatatttataaatatttttattcagcattacttgatatagtaatattaggcacagtcaaacattcaaccactctcgatacattaactctctcattttctttaacaaattctgcaatatcttcgtaaaaagattcttgaaactttttagaatatctatcgactctagatgaaatagcgttcgtcaacatactatgttttgtatacataaaggcgcccattttaacagtttctagtgacaaaatgctagcgatcctaggatcctttagaatcacatagattgacgattcgtctctcttagtaactctagtaaaataatcatacaatctagtacgcgaaataatattatccttgacttgaggagatctaaacaatctagttttgagaacatcgataagttcatcgggaatgacatacatactatctttaatagaactcttttcatccagttgaatggattcgtccttaaccaactgattaatgagatcttctattttatcattttccagatgatatgtatgtccattaaagttaaattgtgtagcgcttctttttagtctagcagccaatactttaacatcactaatatcgatatacaaaggagatgatttatctatggtattaagaattcgtttttcgacatccgtcaaaaccaattcctttttgcctgtatcatccagttttccatcctttgtaaagaaattattttctactagactattaataagactgataaggattcctccataattgcacaatccaaactttttcacaaaactagactttacaagatctacaggaatgcgtacttcaggttttttagcttgtgattttttcttttgcggacattttcttgtgaccaactcatctaccatttcattgattttagcagtgaaataagctttcaatgcacgggcactgatactattgaaaacgagttgatcttcaaattccgccatttaagttcaccaaacaacttttaaatacaaatatatcaatagtagtagaataagaactataaaaaaaataataattaaccaataccaaccccaacaaccggtattattagttgatgtgactgttttctcatcacttagaacagatttaacaatttctataaagtctgtcaaatcatcttccggagaccccataaatacaccaaatatagcggcgtacaacttatccatttatacattgaatattggcttttctttatcgctatcttcatcatattcatcatcaatatcaacaagtcccagattacgagccagatcttcttctacattttcagtcattgatacacgttcactatctccagagagtccgataacgttagccaccacttctctatcaatgattagtttcttgagcgcgaaagtaatttttgtttccgttccggatctatagaagacgataggtgtgataattgccttggccaattgtctttctcttttactgagtgattctagttcaccttctatagatctgagaatggatgattctccagtcgaaacatattctaccatggatccgtttaatttgttgatgaagatggattcatccttaaatgttttctctgtaatagtttccaccgaaagactatgcaaagaatttggaatgcgttccttgtgcttaatgtttccatagacggcttctagaagttgatacaacataggactagccgcggtaacttttatttttagaaagtatccatcgcttctatcttgtttagatttatttttataaagtttagtctctccttccaacataataaaagtggaagtcatttgactagataaactatcagtaagttttatagagatagacgaacaattagcgtattgagaagcatttagtgtaacgtattcgatacattttgcattagatttactaatcgattttgcatactctataacacccgcacaagtctgtagagaatcgctagatgcagtaggtcttggtgaagtttcaactctcttcttgattaccttactcatgattaaacctaaataattgtactttgtaatataatgatatatattttcactttatctcatttgagaataaaaatgtttttgtttaaccactgcatgatgtacagatttcggaatcgcaaaccaccagtggttttattttatccttgtccaatgtgaattgaatgggagcggatgcgggtttcgtacgtagatagtacattcccgtttttagaccgagactccatccgtaaaaatgcatactcgttagtttggaataactcggatctgctatatggatattcatagattgactttgatcgatgaaggctcccctgtctgcagccatttttatgatcgtcttttgtggaatttcccaaatagttttataaactcgcttaatatcttctggaaggtttgtattctgaatggatccaccatctgccataatcctattcttgatctcatcattccataattttctctcggttaaaactctaaggagatgcggattaactacttgaaattctccagacaatactctccgagtgtaaatattactggtatacggttccaccgactcattatttcccaaaatttgagcagttgatgcagtcggcataggtgccaccaataaactatttctaagaccgtatgttctgattttatcttttagaggttcccaattccaaagatccgacggtacaacattccaaagatcatattgtagaataccgttactggcgtacgatcctacatatgtatcgtatggtccttccttctcagctagttcacaactcgcctctaatgcaccgtaataaatggtttcgaagatcttcttatttagatcttgtgcttccaggctatcaaatggataatttaagagaataaacgcgtccgctaatccttgaacaccaataccgataggtctatgtctcttattagagatttcagcttctggaataggataataattaatatctataattttattgagatttctgacaattactttgaccacatccttcagtttgagaaaatcaaatcgcccatctattacaaacatgttcaaggcaacagatgccagattacaaacggctacctcattagcatccgcatattgtattatctcagtgcaaagattactacacttgatagttcctaaattttgttgattactctttttgttacacgcatccttataaagaatgaatggagtaccagtttcaatctgagattctataatcgctttccagacgactcgagcctttattatagatttgtatctcctttctctttcgtatagtgtatacaatcgttcgaactcgtctccccaaacattgtccaatccaggacattcatccggacacatcaacgaccactctccgtcatccttcactcgtttcataaagagatcaggaatccaaagagctataaatagatctctggttctatgttcctcgtttcctgtattctttttaagatcgaggaacgccataatatcagaatgccacggttccaagtatatggccataactccaggccgtttgtttcctccctgatctatgtatctagcggtgttattataaactctcaacattggaataataccgtttgatataccattggtaccggagatatagcttccactggcacgaatattactaattgatagacctattccccctgccattttagagattaatgcgcatcgttttaacgtgtcatagataccctctatgctatcatcgatcatgttaagtagaaaacagctagacatttggtgacgactagttcccgcattaaataaggtaggagaagcgtgcgtaaaccatttttcagaaagtagattgtacgtctcaatagctgagtctatatcccattgatgaattcctactgcgacacgcattaacatgtgctgaggtctttcaacgatcttgttgtttattttcaacaagtaggatttttccaaagttttaaaaccaaaatagttgtatgaaaagtctcgttcgtaaataataaccgagttgagtttatccttatatttgttaactatatccatggtgatacttgaaataatcggagaatgtttcccatttttaggattaacatagttgaataaatcctccatcacttcactaaatagtttttttgtttccttgtgtagatttgatacggctattctggcggctagaatggcataatccggatgttgtgtagtacaagtggctgctatttcggctgccagagtgtccaattctaccgttgttactccattatatattccttgaataaccttcatagctattttaataggatctatatgatccgtgtttaagccataacataattttctaatacgagacgtgattttatcaaacatgacattttccttgtatccatttcgtttaatgacaaacatttttgttggtgtaataaaaaaattatttaacttttcattaatagggatttgacgtatgtagcgtacaaaatgatcgttcctggtatatagataaagagtcctatatatttgaaaatcgttacggctcgattaaactttaatgattgcatagtgaatatatcattaggatttaactccttgactatcatggcggcgccagaaattaccatcaaaagcattaatacagttatgccgatcgcagttagaacggttatagcatccaccatttatatctaaaaattagatcaaagaatatgtgacaaagtcctagttgtatactgagaattgacgaaacaatgtttcttacatatttttttcttattagtaactgacttaatagtaggaactggaaagctagacttgattattctataagtatagatacccttccaaataatattctctttgataaaagttccagaaaatgtagaattttttaaaaagttatcttttgctattaccaagattgtgtttagacgcttattattaatatgagtgatgaaatccacaccgcctctagatatcgcctttatttccacattagatggtaaatccaatagtgaaactatctttttaggaatgtatggactcgcgtttagaggagtgaacgtcttgggcgtcggaaaggatgattcgtcaaacgaataaacaatttcacaaatggatgttaatgtattagtaggaaattttttgacgctagtggaattgaagattctaatggatgatgttctacctatttcatccgataacatgttaatttccgacaccaacggttttaatatttcgatgatatacggtagtctctctttcggacttatatagcttattccacaatacgagtcattatatactccaaaaaacaaaataactagtataaaatctgtatcgaatgggaaaaacgaaattatcgacataggtatagaatccggaacattgaacgtattaatacttaattctttttctgtggtaagtaccgataggttattgacattgtatggttttaaatattctataacttgagacttgatagatattagtgatgaattgaaaattatttttatcaccacgtgtgtttcaggatcatcgtcgacgcccgtcaaccaaccgaatggagtaaaataaatatcattaatatatgctctagatattagtatttttatcaatcctttgattatcatcttctcgtaggcgaatgattccatgatcaagagtgatttgagaacatcctccggagtattaatgggcttagtaaacagtccatcgttgcaataataaaagttatccaagttaaaggatattatgcattcgtttaaagatatcacctcatctgacggagacaattttttggtaggttttagagactttgaagctacttgtttaacaaagttattcatcgtcgtctactattctatttaattttgtagttaatttatcacatatcacattaattgactttttggtccatttttccatacgtttatattcttttaatcctgcgttatccgtttccgttatatccagggatagatcttgcaagttaaatagaatgctcttaaataatgtcattttcttatccgctaaaaatttaaagaatgtataaacctttttcagagatttgaaacttttaggtggagttctagtacacaatatcataaacaaactaataaacattccacattcagattccaacagctgattaacttccacattaatacagcctattttcgctccaaatgtacattcgaaaaatctgaataaaacatcgatgtcacaatttgtattatccaatacagaatgtttgtgattcgtgttaaaaccatcggagaaggaataaaaataaaaattattatagtggtggaattcagttggaatattgcctccggagtcataaaaggatactaaacattgttttttatcataaattacacatttccaatgagacaaataacaaaatccaaacattacaaatctagaggtagaacttttaattttgtctttaagtatatacgataagatatgtttattcataaacgcgtcaaatttttcatgaatcgctaaggagtttaagaatctcatgtcaaattgtcctatataatccacttcggatccataagcaaactgagagactaagttcttaatacttcgattgctcatccaggctcctctctcaggctctattttcatcttgacgacctttggattttcaccagtatgtattcctttacgtgataaatcatcgattttcaaatccatttgtgagaagtctatcgccttagatactttttcccgtagtcgaggtttaaaaaaatacgctaacggtatactagtaggtaactcaaagacatcatatatagaatggtaacgcgtctttaactcgtcggttaactctttcttttgatcgagttcgtcgctactattgggtctgctcaggtgccccgactctactagttccaacatcataccgataggaatacaagacactttgccggcggttgtagatttatcatatttctccactacatatccgttacaatttgttaaaaatttagatacatctatattgctacataatccagctagtgaatatatatgacataataaattggtaaatcctagttctggtattttactaattactaaatctgtatatctttccatttatcatggaaaagaatttaccagatatcttcttttttccaaactgcgttaatgtattctcttacaaatattcacaagatgaattcagtaatatgagtaaaacggaacgtgatagtttctcattggccgtgtttccagttataaaacatagatggcataacgcacacgttgtaaaacataaaggaatatacaaagttagtacagaagcacgtggaaaaaaagtatctcctccatcactaggaaaacccgcacacataaacctaaccgcgaagcaatatatatacagtgaacacacaataagctttgaatgttatagttttctaaaatgtataacaaatacagaaatcaattcgttcgatgagtatatattaagaggactattagaagctggtaatagtttacagatattttccaattccgtaggtaaacgaacagatactataggtgtactagggaataagtatccatttagcaaaattccattggcctcattaactcctaaagcacaacgagagatattttcagcgtggatttctcatagacctgtagttttaactggaggaactggagtgggtaagacgtcacaggtacccaagttattgctttggtttaattatttatttggtggattctctactctagataaaatcactgactttcacgaaagaccagtcattctatctcttcctaggatagctttagttagattgcatagcaataccattttaaaatcattgggatttaaggtactagatggatctcctatttctttacggtacggatctataccggaagaattaataaacaaacaaccaaaaaaatatggaattgtattttctacccataagttatctctaacaaaactatttagttatggcactcttattatagacgaagttcatgagcatgatcaaataggagatattattatagcagtagcgagaaagcatcatacgaaaatagattctatgtttttaatgactgccacgttagaggatgacagggaacggctaaaagtatttttacctaatcccgcatttatacatattcctggagatacactgtttaaaattagcgaggtatttattcataataagataaatccatcttccagaatggcatacatagaagaagaaaagagaaatttagttactgctatacagatgtatactcctcctgatggatcatccggtatagtctttgtggcatccgttgcacagtgtcacgaatataaatcatatttagaaaaaagattaccgtatgatatgtatattattcatggtaaggtcttagatatagacgaaatattagaaaaagtgtattcatcacctaatgtatcgataattatttctactccttatttggaatccagcgttactatacgcaatgttacacacatttatgatatgggtagagtttttgtccccgctccttttggaggatcgcaacaatttatttctaaatctatgagagatcaacgaaaaggaagagtaggaagagttaatcctggtacatacgtctatttctatgatctgtcttatatgaagtctatacagcgaatagattcagaatttctacataattatatattgtacgctaataagtttaatctaacactccccgaagatttgtttataatccctacaaatttggatattctatggcgtacaaaggaatatatagactcgttcgatattagtacagaaacatggaataaattattatccaattattatatgaagatgatagagtatgctaaactttatgtactaagtcctattctcgctgaggagttggataactttgagaggacgggagaattaactagtattgtacaagaagccattttatctctaaatttacaaattaagattttaaattttaaacataaagatgatgatacgtatatacacttttgtaaaatattattcggtgtctataacggaacaaacgctactatatattatcatagacctctaacgggatatatgaatatgatttcagatactatatttgttcctgtagataataactaaaaattaaactctaatgaccacatctttttttagagatgaaaaattttccacatctccttttgtagacacgactaaacattttgcagaaaaaagtttattagtgtttagataatcgtatacttcatcagtgtagatagtaaatgtgaacagataaaaggtattcttgctcaatagattggtaaattccatagaatatattaatcctttcttcttgagatcccacatcatttcaaccagagacgttttatccaatgatttacctcgtactataccacatacaaaactagattttgcagtgacgtcgtacctggtattcctaccaaacaaaattttacttttagttcttttagaaaattctaaggtagaatctctatttgccaatatgtcatctatggaattaccactagcaaaaaatgatagaaatatatattgatacatcgcagctggttttgatctactatactttaaaaacgaatcagattccataattgcctgtatatcatcagctgaaaaactatgttttacacgtattccttcggcatttctttttaatgatatatcttgtttagacaatgataaagttatcatgtccatgagagacgcgtctccgtatcgtataaatatttcattagatgttagacgcttcattaggggtatacttctataaggtttcttaatcagtccatcattggttgcgtcaagaactactatcggatgttgttgggtatctctagtgttacacatggccttactaaagtttgggtaaataactatgatatctctattaattatagatgcatatatttcattcgtcaaggatattagtatcgacttgctatcgtcattaatacgtgtaatgtaatcatataaatcatgcgatagccaaggaaaatttaaatagatgttcatcatataatcgtcgctataattcatattaatacgttgacattgactaatttgtaatatagcctcgccacgaagaaagctctcgtattcagtttcatcgataaaggataccgttaaatataactggttgccgatagtctcatagtctattaagtggtaagtttcgtacaaatacagaatccctaaaatattatctaatgttggattaatctttaccataactgtataaaatggagacggagtcataactattttaccgtttgtacttactggaatagatgaaggaataatctccggacatgctggtaaagacccaaatgtctgtttgaagaaatccaatgttccaggtcctaatctcttaacaaaaattacgatattcgatcccgatatcctttgcattctatttaccagcatatcacgaactatattaagattatctatcatgtctattctcccaccgttatataaatcgcctccgctaagaaacgttagtatatccatacaatggaatacttcatttctaaaatagtattcgttttctaattctttaatgtgaaatcgtatactagaaagggaaaaattatctttgagttttccgttagaaaagaaccacgaaactaatgttctgattgcgtccgattccgttgctgaattaatggatttacaccaaaaactcatataacttctagatgtagaagcattcgctaaaaaattagtagaatcaaaggatataagtagatgttccaacaagtgagcaattcccaagatttcatctatatcattctcgaatccgaaattagaaattcccaagtagatatcctttttcatccgatcgttgatgaaaatacgaactttattcggtaagacaatcatttactaaggagtaaaataggaagtaatgttcgtatgtcgttatcatcgtataaattaaaggtgtgttttttaccattaagtgacattataattttaccaatattggaattataatataggtgtatttgcgcactcgcgacggttgatgcatcggtaaatatagctgtatctaatgttctagtcggtatttcatcatttcgctgtctaataatagcgttttctctatctgtttccattacagctgcctgaagtttattggtcggataatatgtaaaataataagaaatacatacgaataacaaaaataaaataagatataataaagatgccatttagagatctaattttgtttaacttgtccaaattcctacttacagaagatgaggaatcgttggagatagtgtcttccttatgtagaggatttgaaatatcttataatgacttgataacttactttccagataggaaataccataaatatatttataaagtatttgaacatgtagatttatcggaggaattaagtatggaattccatgatacaactctgagagatttagtctatcttagattgtacaagtattccaagtgtatacggccgtgttataaattaggagataatctaaaaggcatagttgttataaaggacaggaatatttatattagggaagcaaatgatgacttgatagaatatctcctcaaggaatacactcctcagatttatacatattctaatgagcgcgtccccataactggttcaaaattaattctttgtggattttctcaagttacatttatggcgtatacaacgtcgcatataacaacaaataaaaaggtagatgttctcgtttccaaaaaatgtatagatgaactagtcgatccaataaattatcaaatacttcaaaatttatttgataaaggaagcggaacaataaacaaaatactcaggaagatattttattcggtaacaggtggccaaactccataggtagctttttctatttcggattttagaatttccaaattcaccagcgatttatcggttttggtgaaatccaaggatttattaatgtccacaaatgccatttgttttgtctgtggattgtatttgaaaatggaaacgatgtagttagatagatgcgctgcaaagtttcctattagggttccgcgctttacgtcacccagcatacttgaatcaccatcctttaaaaaaaatgataagatatcaacatggagtatatcatactcggattttaattcttctactgactcactgacattttcacaaatactacaatacggtttaccgaaaataatcagtacgttcttcatttatgggtatcaaaaacttaaaatcgttactgctggaaaataaatcactgacgatattagatgataatttatacaaagtatacaatggaatatttgtggatacaatgagtatttatatagccgtcgccaattgtgtcagaaacttagaagagttaactacggtattcataaaatacgtaaacggatgggtaaaaaagggagggcatgtaaccctttttatcgatagaggaagtataaaaattaaacaagacgttagagacaagagacgtaaatattctaaattaaccaaggacagaaaaatgttagaattagaaaagtgtacatccgaaatacaaaatgttaccggatttatggaagaagaaataaaggcagaaatgcaattaaaaatcgataaactcacatttcaaatatatttatctgattctgataacataaaaatatcattgaatgagatactaacacatttcaacaataatgagaatgttacattattttattgtgatgaacgagacgcagaattcgttatgtgtctcgaggctaaaacacatttctctaccacaggagaatggccgttgataataagtaccgatcaggatactatgctatttgcatctactgataatcatcctaagatgataaaaaacttaactcaactgtttaaatatgttccctctgcagaggataactatttagcaaaattaacggcgttagtgaatggatgtgatttctttcctggactctatggggcatctataacacccaccaacttaaacaaaatacaattgtttagtgattttacaatcgataatatagtcactagtttggcaattaaaaattattatagaaagactaactctaccgtagacgtgcgtaatattgttacgtttataaacgattacgctaatttagacgatgtctactcgtatattcctccttgtcaatgcactgttcaagaatttatattttccgcattagatgaaaaatggaatgaatttaaatcatcttatttagagaccgttccgttaccctgtcaattaatgtacgcgttagaaccacgtaaggagattgatgtttcagaagttaaaactttatcatcttatatagatttcgaaaatactaaatcagatatcgatgttataaaatctatatcctcgatcttcggatattctaacgaaaactgtaacacgatagtattcggcatctataaggataatttactactgagtataaataattcattttactttaacgatagtctgttaataaccaatactaaaagtgataatataataaatataggttactagattaaaaatggtgttccaactcgtgtgctctacgtgcggcaaagatatttctcacgaacgatataaattgattatacgaaaaaaatcattaaaggatgtactcgtcagtgtaaagaacgaatgttgtaggttaaaattatctacacaaatagaacctcaacgtaacttaacagtgcaacctctattggatataaactaatatggatccggttaattttatcaagacatatgcgcctagaggttctattatttttattaattataccatgtcattaacaagtcatttgaatccatcgatagaaaaacatgtgggtatttattatggtacgttattatcggaacacttggtagttgaatcaacatatagaaaaggagttcgaatagtcccattggatagtttttttgaaggatatcttagtgcaaaagtatacatgttagagaatattcaagttatgaaaatagcagctgatacgtcattaactttattgggtattccgtatggatttggtcataatagaatgtattgttttaaattggtagctgactgttataaaaatgccggtattgatacatcgtctaaacgaatattaggtaaagatatttttctgagccaaaacttcacagacgataatagatggataaagatatatgattctaataatttaacattttggcaaattgattaccttaaagggtgagttaatatgcataactactcctccgttgttttttccctcgttctttttcttaacgttgtttgccatcactctcataatgtaaagatattctaaaatggtaaacttttgcatatcggacgcagaaattggtataaatgttgtaattgtattatttcccgtcaatggactagtcacagctccatcagttttatatcctttagagtatttctcactcgtgtctagcattctagagcattccatgatctgtttatcgttgatattggccggaaagatagattttttattttttattatattactattggcaattgtagatataacttctggtaaatatttttctaccttttcaatctcttctattttcaagccggctatatattctgctatattgttgctagtatcaataccttttcttgctaagaagtcatatgtggtattcactatatcagttttaactggtagttccattagcctttccacttctgcagaataatcagaaattggttctttaccagaaaatccagctactataataggctcaccgatgatcattggcaaaatcctatattgtaccagattaatgagagcatatttcatttccaataattctgctagttcttgagacattgatttatttgatgaatctagttggttctctagatactctaccatttctgccgcatacaataacttgttagataaaatcagggttatcaaagtgtttagcgtggctagaatagtgggcttgcatgtattaaagaatgcggtagtatgagtaaaccgttttaacgaattatatagtctccagaaatctgtggcgttacatacatgagccgaatgacatcgaagattgtccaatatttttaatagctgctctttgtccattatttctatatttgactcgcaacaattgtagataccattaatcaccgattcctttttcgatgctggacaatagcacaattgtttagctttggactctatgtattcagaattaatagatatatctctcaatacagattgcactatacattttgaaactatgtcaaaaattgtagaacgacgctgttctgcagccatttaactttaaataatttacaaaaatttaaaatgagcatccgtataaaaatcgataaactgcgccaaattgtggcatatttttcagagttcagtgaagaagtgtctataaatgtagactcgacggatgagttaatgtatatttttgccgccttgggcggatctgtaaacatttgggcaattatacctctaagtgcatcagtgttttaccgaggagccgaaaatattgtgtttaatcttcctgtgtccaaggtaaaatcgtgtttgtgtagttttcacaatgatgccatcatagatatagaacctgatctggaaaataatctagtaaaactttctagttatcatgtagtaagtgtcgattgtaacaaggaactgatgcctattaggacagatactactatttgtctaagtatagatcaaaagaaatcttacgtgtttaattttcacaagtatgaagaaaaatgttgtggtagaaccgtcattcatctagaatggttgttgggctttatcaagtgtattagtcagcatcagcatctggctattatgtttaaagatgacaatattattatgaagactcctggtaatactgatgcgttttccagggaatattctatgactgaatgttctcaagaactacaaaagttttctttcaaaatagctatctcgtctctcaacaaactacgaggattcaaaaagagagtcaatgtttttgaaactagaatcgtaatggataatgacgataacattttaggaatgttgttttcggatagagttcaatcctttaagatcaacatctttatggcgtttttagattaatactttcaatgagataaatatgggtggcggagtaagtgttgagctccctaaacgggatccgcctccgggagtacccactgatgagatgttattaaacgtggataaaatgcatgacgtgatagctcccgctaagcttttagaatatgtgcatataggaccactagcaaaagataaagaggataaagtaaagaaaagatatccagagtttagattagtcaacacaggacccggtggtctttcggcattgttaagacaatcgtataatggaaccgcacccaattgctgtcgcacttttaatcgtactcattattggaagaaggatggaaagatatcagataagtatgaagagggtgcagtattagaatcgtgttggccagacgttcacgacactggaaaatgcgatgttgatttattcgactggtgtcagggggatacgttcgatagaaacatatgccatcagtggatcggttcagcctttaataggagtaatagaactgtagagggtcaacaatcgttaataaatctgtataataagatgcaaacattatgtagtaaagatgctagtgtaccaatatgcgaatcatttttgcattatttacgcgcacacaatacagaagatagcaaagagatgatcgattatattctaagacaacagtctgcggactttaaacagaaatatatgagatgtagttatcccactagagataagttagaagagtcattaaaatatgcggaacctcgagaatgttgggatccagagtgttcgaatgccaatgttaatttcttactaacacgtaattataataatttaggactttgcaatattgtacgatgtaataccagcgtgaacaacttacagatggataaaacttcctcattaagattgtcatgtggattaagcaatagtgatagattttctactgttcccgtcaatagagcaaaagtagttcaacataatattaaacactcgttcgacctaaaattgcatttgatcagtttattatctctcttggtaatatggatactaattgtagctatttaaatgggtgccgcggcaagcatacagacgacggtgaatacactcagcgaacgtatctcgtctaaattagaacaagaagcgaacgctagtgctcaaacaaaatgtgatatagaaatcggaaatttttatatccgacaaaaccatggatgtaacctcactgttaaaaatatgtgctctgcggacgcggatgctcagttggatgctgtgttatcagccgctacagaaacatatagtggattaacaccggaacaaaaagcatacgtgccagctatgtttactgctgcgttaaacattcagacgagtgtaaacactgttgttagagattttgaaaattatgtgaaacagacttgtaattctagcgcggtcgtcgataacaaattaaagatacaaaacgtaatcatagatgaatgttacggagccccaggatctccaacaaatttggaatttattaatacaggatctagcaaaggaaattgtgccattaaagcgttgatgcaattgacgactaaggccactactcaaatagcacctagacaagttgctggtacaggagttcagttttatatgattgttatcggtgttataatattggcagcgttgtttatgtactatgccaagcgtatgttgttcacatccaccaatgataaaatcaaacttattttagccaataaggaaaacgtccattggactacttacatggacacattctttagaacttctccgatggttattgctaccacggatatgcaaaactgaaaatatattgataatattttaatagattaacatggaagttatcgctgatcgtctagacgatatagtgaaacaaaatatagcggatgaaaaatttgtagattttgttatacacggtctagagcatcaatgtcctgctatacttcgaccattaattaggttgtttattgatatactattatttgttatagtaatttatatttttacggtacgtctagtaagtagaaattatcaaatgttgttggtggtgctagtcatcacattaactattttttattactttatactataatagtactagactgacttctaacaaacatctcacctgccataaataaatgcttgatattaaagtcttctatttctaacactattccatctgtggaaaataatactctgacattatcgctaattgacacatcggtgagtgatatgcctataaagtaataatcttctttgggcacatataccagtgtaccaggttctaacaacctatttactggtgctcctgtagcatactttttctttaccttgagaatatccatcgtttgcttggtcaatagcgatatgtgattttttatcaaccactcaaaaaagtaattggagtgttcatatcctctacgggctattgtctcatggccgtgtatgaaatttaagtaacacgactgtggtagatttgttctatagagccgattgccgcaaatagatagaactaccaatatgtctgtacaaatgttaaacattaattgattaacagaaaaaacaatgttcgttctgggaatagaaaccagatcaaaacaaaattcgttagaatatatgccacgtttatacatggaatataaaataactacagtttgaaaaataacagtatcatttaaacatttaacttgcggggttaatctcacaactttactgtttttgaactgttcaaaatatagcatcgatccgtgagaaatacgtttagccgcctttaatagaggaaatcccaccgcctttctggatctcaccaacgacgatagttctgaccagcaactcatttcttcatcatccacctgttttaacatataataggcaggagatagatatccgtcattgcaatattccttctcgtaggcacacaatctaatattgataaaatctccattctcttctctgcatttattatcttgtctcggtggctgattaggctgtggtcttggtttaggctttggtatatcgttgttgaatctattttggtcattaaatctttcatttcttcctggtatatttttatcacctcgtttggttggatttttgtctatattatcgtttgtaacatcggtacgggtattcatttatcacaaaaaaaacttctctaaatgagtctactgctagaaaacctcatcgaagaagataccatattttttgcaggaagtatatctgagtatgatgatttacaaatggttattgccggcgcaaaatccaaatttccaagatctatgctttctatttttaatatagtacctagaacgatgtcaaaatatgagttggagttgattcataacgaaaatatcacaggagcaatgtttaccacaatgtataatataagaaacaatttgggtctaggagatgataaactaactattgaagccattgaaaactatttcttggatcctaacaatgaagttatgcctcttattattaataatacggatatgactgccgtcattcctaaaaaaagtggtaggagaaagaataagaacatggttatcttccgtcaaggatcatcacctatcttgtgcattttcgaaactcgtaaaaagattaatatttataaagaaaatatggaatccgcgtcgactgagtatacacctatcggagacaacaaggctttgatatctaaatatgcgggaattaatgtcctgaatgtgtattctccttccacatccataagattgaatgccatttacggattcaccaataaaaataaactagagaaacttagtactaataaggaactagaatcgtatagttctagccctcttcaagaacccattaggttaaatgattttctgggactattggaatgtgttaaaaagaatattcctctaacagatattccgacaaaggattgattactataaatggagaatgttcctaatgtatactttaatcctgtgtttatagagcccacgtttaaacattctttattaagtgtttataaacacagattaatagttttatttgaagtattcgttgtattcattctaatatatgtattttttagatctgaattaaatatgttcttcatgcctaaacgaaaaatacccgatcctattgatagattacgacgtgctaatctagcgtgtgaagacgataaattaatgatctatggattaccatggatgacaactcaaacatctgcgttatcaataaatagtaaaccgatagtgtataaagattgtgcaaagcttttgcgatcaataaatggatcacaaccagtatctcttaacgatgttcttcgcagatgatgattcattttttaagtatttggctagtcaagatgatgaatcttcattatctgatatattgcaaatcactcaatatctagactttctgttattattattgatccaatcaaaaaataaattagaagctgtgggtcattgttatgaatctctttcagaggaatacagacaattgacaaaattcacagactttcaagattttaaaaaactgtttaacaaggtccctattgttacagatggaagggtcaaacttaataaaggatatttgttcgactttgtgattagtttgatgcgattcaaaaaagaatcctctctagctaccaccgcaatagatcctgttagatacatagatcctcgtcgtgatatcgcattttctaacgtgatggatatattaaagtcgaataaagtgaacaataattaattctttattgtcatcatgaacggcggacatattcagttgataatcggccccatgttttcaggtaaaagtacagaattaattagacgagttagacgttatcaaatagctcaatataaatgcgtgactataaaatattctaacgataatagatacggaacgggactatggacgcatgataagaataattttgaagcattggaagcaactaaactatgtgatgtcttggaatcaattacagatttctccgtgataggtatcgatgaaggacagttctttccagacattgttgaattctgtgagcgtatggcaaacgaaggaaaaatagttatagtagccgcactcgatgggacatttcaacgtaaaccgtttaataatattttgaatcttattccattatctgaaatggtggtaaaactaactgctgtgtgtatgaaatgctttaaggaggcttccttttctaaacgattgggtgaggaaaccgagatagagataataggaggtaatgatatgtatcaatcggtgtgtagaaagtgttacatcgactcataatattatattttttatctaaaaaactaaaaataaacattgattaaattttaatataatacttaaaaatggatgttgtgtcgttagataaaccgtttatgtattttgaggaaattgataatgagttagattacgaaccagaaagtgcaaatgaggtcgcaaaaaaactaccgtatcaaggacagttaaaactattactaggagaattattttttcttagtaagttacagcgacacggtatattagatggtgccaccgtagtgtatataggatctgctcccggtacacatatacgttatttgagagatcatttctataatttaggagtgatcatcaaatggatgctaattgacggccgccatcatgatcctattttaaatggattgcgtgatgtgactctagtgactcggttcgttgatgaggaatatctacgatccatcaaaaaacaactgcatccttctaagattattttaatttctgatgtgagatccaaacgaggaggaaatgaacctagtacggcggatttactaagtaattacgctctacaaaatgtcatgattagtattttaaaccccgtggcatctagtcttaaatggagatgcccgtttccagatcaatggatcaaggacttttatatcccacacggtaataaaatgttacaaccttttgctccttcatattcagctgaaatgagattattaagtatttataccggtgagaacatgagactgactcgagttaccaaattagacgctgtaaattatgaaaaaaagatgtactaccttaataagatcgtccgtaacaaagtagttgttaactttgattatcctaatcaggaatatgactattttcacatgtactttatgctgaggaccgtgtactgcaataaaacatttcctactactaaagcaaaggtactatttctacaacaatctatatttcgtttcttaaatattccaacaacatcaactgaaaaagttagtcatgaaccaatacaacgtaaaatatctagcaaaaattctatgtctaaaaacagaaatagcaagagatccgtacgcggtaataaatagaaacgtactactgagatatactaccgatatagagtataatgatttagttactttaataaccgttagacataaaattgattctatgaaaactgtgtttcaggtatttaacgaatcatccataaattatactccggttgatgatgattatggagaaccaatcattataacatcgtatcttcaaaaaggtcataacaagtttcctgtaaattttctatacatagatgtggtaatatctgacttatttcctagctttgttagactagatactacagaaactaatatagttaatagtgtactacaaacaggcgatggtaaaaagactcttcgtcttcccaaaatgttagagacggaaatagttgtcaagattctctatcgccctaatataccattaaaaattgttagatttttccgcaataacatggtaactggagtagagatagccgatagatctgttatttcagtcgctgattaatcaattagtagagatgagataagaacattataataatcaataatatatcttatatcttatatcttatatcttatatcttgtttagaaaaatgctaatattaaaatagctaacgctagtaatccaatcggaagccatttgatatctataatagggtatctaatttcctgatttaaatagcggacagctatattctcggtagctactcgtttggaatcacaaacattatttacatctaatttactatctgtaatggaaacgtttcccaatgaaatggtacaatccgatacattgcattttgttatatttttttttaaagaggctggtaacaacgcatcgcttcgtttacatggctcgtaccaacaataatagggtaatcttgtatctattcctatccgtactatgcttttatcaggataaatacatttacatcgtatatcgtctttgttagcatcacagaatgcataaatttgttcgtccgtcatgataaaaatttaaagtgtaaatataactattatttttatagttgtaataaaaagggaaatttgattgtatactttcggttctttaaaagaaactgacttgataaaaatggctgtaatctctaaggttacgtatagtctatatgatcaaaaagagattaatgctacagatattatcattagtcatgttaaaaatgacgacgatatcggtaccgttaaagatggtagactaggtgctatggatggggcattatgtaagacttgtgggaaaacggaattggaatgtttcggtcactggggtaaagtaagtatttataaaactcatatagttaagcctgaatttatttcagaaattattcgtttactgaatcatatatgtattcactgcggattattgcgttcacgagaaccgtattccgacgatattaacctaaaagagttatcgggacacgctcttaggagattaaaggataaaatattatccaagaaaaagtcatgttggaacagtgaatgtatgcaaccgtatcaaaaaattactttttcaaagaaaaaggtttgtttcgtcaacaagttggatgatattaacgttcctaattctctcatctatcaaaagttaatttctattcatgaaaagttttggccattattagaaattcatcaatatccagctaacttattttatacagactactttcccatccctccgttgattattagaccggctattagtttttggatagatagtatacccaaagagaccaatgaattaacttacttattaggtatgatcgttaagaattgtaacttgaatgctgatgaacaggttatccagaaggcggtaatagaatacgatgatattaaaattatttctaataacactaccagtatcaatttatcatatattacatccggcaaaaataatatgattagaagttatatcgtcgcccgacgaaaagatcagaccgctagatctgtaattggtcccagtacatctatcaccgttaatgaggtaggaatgcccgcatatattagaaatacacttacagaaaagatatttgttaatgcctttacagtggataaagttaaacaactattagcgtcaaaccaagttaaattttactttaataaacgattaaaccaattaacaagaatacgccaaggaaagtttattaaaaataaaatacatttattgcctggtgattgggtagaagtagctgttcaagaatatacaagtattatttttggaagacagccgtctctacatagatacaacgtcatcgcttcatctatcagagctaccgaaggagatactatcaaaatatctcccggaattgccaactctcaaaatgctgatttcgacggggatgaggaatggatgatattagaacaaaatcctaaagctgtaattgaacaaagtattcttatgtatccgacgacgttactcaaacacgatattcatggagcccccgtttatggatctattcaagatgaaatcgtagcagcgtattcattgtttaggatacaagatctttgtttagatgaagtattgaacatcttggggaaatatggaagagagttcgatcctaaaggtaaatgtaaattcagcggtaaagatatctatacttacttgataggtgaaaagattaattatccgggtctcttaaaggatggtgaaattattgcaaacgacgtagatagtaattttgttgtggctatgaggcatctgtcattggctggactcttatccgatcataagtcgaacgtggaaggtatcaactttattatcaagtcatcttatgtttttaagagatatctatctatttacggttttggggtgacattcaaagatctgagaccaaattcgacgttcactaataaattggaggccatcaacgtagaaaaaatagaacttatcaaagaagcatacgccaaatatctcaacgatgtaagagacgggaaaatagttccattatctaaagctttagaggcggactatgtggaatccatgttatccaacttgacaaatcttaatatccgagagatagaagaacatatgagacaaacgctgatagatgatccagataataacctcctgaaaatggccaaagcgggttataaagtaaatcccacagaactaatgtatattctaggtacgtatggacaacaaaggattgatggtgaaccagcagagactcgagtattgggtagagttttaccttactatcttccagactctaaggatccagaaggaagaggttatattcttaattctttaacaaaaggattaacgggttctcaatattacttttcgatgctggttgcaagatctcaatctactgatatcgtctgtgaaacatcacgtaccggaacactggctagaaaaatcattaaaaagatggaggatatggtggtcgacggatacggacaagtagttataggtaatacgctcatcaagtacgccgccaattataccaaaattctaggctcagtatgtaaacctgtagatcttatctatccagatgagtccatgacttggtatttggaaattagtgctctgtggaataaaataaaacagggattcgtttactctcagaaacagaaacttgcaaagaagacattggcgccgtttaatttcctagtattcgtcaaacccaccactgaggataatgctattaaggttaaggatctgtacgatatgattcataacgtcattgatgatgtgagagagaaatacttctttacggtatctaatatagattttatggagtatatattcttgacgcatcttaatccttctagaattagaattacaaaagaaacggctatcactatctttgaaaagttctatgaaaaactcaattatactctaggtggtggaactcctattggaattatttctgcacaggtattgtctgagaagtttacacaacaagccctgtccagttttcacactactgaaaaaagtggtgccgtcaaacaaaaacttggtttcaacgagtttaataacttgactaatttgagtaagaataagaccgaaattatcactctggtatccgatgatatctctaaacttcaatctgttaagattaatttcgaatttgtatgtttgggagaattaaatccagacatcactcttcgaaaagaaacagataggtatgtagtagatataatagtcaatagattatacatcaagagagcagaaataaccgaattagtcgtcgaatatatgattgaacgatttatctcctttagcgtcattgtaaaggaatggggtatggagacattcattgaggacgaggataatattagatttactgtctacctaaatttcgttgaaccggaagaattgaatcttagtaagtttatgatggttcttccgggtgccgccaacaagggaaagattagtaaattcaagattcctatctctgactatacgggttatgacgacttcaatcaaacaaaaaagctcaataagatgactgtagaactcatgaatctaaaagaattgggttctttcgatttggaaaacgtcaacgtgtatcctggagtatggaatacatacgatatcttcggtatcgaggccgctcgtgaatacttgtgcgaagccatgttaaacacctatggagaagggttcgattatctgtatcagccttgtgatcttctcgctagtttactatgtgctagttacgaaccagaatcagtgaataaattcaagttcggcgcagctagtactcttaagagagctacgttcggagacaataaagcattgttaaacgcggctcttcataaaaagtcagaacctattaacgataatagtagctgccacttttttagcaaggtccctaatataggaactggatattacaaatactttatcgacttgggtcttctcatgagaatggaaaggaaactatctgataagatatcttctcaaaagatcaaggaaatggaagaaacagaagacttttaattcttatcaataacatatttttctatgatctgtcttttaaacgatggattttccacaaatgcgcctctcaagtccctcatagaatgatacacgtataaaaaatatagcataggcgatgactccttatttttagacattagatatgccaaaatcatagccccgcttctatttactcccgcagcacaatgaaccaacacgggctcgtttcgttgatcacatttagataaaaaggcggttacgtcgtcaaaatatttactaatatcggtagttgtatcatctaccaacggtatatgaataatattaatattagagttaggtaatgtatatttatccatcgtcaaatttaaaacatatttgaacttaacttcagatgatggtgcatccatagcatttttataatttcccaaatacacattattggttacccttgtcattatagtgggagatttggctctgtgcatatctccagttgaacgtagtagtaagtatttatacaaacttttcttatccatttataacgtacaaatggataaaactactttatcggtaaacgcgtgtaatttagaatacgttagagaaaaggctatagtaggcgtacaagcagccaaaacatcaacacttatattctttgttattatattggcaattagtgcgctattactctggtttcagacgtctgataatccagtctttaatgaattaacgagatatatgcgaattaaaaatacggttaacgattggaaatcattaacggatagcaaaacaaaattagaaagtgatagaggtagacttctagccgctggtaaggatgatatattcgacttcaaatgtgtggatttcggcgcctattttatagctatgcgattggataagaaaacatatctgccgcaagctattaggcgaggtactggagacgcgtggatggttaaaaaggcggcaaaggtcgatccatctgctcaacaattttgtcagtatttgataaaacacaagtctaataatgttattacttgtggtaatgagatgttaaatgaattaggttatagcggttattttatgtcaccgcattggtgttccgattttagtaatatggaatagtgttagataaatgcggtaacgaatgttcctgtaaggaaccataacagcttagatttaacgttaaagatgagcataaacataataaacaaaattacaatcaaacctataacattaatatcaaacaatccaaaaaatgaaatcagtggagtagtaaacgcgtacataactcctggataacgtttagcagctgccgttcctattctagaccaaaaattcggtttcatgttttcgaaacggtattctgcaacaagtcgaggatcgtgttctacatatttggcggcgttatccagtatctgcctattgatcttcatttcgttttcgattctggctatttcaaaataaaatcccgatgatagacctccagactttataatttcatctacgatgttcagcgccgtagtaactctaataatataggctgataagctaacatcataccctcctgtatatgtgaatatggcatgatttttgtccattacaagctcggttttaactttattgcctgtaataatttctctcatctgtaggatatctatttttttgtcatgcattgccttcaagacgggacgaagaaacgtaatatcctcaataacgttatcgttttctacaataactacatattctacctttttattttctaactcggtaaaaaaattagaatcccatagggctaaatgtctagcgatatttcttttcgtttcttctgtacacatagtgttacaaaaccctgaaaagaagtgagtatacttgtcatcatttctaatgtttcctccagtccactgtataaacgcataatccttgtaatgatctggatcatccttgactaccacaacatttcttttttctggcataacttcgttgtcctttacatcatcgaacttctgatcattaatatgctcatgaacattaggaaatgtttctgatggaggtctatcaataactggcacaacaataacaggagttttcaccgccgccatttagttattgaaattaatcatatacaactctttaatacgagttatattttcgtctatccattgtttcacattgacatatttcgacaaaaagatataaaatgcgtattccaatgcttctctgtttaatgaattactaaaatatacaaacacgtcactgtctggcaataaatgatatcttagaatattgtaacaatttattttgtattgcacatgttcgtgatctatgagttcttcttcgaatggcataggatctccgaatctgaaaacgtataaataggagttagaataataatatttgagagtattggtaatatataaactctttagcggtataattagtttttttctctcaatttctatttttagatgtgatggaaaaatgactaattttgtagcattagtatcatgaactctaatcaaaatcttaatatcttcgtcacacgttagctctttgaagtttttaagagatgcatcagttggttctacagatggagtaggtgcaacaattttttgttctacacatgtatgtactggagccattgttttaactataatggtgcttgtatcgaaaaactttaatgcagatagcggaagctcttcgccgcgactttctacgtcgtaattgggttctaacgccgatctctgaatggatactagttttctaagttctaatgtgattctctgaaaatgtaaatccaattcctccggcattatagatgtgtatacatcggtaaataaaactatagtatccaacgatcccttctcgcaaattctagtcttaaccaaaaaatcgtatataaccacggagatggcgtatttaagagtggattcttctaccgttttgttcttggatgtcatataggaaactataaagtccgcactactgttaagaatgattactaacgcaactatatagtttaaattaagcattttggaaacataaaataactctgtagacgatacttgactttcgaataagtttgcagacaaacgaagaaagaacagacctctcttaatttcagaagaaaactttttttcgtattcctgacgtctagagtttatatcaataagaaagttaagaattagtcggttaatgttgtatttcattacccaagtttgagatttcataatattatcaaaagacatgataatattaaagataaagcgctgactatgaacgaaatagctatatggttcgctcaagaatatagtcttgttaaacgtggaaacgataactgtatttttaatcacgtcagcggcatctaaattaaatataggtatatttattccacacactctacaatatgccacaccatcttcataataaataaattcgttagcaaaattattaattttagtgaaatagttagcgtcaactttcatagcttccttcaatctaatttgatgctcacacggtgcgaattccactctaacatcccttttccatgcctcaggttcatcgatctctataatatctagttttttgcgtttcacaaacacaggctcgtctctcgcgatgagatctgtatagtaactatgtaaatgataactagatagaaagatgtagctatatagatgacgatcctttaagagaggtataataactttaccccaatcagatagactgttgttatggtcttcggaaaaagaatttttataaatttttccagtattttccaaatatacgtacttaacatctaaaaaatccttaatgataataggaatggataatccgtctattttataaagaaatacatatcgcacattatacttttttttggaaatgggaataccgatgtgtctacataaatatgcaaagtctaaatattttttagagaatcttagttggtccaaattcttttccaagtacggtaatagatttttcatattgaacggtatcttcttaatctctggttctagttccgcattaaatgatgaaactaagtcactatttttataactaacgattacatcacctctaacatcatcatttaccagaatactgatcttcttttgtcgtaaatacatgtctaatgtgttaaaaaaaagatcatacaagttatacgtcatttcatctgtggtattcttgtcattgaaggataaactcgtactaatctcttctttaacagcctgttcaaatttatatcctatatacgaaaaaatagcaaccagtgtttgatcatccgcgtcaatattctgttctatcgtagtgtataacaatcgtatatcttcttctgtgatagtcgatacgttataaaggttgataacgaaaatatttttatttcgtgaaataaagtcatcgtaggattttggacttatattcgcgtctagtagatatgcttttatttttggaatgatctcaattagaatagtctctttagagtccatttaaagttacaaacaactaggaaattggtttatgatgtataatttttttagtttttatagattctttattctatacttaaaaaatgaaaataaatacaaaggttcttgagggttgtgttaaattgaaagcgagaaataatcataaattatttcattatcgcgatatccgttaagtttgtatcgtaatggcgtggtcaattacgaataaagcggatactagtagcttcacaaagatggctgaaatcagagctcatctaaaaaatagcgctgaaaataaagataaaaacgaggatattttcccggaagatgtaataattccatctactaagcccaaaaccaaacgagccactactcctcgtaaaccagcggctactaaaagatcaaccaaaaaggaggaagtggaagaagaagtagttatagaggaatatcatcaaacaactgaaaaaaattctccatctcctggagtcagcgacattgtagaaagcgtggccgctgtagagctcgatgatagcgacggggatgatgaacctatggtacaagttgaagctggtaaagtaaatcatagtgctagaagcgatctctctgacctaaaggtggctaccgacaatatcgttaaagatcttaagaaaattattactagaatctctgcagtatcgacggttctagaggatgttcaagcagctggtatctctagacaatttacttctatgactaaagctattacaacactatctgatctagtcaccgagggaaaatctaaagttgttcgtaaaaaagttaaaacttgtaagaagtaaatgcgtgcacttttttataaagatggtaaactctttaccgataataattttttaaatcctgtatcagacgataatccagcgtatgaggttttgcaacatgttaaaattcctactcatttaacagatgtagtagtatatgaacaaacgtgggaggaggcgttaactagattaatttttgtgggaagcgattcaaaaggacgtagacaatacttttacggaaaaatgcatgtacagaatcgcaacgctaaaagagatcgtatttttgttagagtatataacgttatgaaacgaattaattgttttataaacaaaaatataaagaaatcgtccacagattccaattatcagttggcggtttttatgttaatggaaactatgttttttattagatttggtaaaatgaaatatcttaaggagaatgaaacagtagggttattaacactaaaaaataaacacatagaaataagtcccgatgaaatagttatcaagtttgtaggaaaggacaaagtttcacatgaatttgttgttcataagtctaatagactatataaaccgctattgaaactgacggatgattctagtcccgaagaatttctgttcaacaaactaagtgaacgaaaggtatacgaatgtatcaaacagtttggtattagaatcaaggatctccgaacgtatggagtcaattatacgtttttatataatttttggacaaatgtaaagtccatatctcctcttccgtcaccaaaaaagttaatagcgttaactatcaaacaaactgctgaagtggtaggtcatactccatcaatttcaaaaagagcttatatggcaacgactattttagaaatggtaaaggataaaaattttttagatgtagtatctaaaactacgttcgatgaattcctatctatagtcgtagatcacgttaaatcatctacggatggatgatatagatctttacacaaataattacaagaccgataaatggaaatggataagcgtataaaatctctcgcaatgaccgctttctttggggagctaagcacattagatattatggcattgataatgtctatatttaaacgccatccaaacaataccattttttcagtggataaggatggtcagtttatgattgatttcgaatacgataattataaggcttctcaatatttggatctgaccctcactccgatatttggagatgaatgcaagactcacgcatcgagtatagccgaacaattggcgtgtgcggatattattaaagaggatattagcgaatacatcaaaactactccccgtcttaaacgatttataaaaaaataccgcaatagatcagatactcgtatcagtcgagatacagaaaagcttaaaatagctctagctaaaggcatagattacgaatatataaaagacgcttgttaataagtaaatgaaaaaaaactagtcgtttataataaaacacgatatggatgccaacgtagtatcatcttctactattgcgacgtatatagacgctttagcgaagaatgcttcagaattagaacagaggtctaccgcatacgaaataaataatgaattggaactagtatttattaagccgccattgattactttgacaaatgtagtgaatatctctacgattcaggaatcgtttattcgatttaccgttactaataaggaaggtgttaaaattagaactaagattccattatctaaggtacatggtctagatgtaaaaaatgtacagttagtagatgctatagataacatagtttgggaaaagaaatcattagtgacggaaaatcgtcttcacaaagaatgcttgttgagactatcgacagaggaacgtcatatatttttggattacaagaaatatggatcctctatccgactagaattagtcaatcttattcaagcaaaaacaaaaaactttacgatagactttaagctaaaatattttctaggatccggtgcccaatctaaaagttctttgttgcacgctattaatcatccaaagtcaaggcctaatacatctctggaaatagaattcacacctagagacaatgaaacagttccatatgatgaactaataaaggaattgacgactctctcgcgtcatatatttatggcttctccagagaatgtaattctttctccgcctattaacgcgcctataaaaacctttatgttgcctaaacaagatatagtaggtttggatctggaaaatctatatgccgtaactaagactgacggcattcctataactatcagagttacatcaaacgggttgtattgttattttacacatcttggttatattattagatatcctgttaagagaataatagattccgaagtagtagtctttggtgaggcagttaaggataagaactggaccgtatatctcattaagctaatagagcccgtgaatgctatcagtgatagactagaagaaagtaagtatgttgaatctaaactagtggatatttgtgatcggatagtattcaagtcaaagaaatacgaaggtccgtttactacaactagtgaagtcgtcgatatgttatctacatatttaccaaagcaaccagaaggtgttattctgttctattcaaagggacctaaatctaacattgattttaaaattaaaaaggaaaatactatagaccaaactgcaaatgtagtatttaggtacatgtccagtgaaccaattatctttggagaatcgtctatctttgtagagtataagaaatttagcaacgataaaggctttcctaaagaatatggttctggtaagattgtgttatataacggcgttaattatctaaataatatctattgtttggaatatattaatacacataatgaagtgggtattaagtccgtggttgtacctattaagtttatagcagaattcttagttaatggagaaatacttaaacctagaattgataaaaccatgaaatatattaactcagaagattattatggaaatcaacataatatcatagtcgaacatttaagagatcaaagcatcaaaataggagatatctttaacgaggataaactatcggatgtgggacatcaatacgccaataatgataaatttagattaaatccagaagttagttattttacgaataaacgaactagaggaccgttgggaattttatcaaactacgtcaagactcttcttatttctatgtattgttccaaaacatttttagacgattccaacaaacgaaaggtattggcgattgattttggaaacggtgctgacctggaaaaatacttttatggagagattgcgttattggtagcgacggatccggatgctgatgctatagctagaggaaatgaaagatacaacaaattaaactctggaattaaaaccaagtactacaaatttgactacattcaggaaactattcgatccgatacatttgtctctagtgtcagagaagtattctattttggaaagtttaatatcatcgactggcagtttgctatccattattcttttcatccgagacattatgctaccgtcatgaataacttatccgaactaactgcttctggaggcaaggtattaatcactaccatggacggagacaaattatcaaaattaacagataaaaagacttttataattcataagaatttacctagtagcgaaaactatatgtctgtagaaaaaatagctgatgatagaatagtggtatataatccatcaacaatgtctactccaatgactgaatacattatcaaaaagaacgatatagtcagagtgtttaacgaatacggatttgttcttgtagataacgttgatttcgctacaattatagaacgaagtaaaaagtttattaatggcgcatctacaatggaagatagaccgtctacaaaaaactttttcgaactaaatagaggagccattaaatgtgaaggtttagatgtcgaagacttacttagttactatgttgtttatgtcttttctaagcggtaaataataatatggtatgggttctgatatccccgttctaaatgcattaaataattccaatagagcgatttttgttcctataggaccttccaactgtggatactctgtattgttaatagatatattaatacttttgtcgggtaacagaggttctacgtcttctaaaaataaaagttttataacatctggcctgttcataaataaaaacttggcgattctatatatactcttattatcaaatctagccattgtcttatagatgtgagctactgtaggtgtaccatttgattttctttctaatactatatatttctctcgaagaagttcttgcacatcatctgggaataaaatactactgttgagtaaatcagttattttttttatatcgatattgatggacatttttatagttaaggataataagtatcccaaagtcgataacgacgataacgaagtatttatacttttaggaaatcacaatgactttatcagattaaaattaacaaaattaaaggagcatgtatttttttctgaatatattgtgactccagatacatatggatctttatgcgtcgaattaaatgggtctagttttcagcacggtggtagatatatagaggtggaggaatttatagatgctggaagacaagttagatggtgttctacatccaatcatatatctaaagatatacccgaagatatgcacactgataaatttgtcatttatgatatatacacttttgacgctttcaagaataaacgattggtattcgtacaggtacctccgtcgttaggagatgatagtcatttgactaatccgttattgtcaccgtattatcgtaattcagtagccagacaactggtcaataatatgatttttaatcaagattcatttttaaaatatttattagaacatctgattagaagccactatagagtttctaaacatataacaatagttagatacaaggataccgaagaattaaatctaacgagaatatgttataatagagataagtttaaggcgtttgtattcgcttggtttaacggcgtttcggaaaatgaaaaggtactagatacgtataaaaaggtatctaatttgatataatgaattcagtgactgtatcacacgcgccatatactattacttatcacgatgattgggaaccagtaatgagtcaattggtagagttttataacgaagtagctagttggctgctacgagacgagacgtcgcctattcctgataagttctttatacagttgaaacaaccgcttagaaataaacgagtatgtgtgtgcggtatagatccgtatccgaaagatggaactggtgtaccgttcgaatcaccaaattttacaaaaaaatcaattaaggagatagcttcatctatatctagattaaccggagtaattgattataaaggttataaccttaatataatagacggggttataccctggaattattacttaagttgtaaattaggagaaacaaaaagtcacgcgatctactgggataaaatttctaagttactgctgcagcatataactaaacacgttagtgttctttattgtttgggtaaaacagatttctcgaatatacgggccaagttagaatccccggtaactaccatagtcggatatcatccagcggctagagaccgccaattcgagaaagatagatcatttgaaattatcaacgttttactggaattagacaacaaggcacctataaattgggctcaagggtttatttattaatgctttagtgaaattttaacttgtgttctaaatggatgcggctattagaggtaatgatgttatctttgttcttaagactataggtgtcccgtcagcgtgcagacaaaatgaagatccaagatttgtagaagcatttaaatgcgacgagttagaaagatatattgagaataatccagaatgtacactattcgaaagtcttagggatgaggaagcatactctatagtcagaattttcatggatgtagatttagacgcgtgtctagacgaaatagattatttaacggccattcaagattttattatcgaggtgtcaaactgtgtagctagattcgcgtttacagaatgcggcgccattcatgaaaatgtaataaaatccatgagatctaatttttcattgactaagtctacaaatagagataaaacaagttttcatattatctttttagatacgtataccactatggatacattgatagctatgaaacgaacactattagaattaagtagatcatctgaaaatccactaaccagatcgatagacactgccgtatataggagaaaaacaactcttcgggttgtaggtactaggaaaaatccaaattgcgacactattcatgtaatgcaaccaccgcatgataatatagaagattacctattcacttacgtggatatgaacaacaatagttattacttttctctacaacaacgattggaggatttagttcctgataagttatgggaaccagggtttatttcattcgaagacgctataaaaagagtttcaaaaatattcattaattctataataaactttaatgatctcgatgaaaataattttacaacggtaccactggtcatagattacgtaacaccttgtgcattatgtaaaaaacgatcgcataaacatccgcatcaactatcgttggaaaatggtgctattagaatttacaaaactggtaatccacatagttgtaaagttaaaattgttccgttggatggtaataaactgtttaatattgcacaaagaattttagacactaactctgttttattaaccgaacgaggagaccatatagtttggattaataattcatggaaatttaacagcgaagaacccttgataacaaaactaattttgtcaataagacatcaactacctaaggaatattcaagcgaattactctgtccgaggaaacgaaagactgtagaagctaacatacgagacatgttagtagattcagtagagaccgatacctatccggataaacttccgtttaaaaatggtgtattggacctggtagacggaatgttttactctggagatgatgctaaaaaatatacgtgtactgtatcaaccggatttaaatttgacgatacaaagttcgtcgaagacagtccagaaatggaagagttaatgaatatcattaacgatatccaaccattaacggatgaaaataagaaaaatagagagctatatgaaaaaacattatctagttgtttatgcggtgctaccaaaggatgtttaacattcttttttggagaaactgcaactggaaagtcgacaaccaaacgtttgttaaagtctgctatcggtgacctgtttgttgagacgggtcaaacaattttaacagatgtattggataaaggacctaatccatttatcgctaacatgcatttgaaaagatctgtattctgtagcgaactacctgattttgcatgtagtgggtcaaagaaaatcagatctgataatattaaaaagttgacagaaccttgtgtcattggaagaccgtgtttctccaataaaattaataatagaaaccatgcgacaatcattatcgatactaattacaaacctgtttttgataggatagataacgcattaatgagaagaattgccgtcgtgcgattcagaacacacttttctcaaccttctggtagagaggctgctgaaaataatgacgcgtacgataaagtcaaactattagacgaggggttagatggtaaaatacaaaataatagatatagatttgcatttctatacttgttggtgaaatggtacagaaaatatcatgttcctattatgaaactatatcctacaccggaagagattcctgactttgcattctatctcaaaataggtactctgttagtatctagctctgtaaagcatattccattaatgacggacctctccaaaaagggatatatattgtacgataatgtggtcactcttccgttgactactttccaacagaaaatatccaagtattttaattctagactatttggacacgatatagagagcttcatcaatagacataagaaatttgccaatgttagtgatgaatatctgcaatatatattcatagaggatatttcatctccgtaaatatatgctcatatatttatagaagatatcacatatctaaatgaataccggaatcatagatttatttgataatcatgttgatagtataccaactatattacctcatcagttagctactctagattatctagttagaactatcatagatgagaacagaagcgtgttattgttccatattatgggatcaggtaaaacaataatcgctttgttgttcgccttggtagcttccagatttaaaaaggtttacattctagtgccgaacatcaacatcttaaaaattttcaattataatatgggtgtagctatgaacttgtttaatgacaaattcatagctgagaatatctttattcattccacaacaagtttttattctcttaattataacgataacgtcattaattataacggattatctcgctacaataactctatttttatcgttgatgaggcacataatatctttgggaataatactggagaacttatgaccgtgataaaaaataaaaacaagattccttttttactattgtctggatctcccattactaacacacctaatactctgggtcatattatagatttaatgtccgaagagacgatagattttggtgaaattattagtcgtggtaagaaagtaattcagacacttcttaacgaacgcggtgtgaatgtacttaaggatttgcttaaaggaagaatatcatattacgaaatgcctgataaagatctaccaacgataagatatcacggacgtaagtttctagatactagagtagtatattgtcacatgtctaaacttcaagagagagattatatgattactagacgacagctatgttatcatgaaatgtttgataaaaatatgtataacgtgtcaatggcagtattgggacaacttaatctgatgaataatttagatactttatttcaggaacaggataaggaattgtacccaaatctgaaaataaataatggcgtgttatacggagaagaattggtaacgttaaacattagttccaaatttaaatactttattaatcggatacagacactcaacggaaaacattttatatacttttctaattctacatatggcggattggtaattaaatatatcatgctcagtaatggatattctgaatataatggttctcagggaactaatccacatatgataaacggcaaaccaaaaacatttgctatcgttactagtaaaatgaaatcgtctttagaggatctattagatgtgtataattctcctgaaaacgatgatggtagtcaattgatgtttttgttttcgtcaaacattatgtccgaatcctatactctgaaagaggtaaggcatatttggtttatgactatcccagatactttttctcaatacaaccaaattcttggacgatctattagaaaattctcttacgccgatatttctgaaccagttaatgtatatcttttagccgccgtatattccgatttcaatgacgaagtgacgtcattaaacgattacacacaggatgaattaattaatgttttaccatttgacatcaaaaagctgttatatctaaaatttaagacgaaagaaacgaatagaatatactctattcttcaagagatgtctgaaacgtattctcttccaccacatccatcaattgtaaaagttttattgggagaattggtcagacaatttttttataataattctcgtattaagtataacgataccaagttacttaaaatggttacatcagttataaaaaataaagaagacgctaggaattacatagatgatattgtaaacggtcacttctttgtatcgaataaagtatttgataaatctcttttatacaaatacgaaaacgatattattacagtaccgtttagactttcctacgaaccatttgtttggggagttaactttcgtaaagaatataacgtggtatcttctccataaaactgatgagatatataaagaaataaatgtcgagctttgttaccaatggatacctttccgttacattggaacctcatgagctgacgttagacataaaaactaatattaggaatgccgtatataagacgtatctccatagagaaattagtggtaaaatggccaagaaaatagaaattcgtgaagacgtggaattacctctcggcgaaatagttaataattctgtagttataaacgttccgtgtgtaataacctacgcgtattatcacgttggggatatagtcagaggaacattaaacatcgaagatgaatcaaatgtaactattcaatgtggagatttaatctgtaaactaagtagagattcgggtactgtatcatttagcgattcaaagtactgcttttttcgaaatggtaatgcgtatgacaatggcagcgaagtcactgccgttctaatggaggctcaacaaggtatcgaatctagttttgtttttctcgcgaatatcgtcgactcataagaaagagaatagcggtaagtataaacacgaatactatggcaataattgcgaatgttttattctcttcgatatatttttgataatatgaaaaacatgtctctctcaaatcggacaaccatctcataaaatagttctcgcgcgctggagaggtagttgccgctcgtataatctccccagaataatatacttgcgtgtcgtcgttcaatttatacggatttctatagttctctgttatataatgcggttttccatcatgattagacgacgacaatagtgttctaaatttagatagttgatcagaatgaatgtttattggcgttggaaaaattatccatacagcgtctgcagagtggttgatagttgttcctagatatgtaaaataatccaacttactaggcagcaaattgtctagataaaatactgaatcaaacggtgcagacgtattggcggatctaatggaatccaattgattaactatcttttgaaaatatacatttttatgatccaatacttgtaagaatatagaaataatgataagtccatcatcgtgtttttttgcctcttcataagaactatattttttcttattccaatgaacaagattaatctctccagagtatttgtacacatctatcaagtgattggatccataatcgtcttcctttccccaatatatatgtagtgatgataacacatattcattggggagaaaccctccacttatatatcctcctttaaaattaatccttactagttttccagtgttctggatagtggttggtttcgactcattataatgtatgtctaacggcttcaatcgcgcgttagaaattgcttttttagtttctatattaataggagatagttgttgcggcatagtaaaaatgaaatgataactgtttaaaaatagctcttagtatgggaattacaatggatgaggaagtgatatttgaaactcctagagaattaatatctattaaacgaataaaagatattccaagatcaaaagacacgcatgtgtttgctgcgtgtataacaagtgacggatatccgttaataggagctagaagaacttcattcgcgttccaggcgatattatctcaacaaaattcagattctatctttagagtatccactaaactattacggtttatgtactacaatgaactaagagaaatctttagacggttgagaaaaggttctatcaacaatatcgatcctcactttgaagagttaatattattgggtggtaaactagataaaaaggaatctattaaagattgtttaagaagagaattaaaagaggaaagtgatgaacgtataacagtaaaagaatttggaaatgtaattctaaaacttacaacacgggataaattatttaataaagtatatataagttattgcatggcgtgttttattaatcaatcgttggaggatttatcgcatactagtatttacaatgtagaaattagaaagattaaatcattaaatgattgtattaacgacgataaatacgaatatctgtcttatatttataatatgctagttaatagtaaatgaacttttacagatctagtataattagtcagattattaagtataatagacgactagctaagtctattatttgcgaggatgactctcaaattattacactcacggcattcgttaaccaatgcctatggtgtcataaacgagtatccgtgtccgctattttattaactactgataacaaaatattagtatgtaacagacgagatagttttctctattctgaaataattagaactagaaacatgtttagaaagaaacgattatttctgaattattccaattatttgaacaaacaggaaagaagtatactatcgtcatttttttctctagatccagctactactgataatgatagaatagacgctatttatccgggtggcatacccaaaaggggtgagaatgttccagagtgtttatccagggaaattaaagaagaagttaatatagacaattcttttgtattcatagacactcggttttttattcatggcatcatagaagataccattattaataaattttttgaggtaatcttctttgtcggaagaatatctctaacgagtgatcaaatcattgatacatttaaaagtaatcatgaaatcaaggatctaatatttttagatccgaattcaggtaatggactccaatacgaaattgcaaaatatgctctagatactgcaaaacttaaatgttacggccatagaggatgttattacgaatcattaaaaaaattaactgaggatgattgattagaaaatataaattaatttaccatcgtgtatttttataacgggattgtccggcatatcatgtagatagttaccgtctacatcgtatactcgaccatctacgcctttaaatcctctatttattgacattaatctattagaattggaataccaaatattagtaccctcaattagtttattggtaatattttttttagacgatagatcgatggctcttgaaaccaaggttttccaaccggactcattgtcgatcggtgagaagtctttttcattagcatgaatccattctaatgatgtatgtttaaacactctaaacaattggacaaattcttttgatttgctttgaatgatttcaaataggtcttcgtctacagtaggcataccattagataatctagccattataaagtgcacgtttacatatctacgttctggaggagtaagaacgtgactattgagacgaatggctcttcctactatctgacgaagagacgcctcgttccatgtcatatctaaaatgaagatatcattaattgagaaaaaactaataccctcgcctccactagaagagaatacgcatgttttaatgcattctccgttagtgtttgattcttggttaaactcagccaccgccttgattctagtatcttttgttctagatgagaactctatattagagataccaaagactttgaaatatagtaataagatttctattcctgactgattaacaaatggttcaaagactagacatttaccatgggatgctaatattcccaaacatacatctataaatttgacgcttttctcttttaattcagtaaatagagagatatcagccgcactagcatcccctttcaatagttctccctttttaaaggtatctaatgcggatttagaaaactctctatctcttaatgaatttttaaaatcattatatagtgttgctatctcttgcgcgtattcgcccggatcacgattttgtctttcaggaaagctatcgaacgtaaacgtagtagccatacgtctcagaattctaaatgatgatatacctgtttttatttcagcgagtttagccttttgataaatttcttcttgctttttcgacatattaacgtatcgcattaatactgttttcttagcgaatgatgcagacccttctacgtcatcaaaaatagaaaactcgttattaactatatacgaacatagtcctcctagtttggagactaattctttttcatcgactagacgtttattctcaaatagtgattggtgttgtaaggatcctggtcgtagtaagttaaccaacatggtgaattcttgcacactattgacgataggtgtagccgataaacaaatcatcttatggttttttaacgcaatggtcttagataaaaaattatatactgaacgagtaggacggatcttaccatcttctttgattaatgatttagaaatgaagttatgacattcatcaatgatgacgcatattctactcttggaattaatagttttgatattagtaaaaaatttatttctaaaattttgatcatcgtaattaataaaaatacaatccttcgttatctctggagcgtatctgagtatagtgttcatccaaggatcttctatcaaagcctttttcaccaataagataatagcccaattcgtataaatatccttaagatgtttgagaatatatacagtagtcattgttttaccgacacccgtttcatggaacaataaaagagaatgcatactgtctaatcctaagaaaactcttgctacaaaatgttgataatccttgaggcgtactacgtccgaccccatcatttcaacgggcatattagtagttctgcgtaaggcataatcgatataggccgcgtgtgatttactcatttatgagtgataagtaataactatgttttaaaaatcacagcagtagtttaactagtcttctctgatgtttgttttcgatactttttgaatcagaagtcatactagaataaagcaacgagtgaacgtaatagagagcttcgtatactctattcgaaaactctaagaacttattaatgaattccgtatccactggattgtttaaaatactaaattgaacactgttcacatccttccaagaagaagacttagtgacggacttaacatgagacataaataaatccaaattttttttacaaacatcactagccaccataatggcgctatctttcaaccagctatcgcttacgcattttagcagtctaacatttttaaagagactacaatatattctcatagtatcgattacacctctaccgaataaagttggaagtttaataatacaatatttttcgtttacaaaatcaaataatggtcgaaacacgtcgaaggttaacatcttataatcgctaatgtatagattgttttcagtgagatgattattagatttaatagcatctcgttcacgtttgaacagtttattgcgtgcgctgaggtcggcaactacggcgtccgctttagtactcctcccataatactttacgctattaatctttaaaatttcatagactttatctagatcgctttctggtaacatgatatcatgtgtaaaaagttttaacatgtcggtcggcattctatttagatcattaactctagaaatctgaagaaagtaattagctccgtattccagactaggtaatgggcttttacctagagacagattaagttctggcaatgtttcataaaatggaagaaggacatgcgttccctcccggatattttttacaatttcatccatttacaactctatagtttgttttcattattattagttattatctcccataatcttggtaatacttaccccttgatcgtaagataccttatacaggtcattacatacaactaccaattgtttttgtacataatagattggatggttgacatccatggtggaataaactactcgaacagatagtttatctttccccctagatacattagccgtaatagttgtcggcctaaagaatatctttggtgtaaagttaaaagttagggttcttgttccattattgctttttgtcagtagttcattataaattctcgagatgggtccgttctctgaatatagaacatcatttccaaatctaacttctagtctagaaataatatcggtcttattcttaaaatctattcccttgatgaagggatcgttaatgaacaaatccttggcctttgattcggctgatctattatctccgttatagacgttacgttgactagtccaaagacttacaggaatagatgtatcgatgatgttgatactatgtgatatgtgagcaaagattgttctcttagtggcatcactatatgttccagtaatggcggaaaactttttagaaatgttatatataaaagaattttttcgtgttccaaacattagcagattagtatgaagataaacactcatattatcaggaacattatcaatttttacatacacatcagcatcttgaatagaaacgataccatcttctggaacctctacgatctcggcagactccggataaccagtcggtgggccatcgctaacaataactagatcatccaacaatctactcacatatgcatctatataatctttttcatcttgtgagtaccctggatacgaaataaatttattatccgtatttccataataaggtttagtataaacagagagagatgttgccgcatgaacttcagttacagtcgccgttggttggtttatttgacctattactctcctaggtttctctataaacgatggtttaatttgtacattcttaaccatatatccaataaagctcaattcaggaacataaacaaattctttgttgaacgtttcaaagtcgaacgaagagtcacgaataacgatatcggatactggattgaaggttaccgttacggtaatttttgaatcggatagtttaagactgctgaatgtatcttccacatcaaacggagttttaatataaacgtatactgtagatggttctttaatagtgtcattaggagttaggccaatagaaatatcattaagttcactagaatatccagagtgtttcaaagcaattgtattattgatacaattattatataattcttcgccctcaatttcccaaataacaccgttacacgaagagatagatacgtgattaatacatttatatccaacatatggtacgtaactgaatcttcccatacctttaacttctggaagttccaaactcagaaccaaatgattaagcgcagtaatatactgatccctaatttcgaagctagcgatagcctgattgtctggaccatcgtttgtcataactccggatagagaaatatattgcggcatatataaagttggaatttgactatcgactgcgaagacattagaccgtttaatagagtcatccccaccgatcaaagaattaatgatagtattattcattttctatttaaaatggaaaaagcttacaataaactccgtagagaaatatctataatttgtgagttttccttaaagtaacagcttccgtaaacgccgtctttatctcttagtaggtttattgtatttatgaccttttccttatcttcatagaatactaaaggcaacaaagaaatttttggttcttctctaagagctacgtgagacttaaccatagaagccaacgaatccctacatattttagaacagaaataccctacttcaccacccttgtatgtctcaatactaataggtctaaaaaccaaatcttgattacaaaaccaacacttatcaattacactatttgtcttaatagacacatctgccatagatttataatactttggtagtatacaagcgagtgcttcttctttagcgggcttaaagactgctttaggtgctgaaataaccacatctggaaggcttactcgcttagccatttaattacggaactatttttttatacttctaatgagcaagtagaaaacctctcatctacaaaaacgtactcgtgtccataatcctctaccatagttacacgttttttagatctcatatgtgctaaaaagttttcccatactaattggttactattatttttcgtataatttttaacagtttgaggttttagatttttagttacagaagtgatatcgaatattttatccaaaaagaatgaataattaattgtcttagaaggagtgttttcttggcaaaagaataccaagtgcttaaatatttctactacttcattaatcttttctgtactcagattcagtttctcatcttttacttgattgattatttcaaagactaacttataatcctttttatttattctctcgttagccttaagaaaactagatacaaaatttgcatctacatcatccgtggatatttgatttttttccatgatatccaagagttccgagataatttctccagaacattgatgagacaataatctccgcaatacatttctcaaatgaataagtttattagacacgtggaagtttgactttttttgtacctttgtacatttttgaaatacagactcgcaaaaaatacaatattcatatccttgttcagatactataccgttatgtctacaaccgctacataatcgtagattcatgttaacactctacgtatctcgtcgtccaatattttatataaaaacattttatttctagacgttgccagaaaatcctgtaatatttttagttttttgggctgtgaataaagtatcgccctaatatggttaccgtcctccgccaatatagtagttaaattatccgcacatgcagaagaacaccgcttaggcggattcagtacaatgttatatttttcgtaccaactcatttaaatatcataatctaaaatagttctgtaatatgtctagcgctaatatattgatcataatcctgtgcataaattaagatacaacaatgtctcgaaatcatcgacatggcttcttccatagttagaagatcgtcgtcaaagttagcaacgtgattcatcaacatttgctgttttgaggcagcaaatactgaaccgtcgccattcaaccattcataaaaaccatcgtctgaatccattgataatttcttgtactggtttttgagagctcgcatcaatctagcatttctagctcccggattgaaaacagaaagaggatcgtacatccagggtccattttctgtaaatagaatcgtataatgtcccttcaagaagatatcagacgatccacaatcaaagaattggtctccgagtttgtaacaaactgcggactttaacctatacatgataccgtttagcataatttctggtgatacgtcaatcggagtatcatctattagagatctaaagccggtgtaacattctccaccaaacatattcttattctgacgtcgttctacataaaacatcattgctccattaacgataacaggggaatgaacagcactacccatcacattagttcccaatggatcaatgtgtgtaactccagaacatcttccatagcctatgttaggaggagcgaacaccactcttccactattgccatcgaatgccatagaataaatatccttggaattgatagaaatcggactgtcggatgttgtgatcatcttcataggattaacaactatgtatggtgccgcctgaagtttcatatcgtaactgatgccgtttataggtctagccacagaaaccaacgtaggtctaaatccaactatagacaaaatagaagccaatatctgttcctcatctgtcataacttgagagcatccagtatgaataatcttcattagatggggatctaccgcatcatcatcgttacaataaaaaattcccattctaatgttcataattgcttttctaatcatggtatgcatgtttgctctctgaatctctgtggaaattagatctgatacacctgtaatcactatcggattatcctccgtaagacgattaaccaacaacatataattataagactttacttttctaaattcataaagttgctggattaggctataggtgtctccatgtacatacgcgttctcgagcgcaggaagtttaataccgaatagtgccatcagaataggatgaatatagtaattagtttctggttttctataaataaaagacaaatcttgtgaactagacatatcggtaaaatgcatggattggaatcgtgtagtcgacagaagaatatgatgattagatggagagtatattttatctaactctttgagttggtcaccgattctaggactagctcgagaatgaataagtactaaaggatgagtacatttcacagaaacactagcattgttcaatgtgctctttacatgggtaaggagttgaaatagctcgtttctatttgttctgacaatatttagtttattcataatgttaagcatatcctgaatagtaaagttagatgtgtcatacttgttagtagttagatatttagcaattgcattcccatcatttctcaatctcgtactccaatcatgtgtagatgctacttcgtcgatggaaaccatacaatcctttttgataggctgttgagattgatcatttcctgcacgtttaggtttggtacgttgatttctagcccctgcggatataaagtcatcgtctacaatttgggacaatgaattgcatacactacaagacaaagatttatcagaagtgtgaatatgatcttcatctaccaaagaaagagtttgattagtataactagattttagtcctgcgttagatgttaaaaaaacatcgctattgaccacggcttccattatttatattcgtagtttttactcgaaagcgtgattttaatatccaatcttattacttttggaatcgttcaaaacctttgactagttgtagaatttgatctattgccctacgcgtatactcccttgcatcatatacgttcgtcaccagatcgtttgtttcggcctgaagttggtgcatatctctttcaacattcgacatgagatccttaagggccatatcgtctagattttgttgagatgctgctcctggatttggattttgttgtgctgttgtacatactgtaccaccagtaggtgtaggagtacatacagtggccacaataggaggttgagaaagtgtaaccgttggagtagtacaagaaatacttccatccgattgttgtgtacatgtagttgttggtaacgtctgagaaggttgggtagatggcggcgtcgtcgttttttgatctttattaaatttagagataatatcctgaacagcattgctcggcgtcaacgctggaaggagtgaactcgccggcgcatcagtatcttcagacagccaatcaaaaagattagacatatcagatgatgtattagtttgttgtcgtggttttggtgtaggagcagtactactaggtagaagaataggagccgatgtagctgttggaaccggctgtggagttatatgaatagttggttgtagcggttggataggctgtctgctggcggccatcatattatctctagctagttgttctcgcaactgtctttgataatacgactcttgagactttagtcctatttcaatcgcttcatcctttttcgtatccggatccttttcttcagaataatagattgacgactttggtgtagaggattctgccagcctctgtgagaacttgttaaagaagtccatttaaggctttaaaattgaattgcgattataagattaaatggcagacacagacgatattatcgactatgaatccgatgatctcaccgaatacgaggatgatgaagaagaggaagaagatggagagtcactagaaactagtgatatagatcccaaatcttcttataagattgtagaatcagcatccactcatatagaagatgcgcattccaatcttaaacatatagggaatcatatatctgctcttaaacgacgctatactagacgtataagtctatttgaaatagcgggtataatagcagaaagctataacttgcttcaacgaggaagattacctctagtttcagaattttctgacgaaacgatgaagcaaaatatgctacatgtaattatacaagagatagaggagggttcttgtcctatagtcatcgaaaagaacggagaattgttgtcggtaaacgattttgacaaagatggtctaaaattccatctagactatattatcaaaatttggaaacttcaaaaacgatattagaatttatacgaatatcgttctctaaatgtcacaatcaagtctcgcatgttcagcaatttattgtcgtactttatatcgtgttcattaacgatatcttgcaaaatagtaatgattctatcttccttcgatagatattcttcagagattattgtcttatattctttcttgttatcagatatgaatttgataagactttgaacattattgatacccgtctgtttaattttttctacagatattttagttttggcagattctatcgtatctgtcaatagacatccaacatcgacattcgacgtcaattgtctataaatcaacgtataaattttagaaataacattagcgaattgttgtgcgttgatgtcgttattctgaaacagtatgattttaggtagcattttcttaacaaagagaacgtatttattgttactcagttgaacagatgatatatccagattactaacgcatctgattccgtataccaaactttcagaagaaatggtatacaattgtttgtattcattcaatgtctctttttcagaaattagtttagagtcgaatactgcaataattttcaagagatagttttcatcagataagattttatttagtgtagatatgataaaactattgttttgttggagaacttgatacgccgcgttctctgtagtcgacgctctcaaatgggaaacaatctccattatttttttggaatcggatactatatcttcggtatcttgacgcagtctagtatacatagagttaagagagattagagtttgtacattaagcaacatgtctctaaatgtggctacaaacttttcctttttcacatcatctagtttattatataccgatttcacaacggcaccagatttaaggaaccagaatgaaaaactctgataactacaatatttcatcatagttacgattttatcatcttctatagttggtgtaatagcgcatacctttttctccaagactggaaccaacgtcataaaaatgtttaaatcaaaatccatatcaacatctgatgcgctaagaccagtctcgcgttcaagattatctttactaatggtgacgaactcatcgtataaaactctaagtttgtccattatttatttacagatttagttgtttaatttatttgtgctcttccagagttgggatagtatttttctaacgtcggtattatattattaggatctacgttcatatgtatcataatattaatcatccacgttttgataaatctatctttagcttctgaaataacgtatttaaacaaaggagaaaaatatttagctacggcatcagacgcaataacattttttgtaaatgtaacgtatttagacgacagatcttcgttaaaaagttttccatctatgtagaatccatcggttgttaacaccattcccgcgtcagattgaataggagtttgaatagtttgttttggaaatagatccttcaataacttatagttgggtgggaaaaaatcgattttatcactagactctttcttttttactatcattacctcatgaactatttcttgaatgagtatatgtattttctttcctatatcggacgcgttcattggaaaatataccatgtcgttaactataagaatatttttatcctcgtttacaaactgaataatatcagatgtagttcgtaaacgaactatatcatcaccagcacaacatctaactatatgatatccactagtttcctttagccgtttattatcttgttccatattagcagtcattccatcatttaagaaggcgtcaaagataatagggagaaatgacattttggattctgttacgactttaccaaaattaaggatatacggacttactatctttttctcaacgtcaatttgatgaacacacgatgaaaatgtgcttctatgagattgatcatgtagaaaacaacaagggatacaatatttccgcatatcatgaaatatattaagaaatcccaccttattatatttccccaaaggatccatgcacgtaaacattatgccgttatcattaataaagacttctttctcatcggatctgtaaaagttgttactgatttttttcattccaggatctagataattaataatgatgggttttctattcttattctttgtattttggcatatcctagaccagtaaacagtttccactttggtaaaatcagcagacttttgaacgctattaaacatggcattaatggcaataactaaaaatgtaaaatatttttctatgttaggaatatggtttttcactttaatagatatatggtttttggccaaaatgatagatatttttttatccgaggatagtaaaatattattagtcgccgtctctataaaaatgaagctagtctcgatatccaattttattctagaattgataggagtcgccaaatgtaccttatacgttatatctcccttgatgcgttccatttgtgtatctatatcggacacaagatctgtaaatagttttacgttattaatcatcacggtatcgccgtcgctagataacgctaatgtaccatccaagtcccaaatggagagatttaactgttcatcgtttagaataaaatgattaccggtcatattaataaagtgttcatcgtatctagataacaacgacttataattaatgtccaagtcttgaactcgctgaatgatcttttttaacccagttagttttagattggtacgaaatatattgttaaactttgattctacagtaatgtccaaatctagttgtggaaatacttccatcaacattgtttcaaacttgataatattattatctacatcttcgtacgatccaaattccggaatagatgtatcgcacgctctggccacccagataaccaaaaagtcacacgctccaggatatacattgtataaaaagctatcgtttttaagtagggtttttttctgcgtgtatacgaagggattaaaaatagtattatcaacgtaactatattccaaattattcttatgagaatagataataatatcgtccttaatatctaacaaatttcctaaatatccctttaattgagtcattcgaagcgtcaatagaatatgtctcttaactatttccggctgttgtatatttaaatgacttcgtaaaaaataatatatgggcgacttctcatctatgtaatcatatggagtgagatatagggctcgttctacctcctgccccttacccacctgtaataccaattgcggacttactatatatcgcatatttatatcgtggggtaaagtgaaaatctactaccgatgatgtaagtcttacaatgttcgaaccagtaccagatcttaatttggaggcctccgtagaactaggggaggtaaatatagatcaaacaacacctatgataaaggagaatagcggttttatatcccgcagtagacgtctattcgcccatagatctaaggatgatgagagaaaactagcactacgattctttttacaaagactttattttttagatcatagagagattcattatttgttcagatgcgttgacgctgtaaaagacgtcactattaccaaaaaaaataacattatcgtggcgccttatatagcacttttaactatcgcatcaaaaggatgcaaacttacagaaacaatgattgaagcattctttccagaactatataatgaacatagtaagaaatttaaattcaactctcaagtatccatcatccaagaaaaactcggataccagtttggaaactatcacgtttatgattttgaaccgtattactctacagtagctctggctattcgagatgaacattcatctggcatttttaatatccgtcaagagagttatctggtaagttcattatctgaaataacatatagattttatctaattaatctaaaatctgatcttgttcaatggagtgctagtacgggcgctgtaattaatcaaatggtaaatactgtattgattacagtgtatgaaaagttacaactggtcatagaaaatgattcacaatttacatgttcattggctgtggaatcaaaacttccaataaaattacttaaagatagaaatgaattatttacaaaattcattaacgagttaaaaaagaccagttcattcaagataagcaaacgcgataaggatacgctactaaaatattttacttaggactggagttagaatttatagacgactcatttcgtttatcattgttactattattactattactatcattattagtgttggcattattagtattcttcttgtcatcttgttcagaaatatacagcaatgctatacctaatactaaatacattatcatgctcgcaatggctctaacaacaacgaaccaaaatgaatttggtcgtagcttttgttcacaaaaatacataaagaaatgtctacataaatctatggcgccattggctacttgaaatagcgccagtcctcctacagattttaatatagctgtataacatgacatttattcatcatcaaaagagacagagtcaccatctgtcatatttagattttttttcatgtgttcaaagtatcctctactcatttcattataatagtttatcatacttagaattttaggacggatcaatgagtaagacttgactagatcgtcagtagtaatttgtgcatcgtctattctgcatccgcttcgtcgaataatgtatagcatcgctttgagattctccatagctatcaagtctttatacaatgacatggaaatatctgtgaatactttatacttctccaacatcgatgccttaacatcatcgcctactttagcattgaaaatacgttctattgtgtagatggatgtagcaagatttttaaacaacaatgccatcttacacgatgattgcctcaagtctccaatcgtttgtttagaacgattagctacagagtccaatgcttggctgactagcatattattatctttagaaattgtattcttcaatgaggcgtttatcatatctgtgatttcgttagtcatattacagtctgactgggttgtaatgttatccaacatatcacctatggatacggtacacgtaccagcatttgtaataatcctatctaagatgttgtatggcattgcgcagaaaatatcttctcctgtaatatctccactctcgataaatctactcagattattcttaaatgccttattctctggagaaaagatatcagtgtccatcatttcattaatagtatacgcagaaaagataccacgagtatcaattctatccaagatacttatcggttccgagtcacagataatggtttcctctccttcgggagatcctgcatagaaatatctaggacaatagtttctatactgtctgtaactctgataatctctaaagtcactaactgataccatgaaattgagaagatcaaacgctgaagtaattaatttttctgcctcgtttttactacaactagttttcatcaatgtagtgacgatgtattgtttagttacttttggtctaatactgatgatagagatattattgcttcccataatggatcttctagtagtcaccttaaagcccattgatgcgaatagcagatagataaagtcttggtatgactcctttctaatatagtacggactacctttgtcacccaactttatacccacataagccataacaacctctttaatagccgtttcatgaggtttatcagccatgagcctgagtagttggaagaatctcatgaatcccgtctcagaaagtcctatatgcatgatagatttatctttcctgggaaactctcgtatagtcatagatgaaatactctttaaagtttctgaaataagattagtaacagtcttacctccgactactctaggtaacaaacaaactctaataggtgttttctctgcggagataatatcagaaaggatagagcaataagtagtattattgtgattataaagaccgaatacataacaggtagaatttataaacatcatgtcctgaaggtttttagacttgtattcctcgtaatccataccgtcccaaaacatggatttggtaactttgatagccgtagatctttgttccttcgccaacaggttaaagaaattaataaagaatttgttgtttctatttatgtccacaaattgcacgtttggaagcgccacggttacattcactgcagcattttgaggatcgcgagtatgaagtacgatgttattgtttactggtatatctggaaagaaatctaccagtctaggaataagagattgatatcgcatagaaatagtaaagtttataatctcatcatcgaagagcattttgttaccattgtaataaatatccactctgtcatatgtataaatgaagtactgttcaaacatgatgagatgtttatatgttggcatagtagtgagatcgacgtttggtaatggcaatgtattaagattaactccataatgtctagcagcatctgcgatgttataagcgtcgtcaaagcggggtcgatcttgtattgttatatattgtctaacacctataagattatcaaaatcttgtctgcttaatacaccgttaacaatttttgccttgaattcttttattggtgcattaataacatccttatagaggatgttaaacaaataagtgttatcaaagttaagatctggatatttcttttctgctagaacatccattgagtcggagccatctggtttaatataaccaccgataaatctagctctgtattctgtatccgtcaatctaatattaagaaggtgttgagtgaaaggtggaagatcgtaaaagctgtgagtattaatgataggattagtttccgaactaatgttaattggggtattaataatatctatatttccagcgttaagtgtaacattaaacagttttaattcacgtgacgtggtatcaattaaataattaatgcccaatttggatatagcagcctgaagctcatcttgtttagttacggatcctaatgagttattaagcaatatatcgaacggatgaacgaaggttgttttaagttggtcacatactttgtaatctagacatagatgcggaagaacggtagaaactatacgaaataaatattcagagtcctctaattgatcaagagtaactattgacttaataggcatcatttatttagtattaaatgacgaccgtaccagtgacggatatacaaaacgatttaattacagagttttcagaagataattatccatctaacaaaaattatgaaataactcttcgtcaaatgtctattctaactcacgttaacaacgtggtagatagagaacataatgccgccgtagtgtcatctccagaggaaatatcctcacaacttaatgaagatctatttccagatgatgattcaccggccactattatcgaacgagtacaacctcatactactattattgacgatactccacctcctacgtttcgtagagagttattaatatcggaacaacgtcaacaacgagaaaaaagatttaatattacagtatcgaaaaatgctgaagcaataatggaatctagatctatgataacttctatgccaacacaaacaccatccttgggagtagtttatgataaagataaaagaattcagatgttagaggatgaagtggttaatcttagaaatcaacgatctaatacaaaatcatctgataatttagataattttaccaaaatactatttggtaagactccgtacaaatcaacagaagttaataagcgtatagccatcgttaattatgcaaatttgaacgggtcccccttatcagtcgaggacttggatgtttgttcggaggatgaaatagatagaatctataaaacgattaaacaatatcacgaaagtagaaaacgaaaaattatcgtcactaacgtgattattattgtcataaacattatcgagcaggcattgctaaaactcggatttgaagaaatcaaaggactgagtaccgatatcacttcagaaattatcgatgtggagatcggagatgactgcgatgctgtagcatctaaactaggaatcggtaacagtccggttcttaatattgtattgtttatactcaagatattcgttaaacgaattaaaattatttaatttaatacattcccatatccagacaacaatcgtctggattaatctgttcctgtcgtctcataccggacgacatattaatctttttattagtgggcatctttttagatggtttctttttcccagcattaactgagtcgatacctagaagatcgtgattgatctctccgaccattccacgaacttctaattggccgtctctgacggtaccataaactattttaccagcattagtaacagcttggacaatctgaccatccatcgcattgtacgatgtagtagtaactgttgttctacgtctaggagcaccagaagtatttttggagcccttggatgttgatgtagaagaagacgaggattttgattttggtttacatgtaatacattttgaactctttgattttgtatcacatgcgccggcagtcacatctgtttgagaattaagattattgttgcctcctttgacggctgcatctccaccgatttgcgctagtagatttttaagctgtggtgtaatcttattaactgtttcgatataatcatcgtaactgcttctaacggctaaattttttttatccgccatttagaagctaaaaatatttttatttatgcagaagatttaactagattatacaatgaactaatatgatccttttccagattatttacaaacttggtattttttggttctggaggaggcgaatttaaattcggacttggattcggattttgtaagttcttgatcttattatacatcgagtataggatggcgacagtaactgctacacaaataccgatcaaaagaagaataccaatcatttattgacaataacttcactattgatcaagtatgcaatatatcatcttttcactaaataagtagtaataatgattcaacaatgtcgagatatatggacgataataatttagttcatggaaatatcgctatgattggtgtgaatgactccgctaactctgtggggtgcgcagtgctttccccacatagaataaattagcattccgactgtgataataataccaagtataaacgccataatactcaatactttccatgtacgagtgggactggtagacttactaaagtcaataaaggcgaagatacacgaaagaatcaaaagaatgattccagcgattagcacgccggaaaaataatttccaatcataagcatcatgtccatttaactaataaaaattttaaatcgccgaatgaacaaagtggaatataaaccatataaaaacaatagtttgtactgcaaaaataatatctatttttgttttcgaagatatggtaaaattaaatagtagtacacagcatgttataactaacagcagcaacggctcgtaattacttatcatttactagacgaaaaggtggtgggatattttcttgctcaaataatacgaatatatcacccatccattttatgcgatgtttatatactctaatctttaatagatctatagacgacgggtttaccaacaatatagattttatcgattcatctaatttaaacccttccttaaacgtgaatgatctattatctggcataacgatgaccctacctgatgaatcggacaatgtactgggccatgtagaataaattatcaacgaattatcgtctacgaacatttatatcatttgttttaattttaggacgcgaataaatggatataaaatagaaaataacagatattacaaccagtgttatggccgcgcccaaccaggtaggcagttttattttatcttttactacaggttctcctggatgtacgtcaccaacggcggacgtagttctagtacaattagacgtaagttccgcttgggaattttttaacgctaaagagttaacgttaatcgtgcacccaacgtatttacatctagttcgttgaacatcttgattataatataaccattttctatctctagattcgtcagtgcactcatgtaaccaacataccctaggtcctaaatatttatctccggaattagattttggataattcgcgcaccaacaatttctatttcctttatgatcgttacaaaagacgtataatgccgtatccccaaaagtaaaataatcaggacgaataattctaataaactcagaacaatatctcgcatccatatgtttggagcaaatatcggaataagtagacatagccggtttccgttttgcacgtaaccattctaaacaattggggtttccaggatcgtttctacaaaatccagtcatgaaatcgtcacaatgttctgtcttgtaattattattaaatatttttggacagtgtttggtatttgtcttagaacaacattttgccacgctatcactatcgcccaggagataatccttttttataaaatgacatcgttgcccggatgctatataatcagtagcgtgttttaaatccttaatatattcaggagttacctcgttctgataatagattaatgatccaggacgaaatttgaaagaactacatggttctccatgaattaatacatattgtttagcaaattcaggaactataaaactactacaatgatctatcgacataccatctatcaaacaaaacttgggtttaatttctcccggagatgtttcataatagtacgtataactttcttctgcaaacttaacagctctattatattcaggataattaaaacctaattccatatatttgtctcgtatatctgctattcctggtgctattttgattctattaagagtaacagctgcccccattcttaataatcgtcagtatttaaactgttaaatgttggtatatcaacatctaccttatttcccgcagtataaggtttgttgcaggtatactgttcaggaatggttacatttatacttcttctatagtcctgtctttcgatgttcatcacatatgcaaagaacagaataaacaaaataatgtaagaaataatattaaatatctgtgaattcgtaaatacattgattgccataataattacagcagctacaatacacacaatagacattcccacagtgttgccattacctccacgatacatttgagttactaagcaataggtaataactaagctagtaagaggcaatagaaaagatgagataaatatcatcaatatagagattagaggagggctatatagagccaagacgaacaaaatcaaaccgagtaacgttctaacatcattatttttgaagattcccaaataatcattcattcctccataatcgttttgcatcatacctccatctttaggcataaacgattgctgctgttcctctgtaaataaatctttatcaagcactccagcacccgcagagaagtcgtcaagcatattgtaatatcttaaataactcatttatatattaaaaaatgtcactattaaagatggagtataatctttatgccgaactaaaaaaaatgacttgtggtcaacccctaagtctttttaacgaagacggggatttcgtagaagttgaaccgggatcatcctttaagtttctgatacctaagggattttacgcctctccttccgtaaagacgagtctagtattcgagacattaacaacgaccgataataaaatcactagtatcaatccaacaaatgcgccaaagttatatcctcttcaacgcaaagtcgtatctgaagtagtttctaatatgaggaaaatgatcgaatcaaaacgtcctctatacattactcttcacttggcgtgtggatttggtaagactattaccacgtgttatcttatggctacacacggtagaaaaaccgtcatttgcgtacccaataaaatgttaatacatcaatggaagacacaggtagaggcagtcggattggaacataagatatccatagatggagtaagtagtctattaaaggaactaaagactcaaagtccggatgtattaatagtagtcagtagacatctgacaaacgatgccttttgtaaatatatcaataagcattatgatttgttcatcttggatgaatcacatacgtataatctgatgaacaatacagcagttacaagatttttagcgtattatcctccgatgatgtgttattttttaactgctacacctagaccatctaaccgaatttattgtaacagtattattaatattgccaagttatccaatctaaaaaaaactatctatgcagtagatagtttttttgagccatattccacagataatattagacatatggtaaaacgactagatggaccatctaataaatatcatatatataccgagaagttattatctgtagacgagcctagaaatcaacttattcttgataccctggtagaagaattcaagtcaggaactattaatcgcattttagttattactaaactacgtgaacatatggtattattctacaaacgattattagattttttcggaccagaggttgtatttataggagacgcccaaaatagacgtactccagatatggtcaaatcaatcaaggaactaaatagatttatattcgtatccaccttattttattccggtactggtttagatattcctagtttggattcgttgttcatttgctcggcagtaatcaacaatatgcaaatagagcaattactagggagggtatgtcgagaaacagaactattagataggacggtatatgtatttcctaacacatccatcaaagaaataaagtacatgataggaaatttcatgcaacgaattattagtctgtctgtagataaactaggatttaaacaaaaaagttatcggaaacatcaagaatccgatcccacttctgcatgtacaacatcatccagagaagaacgtgtattaaatagaatatttaactcgcaaaatcgttaagaagtttaagcgacgatccgcatgctgcgcaggccagtgtattacccctcatagtattaatataatccaatgatacttttgtgatgtcggaaatcttaaccaatttagactgacaggcagaacacgtcatgcaatcatcatcgtcatcgataactgtagtcttgggcttctttttgcgactcttcattccggaacgcacattggtgctatccatttaggtagtaaaaaataagtcagaatatgccctataacacgatcgtgcaaaacctggtatatcgtctctatctttatcacaatatagtgtatcgacatttttattattattgacctcgtttatcttggaacatggaatgggaacatttttgttatcaacggccatctttgccttaattccagatgttgtaaaattataactaaacagtctatcatcgacacaaatgaaattcttgtttagacgtttgtagtttacgtatgcggctcgttcgcgtctcattttttcagatattgcaggtactataatattaaaaataagaatgaaataacataggattaaaaataaagttatcatgacttctagcgctgatttaactaacttaaaagaattacttagtctgtacaaaagtttgagattttcagattctgcggctatagaaaagtataattctttggtagaatggggaacatctacttactggaaaataggcgtgcaaaaggtagctaatgtcgagacgtcaatatctgattattatgatgaggtaaaaaataaaccgtttaatattgatccgggctattacattttcttaccggtatattttgggagcgtctttatttattcgaagggtaaaaatatggtagaacttggatctggaaactcttttcaaataccagatgatatgcgaagtgcgtgtaacaaagtattagacagcgataacggaatagactttctgagatttgttttgttaaacaatagatggataatggaagatgctatatcaaaatatcagtctccagttaatatatttaaactagctagtgagtacggattaaacatacccaaatatttagaaattgaaatagaggaagacacattatttgacgacgagttatactctattatagaacgctctttcgatgataaatttccaaaaatatccatatcgtatattaagttgggagaacttagacggcaagttgtagactttttcaaattctcattcatgtatattgagtccatcaaggtagatcgtataggagataatatttttattcctagcgttataacaaaatcaggaaaaaagatattagtaaaagatgtagaccatttaatacgatccaaggttagagaacatacatttgtaaaagtaaaaaagaaaaacacattttccattttatacgactatgatggaaacggaacagaaactagaggagaagtaataaaacgaattatagacactataggacgagactattatgttaacggaaagtatttctctaaggttggtagtgcaggcttaaagcaattgactaataaattagatattaatgagtgcgcaactgtcgatgagttagttgatgagattaataaatccggaactgtaaaacgaaaaataaaaaaccaatcagcatttgatttaagcagagaatgtttgggatatccagaagcggattttataacgttagttaataacatgcggttcaaaatagaaaattgtaaggttgtaaatttcaatattgaaaatactaattgtttaaataacccgagtattgaaactatatatggaaactttaaccagttcgtctcaatctttaatgtcgtcaccgatgtcaaaaaaagattattcgagtgaaataatatgcgcctttgatataggtgcaaaaaatcctgccagaactgttttagaagtcaaggataactccgttagggtattggatatatcaaaattagactggagttctgattgggaaaggcgcatagctaaagatttgtcacaatatgaatacactacagttcttctagaacgtcagcctagaaggtcgccgtatgttaaatttatctattttattaaaggctttttatatcatacatcggctgccaaagttatttgcgtctcgcctgtcatgtctggtaattcatatagagatcgaaaaaagagatcggtcgaagcatttcttgattggatggacacattcggattgcgagactccgttccggatagacgcaaattagacgatgtagcggatagtttcaatttggctatgagatacgtattagataaatggaatactaattatacaccttataataggtgtaaatctagaaattacataaaaaaaatgtaataacgttagtaacgccattatggataatctatttacctttctacatgaaatagaagatagatatgccagaactatttttaactttcatctaataagttgcgatgaaataggagatatatatggtcttatgaaagaacgcatttcctcagaggatatgtttgataatatagtgtataataaagatatacatcctgccattaagaaactagtgtattgcgacatccaacttactaaacacattattaatcagaatacgtatccggtatttaacgattcttcacaagtgaaatgttgtcattatttcgacataaactcagataatagcaatattagctctcgtacagtagagatatttgagagggaaaagtcatctcttgtatcatatattaaaactaccaataagaagagaaaggtcaattacggcgaaataaagaaaactgttcatggaggcactaatgcaaattacttttccggtaaaaagtctgacgagtatctgagtactacagttagatccaacattaatcaaccttggatcaaaaccatctctaagaggatgagagttgatatcattaatcactctatagtaacgcgtggaaaaagctctatattacaaactatagaaattatttttactaatagaacatgtgtgaaaatattcaaggattctactatgcacattattctatccaaggacaaggatgaaaaggggtgtatacacatgattgacaaattattctatgtctattataatttatttctgttgttcgaagatatcatccaaaacgagtactttaaagaagtagctaatgttgtaaaccacgtactcacggctacggcattagatgagaaattattcctaattaagaaaatggctgaacacgatgtttatggagttagcaatttcaaaatagggatgtttaacctgacatttattaagtcgttggatcataccgttttcccctctctgttagatgaggatagcaaaataaagttttttaaggggaaaaagctcaatattgtagcattacgatctctggaggattgtataaattacgtgactaaatccgagaatatgatagaaatgatgaaggaaagatcgactattttaaatagcatagatatagaaacggaatcggtagatcgtctaaaagaattgcttctaaaatgaaaaaaaacactaattcagaaatggatcaacgactagggtataagtttttggtgcctgatcctaaagccggagttttttatagaccgttacatttccaatatgtatcgtattctaattttatattgcatcgattgcatgaaatcttgaccgtcaagcggccactcttatcgtttaagaataatacagaacgaattatgatagaaattagcaatgttaaagtgactcctccagattactcacctataatcgcgagtattaaaggtaagagttatgacgcattagccacgttcactgtaaatatctttaaagaggtaatgaccaaagagggtatatccatcactaaaataagtagttatgagggaaaagattctcatttgataaaaattccgctactaataggatacgggaataaaaatccacttgatacagccaagtatcttgttcctaatgtcataggtggagtctttatcaataaacaatctgtcgaaaaagtaggaattaatctagtagaaaagattacaacatggccaaaatttagggttgttaagccaaactcattcactttctcgttttcctccgtatcccctcctaatgtattaccgacaagatatcgccattacaagatatctctggatatatcacaattggaagcgttgaatatatcatcgacaaagacatttataacggtcaatattgttttgctgtctcaatatttatctagagtgagtctagaattcattagacgtagtttatcatacgatatgcctccagaagttgtctatctagtaaacgcgataatagatagtgctaaacgaattactgaatctattactgactttaatattgatacatacattaatgacctggtggaagctgaacacattaaacaaaaatctcagttaacgattaacgagttcaaatatgaaatgctgcataactttttacctcatatgaactatacacccgatcaactaaagggattttatatgatatctttactaagaaagtttctctactgtatcttccacacttctagatatccagatagagattcgatggtttgtcatcgcatcctaacgtacggcaaatattttgagacgttggcacatgatgaattagagaattacataggcaacatccgaaacgatatcatgaacaatcacaagaacagaggcacttacgcggtaaacattcatgtactaacaactcccggacttaatcacgcgttttctagcttattgagtggaaagttcaaaaagtcagacggtagttatcgaacacatcctcactattcatggatgcagaatatttctattcctaggagtgttggattttatccggatcaagtaaagatttcaaagatgttttctgtcagaaaataccatccaagtcaatatctttacttttgttcatcagacgttccggaaagaggtcctcaggtaggtttagtatctcaattgtctgtcttgagttccattacaaatatactaacgtctgagtatttggatttggaaaagaaaatttgtgagtatatcagatcatattataaagatgatataagttactttgaaacaggatttccaatcactatagaaaatgctctagtcgcatctcttaatccaaatatgatatgtgattttgtaactgactttagacgtagaaaacggatgggattcttcggtaacttggaggtaggtattactttagttagggatcacatgaatgaaattcgcattaatattggagcgggaagattagtcagaccattcttggttgtggataacggagagctcatgatggatgtgtgtccggagttagaaagcagattagacgacatgacattctctgacattcagaaagagtttccgcatgtcatcgaaatggtagatatagaacaatttacttttagtaacgtatgtgaatcggttcaaaaatttagaatgatgtcaaaggatgaaagaaagcaatacgatttatgtgactttcctgccgaatttagagatggatatgtagcatcttcactagtgggaatcaatcacaattctggacccagagctattcttggatgtgctcaagctaaacaagctatctcttgtctgagttcggatatacgaaataaaatagacaatggaattcatttgatgtatccagagaggccaatcgtgattagtaaggctttagaaacttcaaagattgcggctaattgcttcggccaacatgttactatagcattaatgtcgtacaaaggtatcaatcaagaggatggaattatcatcaaaaaacaatttattcagagaggcggtctcgatattgttacagccaagaaacatcaagtagaaattccattggaaaactttaataacaaagaaagagataggtctaacgcctattcaaaattagaaagtaatggattagttagactgaatgctttcttggaatccggagacgctatggcacgaaatatctcatcaagaactcttgaagatgattttgctagagataatcagattagcttcgatgtttccgagaaatataccgatatgtacaaatctcgcgttgaacgagtacaagtagaacttactgacaaagttaaggtacgagtattaaccatgaaagaaagaagacccattctaggagacaaatttaccactagaacgagtcaaaagggaacagtcgcgtatgtcgcggatgaaacggaacttccatacgacgaaaatggtatcacaccagatgtcattattaattctacatccatcttctctagaaaaactatatctatgttgatagaagttattttaacagccgcatattctgctaagccgtacaacaataagggagaaaaccgacctgtctgttttcctagtagtaacgaaacatccatcgatacatatatgcaattcgctaaacaatgttatgagcattcaaatccgaaattgtccgatgaagaattatcggataaaatcttttgtgaaaagattctctatgatcctgaaacggataagccttatgcatccaaagtattttttggaccaatttattacttgcgtctgaggcatttaactcaggacaaggcaaccgttagatgtagaggtaaaaagacgaagctcattagacaggcgaatgagggacgaaaacgtggaggaggtatcaagttcggagaaatggagagagactgtttaatagcgcatggtgcagccaatactattacagaagttttgaaagattcggaagaagattatcaagatgtgtatgtttgtgaaaattgtggagacatagcagcacaaatcaagggtattaatacatgtcttagatgttcaaaacttaatctctctcctctcttaacaaaaattgataccacgcacgtatctaaagtatttcttactcaaatgaacgccagaggcgtaaaagtcaaattagatttcgaacgaaggcctccttcgttttataaaccattagataaagttgatctcaagccgtcttttctggtgtaatattctagtttggtagtagatacatatcaatatcatcaaattcgagatccgaattataaaatgggcgtggattgttaactatagaatcggacgtctgatattcgaaaatctgtggagtttcaggttttggtggaggtgtaactgctacttgggatactgaagtctgatattcagaaagctgtggatgttctggttcggcatccaccgatggtgtcacatcactaatcggttcggtaacgtctgtggatggaggtgctacttctacagaacctgtagcctcagttgtcaacggagatacatttttaatgcgagaaaatgtataatttggtaatggtttcttatgtggatctgaagaagaggtaagatatctactagaaagataccgatcacgttctagttctcttttgtagaacttaactttttctttctccgcatctagttgatattccaacctcttcacgttactacgttcagattccaattcacgttcgcatgggttacctccgcagtttttacgagcgatttcacgttcagccttcatgcgtctctccctctctctatcgagtttatcagagcagtctttctgaaggcgatcgaactccataaatttctccaacgctttgattgtttccatagatttccgaagttcagcttttaggactgtgattctttttctttcgaattcacagctggatgtacaaccgtttccattaccgccatctctaagtttcttttctagatcggcaacatttcatccccatgccttttacattcctcgagtctactgtcgtcgaaatatcgttccagctccttttcgacatcaataactttagcacgttgtctctcaagctctcttttgtagttatctgattccctggcacgtttaagatcttcatgcaattgagtcagctcttaacttcctctcttgcttcttcgtcatagtacgcgcaatcactgtgagatccattgttaccacgtctacactcggcgagctcgcgtttaagagattcaatttcccgtttgtattggtccatgtttccattgctaccaccattagatttacaggctgctagttgtcgttcgagatcagaaatacgggttttcttggaattgatttcgtcgatgtacttggcatcgaaacacttattaagttctttttccaattctacgattttatttctttcgcgagtcaattccctcctgtagtaactatctgttttgtcagattcacgctctctacgtagactttcttgcaagttactaatttgttccctagcacgtccgagtttagttttatatgctgaatagagttctgattcatcctttgagcagatctctagcgatcgtttaagattcctaattctagtctttagcctatttacctcctcagaagatgttccgttaccgttgcgtttacactcgttaagctgtctatcaagatccatgattctatctctaagacgttgcatctctctttccatatcagcattgctttcattattacgtctgcagtcactcaactgtctttcaatatctgagattctatctctaagacgtcgcatctctctctgtttcggcattggtttcattattacgtttacagtcgttcaactgtctttcaagatctgatattctagattggagtctgctaatctctgtagcattttcacggcattcactcagttgtctttcaagatctgaaattttagattggagtctgctaatctctgtaagatttcctcctccgctctcgatgcagtcggtcaacttattctctagttctctaatacgcgaacgcagtgcatcaacttcttgcgtgtcttcctggttgcgtgtacattcatcgagtctagattcgagatctctaacgcgtcgtcgttcttcctcaagttctctgcgtactacagaaagcgtgtccttatcttgttgatatttagcaatttctgattctagagtactgattttgcttacgtagttactaatatttgtcttggccttatcaagatcctccttgtatttgtcgcattccttgatatccctacgaagtctggacagttcccattcgacattacgacgtttatcgatttcagctcggagatcgtcatcgcgttgttttagccacatacgactgagttcaagttctcgttgacaagatccatctacttttccattcctaatagtatccagttccttttctagttctgaacgcatttctcgttccctatcaagcgattctctcaattctcggatagtcttcttatcaatttctaataaatctgaaccatcatctgtcccattttgaatatccctgtgttctttgatctcttttgtaagtcggtcgattctttcggttttataaacagaatccctttccaaagtcctaatcttactgagtttatcactaagttctgcattcaattcggtgagttttctcttggcttcttccaactctgttttaaactctccactatttccgcattcttcctcgcatttatctaaccattcaattagtttattaataactagttggtaatcagcgattcctatagccgttcttgtaattgtgggaacataattaggatcttctaatggattgtatggcttgatagcatcatctttatcattattagggggatggacaaccttaattggttggtcctcatctcctccagtagcgtgtggttcttcaataccagtgttagtaataggcttaggcaaatgcttgtcgtacgcgggcacttcctcatccatcaagtatttataatcgggttctacttcagaatattcttttctaagagacgcgacttcgggagttagtagaagaactctgtttctgtatctatcaacgctggaatcaatactcaagttaaggatagcgaatacctcatcgtcatcatccgtatcttctgaaacaccatcatatgacatttcatgaagtctaacgtattgataaatagaatcagatttagtattaaacagatccttaacctttttagtaaacgcatatgtatattttagatctccagatttcataatatgatcacatgccttaaatgtcagtgcttccatgatataatctggaacactaatgggtgacgaaaaagatacagcaccatatgctacgttgataaataaatctgaaccactaagtagataatgattaatgttaagaaagaggaaatattcagtgtataggtatgtcttggcgtcatatcttgtactaaacacgctaaacagtttgttaatgtgatcaatttccaatagattaattagagcagcgggaataccaacaaacatattaccacatccgtattttctatgaatatcacatatcatgttaaaaaatcttgatagaagagcgaatatctcgtctgacttaatgagtcgtagttcagcagcaacataagtcataactgtaaatagaacatactttcctgtagtgttgattctagactccacatcaacaccattattaaaaatagttttatatacatctttaatctgctctccgttaatcgtcgaacgttctagtatacggaaacactttgatttcttatctgtagttaatgacttagtgatatcacgaagaatattacgaattacatttcttgtttttcttgagagacctgattcagaactcaactcatcgttccatagtttttctacctcagtggcgaaatctttggagtgcttggtacatttttcaataaggttcgtgacctccatttattataaaaaatttattcaaaacttaactacaatcgggtaattataaaatcgtagatctcccatgtggcggaatactaccatctatcgcatgtggatggacagtaggtaatggccatgggaacagtaatgtttgcatatttatctttcttgccagtattactgcatattgtcccaatgtttcgatgtgatgttctaacctatcaactgccgctgtatcacaacaatagtgtccgatgaaattaagattatgatccaatgtgtttaatatatgattatcaagtcttatacgatccgcgtcttttttgacaggatcaggttcttctacaggaagaagtttcggcctcttatgatattcatgtctgggaaacggtggtctagggtgaggctccggtatcggagtgggttttggattataatcatcatcgtctatgacatcatcttcgacttcgatatttattttgctatcttgatgatgtcctgtatcagttgcattttcagcactcgactgaatattagcgcattcattgtctattattaccatatttctaaacccaaaatgtatgtgttgaacatcagtactatcgttgatgagtcttatagcatgaattcgcttatcgttatcgggtttatcttctgtcaccttagcaattccttttttattaaactctacataatcatatccatttctattgtttgttctaatataaacgagtatagcatcattgctaaatttttcaatagtatcaaaaacagaatatcctaaaccatataatatatattcaggaacactcaaactaaatgtccaggattctcctaaatacgtaaactttaatagtgcgaaatcattcaaaaatctaccacttatagatagatagtacataaatgcgtatagtagtctacctatctctttattatgaaaaccggcattacgatcatatatgtcgtgatatacctgtgatccgtttacgttaaaccataaatacatgggtgatcctataaacatgaatttatttctaattctcagagctatagttaattgaccgtgtaatatttgcttacatgcatacttgatacgcttattaataagatttttatcattgctcgttatttcagaatcgtatatataaggagtaccatcgtgattcttaccagatattatacaaaatactatatataaaatatattgacccacgttagtaatcatataaatgtttaacgttttaaattttgtattcaatgatccattatcatacgctatcatggtcttgtaatattcattctttaaaatataatattgtgttagccattgcattggagctcctaatggagattttctattctcatccattttaggataggctttcataaagtccctaataacttcgtgaataatgtttctatgttttctactgatgcatgtatttgcttcgatttttttatcccatgtttcatctatcatagatttaaacgcagtaatgctcgcaacattaacatcttgaaccgttggtacaattccgttccataaatttataatgttcgccatttatataactcattttttgaatatacttttaattaacaaaagagttaagttactcatatggacgccgtccagtctgaacatcaatctttttagccagagatatcatagccgctcttagagtttcagcgtgattttccaacctaaatagaacttcatcgttgcgtttacaacacttttctatttgttcaaactttgttgttacattagtaatctttttttccaaattagttagccgttgtttgagagtttcctcattgtcgtcttcatcggctttaacaattgcttcgcgtttagcctctggctttttagcagcctttgtagaaaaaaattcagttgctggaattgcaagatcgtcatctccggggaaaagagttccgtccatttaaagtacagattttagaaactgacactctgcgttatttatatttggtacaacacatggattataaatattgatgttaataacatcagaaaatgtaaagtctatacattgttgcatcgtgttaaattttctaatggatctagtattattgggtccaacttctgcctgaaatccaaatatggaagcggatacaaaaccgtttcctggataaaccacacatctccacttttgctttacatcagaaattgtgtcgttgacatcttgaactctcctatctaatgccggtgttccacctatagattttgaatattcgaatgctgcatgagtagcattaaattccttaatattgccataattttcatatattgagtaaccctggataaaaagtaaacacaccgcagccgtcgctaccacaataaaaaaaattgatagagagttcatttataatctattagaagctgacaaaatttttttacacgcatcagacaatgctttaataaatagttcaacatctacttttgtcatatcgaaccgatggtatgattctaacctagaattacatccgaaaaagttgactatgttcatagtcattaagtcattaacaaacaacattccagactctggattataagacgatactgtttcgtcacaattacctaccttaatcatgtgattatgaatattggctattagagcaccttctaagaaatctataatatctttgaaacacgatttaaaatcaaaccacgaatatacttctacgaagaaagttagtttacccataggagaaataactataaatggagatctaaatacaaaatccggatctatgatagttttaacattattatattctctattaaatacctccacatctaaaaatgttaattttgaaactatgtcttcgtttattaccgtacctgaactaaacgctataagctctattgtttgagaactctttaaacgatattcttgaaatacatgtaacaaagtttcctttaactcggtcggtttatctaccatagttacagaatttgtatccttatctataatataataatcaaaatcgtataaagttatataattatcgcgttcagattgggatcttttcaaatagactaaaaaccccatttctctagtaagtatcttatgtatatgtttgtaaaatatcttcatggtgggaatatgctctaccgcagttagccattcctcattgacagcggtagatgtattagacaaaactattccaatgtttaacaagggccattttacgagattattaaatccttgtttgataaatgtagccaatgagggttcgagttcaacgacgattgaattctcttcccgcggatgctgcatgatgaacgacgggatgttgttcgattgatttggaattctttttcgactttttgtttatattaaatattttaaaatttatagcggatagcaattcatgtaccacggataatgtagacgcgtattgcgcatcgatatctttattattagataaatttatcaataaatgtgagaagtttgcctcgttaaggtcttccatttaaatattatataaacatttgtgtttgtaacttattcgtcttttatggaatagttttttactagtaaagctgcaattacacactttgtccgtaaaacataaatataaacaccagcttttatcaatcgttccaaaaagtcgacggcggacatttttaacatggcatctattttaaatacacttaggtttttggaaaaaacatcattttataattgtaacgattcaataactaaagaaaagattaagattaaacataagggaatgtcatttgtattttataagccaaagcattctaccgttgttaaatacttgtctggaggaggtatatatcatgatgatttggttgtattggggaaggtaacaattaataatctaaagatgatgctattttacatggatttatcatatcatggagtgacaagtagtggagcaatttacaaattgggatcgtctatcgatagactttctctaaataggactattgttacaaaagttaataattatgatgatacattttttgacgacgatgattgatcgctattgcacaattttgtttttgtactttctaatatagtgtttaggttctttttcatatgagaatattgatttactaaaatatctatgtttaacttttgttctatgacgtccttatcggcggtatcggtacatatacgtaattcaccttcacaaaatacggagtcttcgataataatagccaatcgattattggatctagctgtctgtatcatattcaacatgtttaatatatcctttcgtttcccctttacaggcatcgatcgtagcatattttccgcgtctgatatggaaatgttaaaactacaaaaatgcgtaatgttagcccgtcctaatattggtacgtgtctataagtttggcatagtagaataatagacgtgtttaaatgccttccaaagtttaagaattctattagagtattgcattttgatagtttatcgcctacatcatcaaaaataagtaaaaagtgtgctgattttttatgattttgtgcgacagcaatacatttttctatgttacttttagttcgtatcagattatattctagagattcctgactactaacgaaattaatatgatttggccaaatgtatccatcataatctgggttataaacgggtgtaaacaagaatatatgtttatattttttaactagtgtagaaaacagagatagtaaatagatagtttttccagatccagatcctcctgttaaaaccattctaaacggcatttttaataaattttctcttgaaaattgtttttcttggaaacaattcataattatatttacagttactaaattaatttgataataaatcaaaatatggaaaactaaggttgttagtagggaggagaacaaagaaggcacatcgtgatataaataacatttattatcatgatgacaccagaaaacgacgaagagcagacatctgtgttctccgctactgtttacggagacaaaattcagggaaagaataaacgcaaacgcgtgattggtctatgtattagaatatctatggttatttcactactatctatgattaccatgtccgcgtttctcatagtgcgcctaaatcaatgcatgtctgctaacgaggctgctattactgacgccgctgttgccgttgctgctgcatcatctactcatagaaaggttgcgtctagcactacacaatatgatcacaaagaaagctgtaatggtttatattaccagggttcttgttatatattacattcagactaccagttattctcggatgctaaagcaaattgcactgcggaatcatcaacactacccaataaatccgatgtcttgactacctggctcattgattatgttgaggatacatggggatctgatggtaatccaattacaaaaactacatccgattatcaagattctgatgtatcacaagaagttagaaagtatttttgtgttaaaacaatgaactaatatttatttttgtacattaataaatgaaatcgcttaatagacaaactgtaagtaggtttaagaagttgtcggtgccggccgctataatgatgatactctcaaccattattagtggcataggaacatttctgcattacaaagaagaactgatgcctagtgcttgcgccaatggatggatacaatacgataaacattgttatttagatactaacattaaaatgtctacagataatgcggtttatcagtgtcgtaaattacgagctagattgcctagacctgatactagacatctgagagtattgtttagtattttttataaagattattgggtaagtttaaaaaagaccaatgataaatggttagatattaataatgataaagatatagatattagtaaattaacaaattttaaacaactaaacagtacgacggatgctgaagcgtgttatatatacaagtctggaaaactggttaaaacagtatgtaaaagtactcaatctgtactatgtgttaaaaaattctacaagtgacaacaaaaaatgaattaataataagtcgttaacgtacgccgccatggacgccgcgtttgttattactccaatgggtgtgttgactataacagatacattgtatgatgatctcgatatctcaatcatggactttataggaccatacattataggtaacataaaaactgtccaaatagatgtacgggatataaaatattccgacatgcaaaaatgctactttagctataagggtaaaatagttcctcaggattctaatgatttggctagattcaacatttatagcatttgtgccgcatacagatcaaaaaataccatcatcatagcatgcgactatgatatcatgttagatatagaagataaacatcagccattttatctattcccatctattgatgtttttaacgctacaatcatagaagcgtataacctgtatacagctggagattatcatctaatcatcaatccttcagataatctgaaaatgaaattgtcgtttaattcttcattctgcatatcagacggcaatggatggatcataattgatgggaaatgcaatagtaattttttatcataaaagttgtaaagtaaataataaaacaataaatattgaactagtagtacgtatattgagcaatcagaaatgatgctggtacctcttatcacggtgaccgtagttgcgggaacaatattagtatgttatatattatatatttgtaggaaaaagatacgtactgtctataatgacaataaaattatcatgacaaaattaaaaaagataaagagttctaattccagcaaatctagtaaatcaactgatagcgaatcagactgggaggatcactgtagtgctatggaacaaaacaatgacgtagataatatttctaggaatgagatattggacgatgatagcttcgctggtagtttaatatgggataacgaatccaatgttatggcgcctagcacagaacacatttacgatagtgttgctggaagcacgctgctaataaataatgatcgtaatgaacagactatttatcagaacactacagtagtaattaatgaaacggagactgttgaagtacttaatgaagataccaaacagaatcctaactattcatccaatcctttcgtaaattataataaaaccagtatttgtagcaagtcaaatccgtttattacagaacttaacaataaatttagtgagaataatccgtttagacgagcacatagcgatgattatcttaataagcaagaacaagatcatgaacacgatgatatagaatcatcggtcgtatcattggtgtgattagtttcctttttataaaattgaagtaatatttagtattattgctgccgtcacgttgtacaaatggagatattccctgtattcggcatttctaaaattagcaattttattgctaataatgactgtagatattatatagatacagaacatcaaaaaattatatctgatgagatcaatagacagatggatgaaacggtacttcttaccaacatcttaagcgtagaagttgtaaatgacaatgagatgtaccatcttattcctcatagattatcgacgattatactctgtattagttctgtcggaggatgtgttatctctatagataatgacatcaatggcaaaaatattctaacctttcccattgatcatgctgtaatcatatccccactgagtaaatgtgtcgtagttagcaagggtcctacaaccatattggttgttaaagcggatatacctagcaaacgattggtaacatcgtttacaaacgacatactatatgtaaacaatctgtcactgattaattatttgccgttgtctgtattcattattagacgagtcaccgactatttggatagacacatatgcgatcagatatttgctaataataagtggtattcccttataaccatcgacgataagcaatatcctattccatcaaactgtataggtatgtcctctgccaagtacataaattctagcatcgagcaagatactttaatccatgtttgtaacctcgagcatccgttcgactcagtatacaaaaaaatgcagtcgtacaattctctacctatcaaggaacaaatattgtacggtagaattgataatataaatatgagcattagtatttctgtggattaatagatttctagtatggggatcattaatcatctctaatctctaaatacctcataaaacgaaaaaaaagctattatcaaatactgtacggaatggattcattctcttctctttttatgaaactctgttgtatatctactgataaaactggaagcaaaaaatctgatagaaagaataagaataagatcaaggattatatggaacacgattattataaaataacaatagttcctggttcctcttccacgtctactagctcgtggtattatacacatgcctagtaatagtctctttgcgttgacggaaagcagactagaaataacaggctaaaatgttcagacaccataatagttcccaacccagataataacagagttccatcaacacattcctttaaactcaatcccaaacccaaaaccgttaaaatgtatccggccaattgatagtagataatgaggtgtacagcgcatgataatttacacagtaaccaaaatgaaaacactttagtaattataagaaatatagacggtaatgtcatcatcaacaatccgataatatgcctgagagtaaacattgatggataaaacaaaaatgctccgcataactctatcatggcaataacacaaccaaacacttgtaaaattcctaaattagtagaaaatacaacggatatcgatgtataagtgatctcgagaaataataagaataaagtaatgcccgtaaagataaacatcaacattgtttggtaatcattaaaccaattagtatgaagttgaactaatttcacagtagattttattccagtgttatcctcgcatgtataagtacctggtaagatatctttatattccataatcaatgagacatcactatccgataacgaatgaagtctagcactagtatgccatttacttaatattgtcgtcttggaagttttattataagttaaaatatcatggttatccaatttccatctaatatactttgtcggattatctatagtacacggaataatgatggtatcattacatgctgtatactctatagtctttgtagttgttataacaaccaacgtatagaggtatatcaacgatattctaactcttgacattttttatttatttaaaatgatacctttgttatttattttattctattttgctaacggtattgaatggcataagtttgaaacgagtgaagaaataatttctacttacttattagacgacgtattatacacgggtgttaatggggcggtatacacattttcaaataataaactaaacaaaactggtttaactaataataattatataacaacatctataaaagtagaggatgcggataaggatacattagtatgcggaaccaataacggaaatcccaaatgttggaaaatagacggttcagacgacccaaaacatagaggtagaggatacgctccttatcaaaatagcaaagtaacgataatcagtcacaacggatgtgtactatctgacataaacatatcaaaagaaggaattaaacgatggagaagatttgacggaccatgtggttatgatttatacacggcggataacgtaattccaaaagatggtttacgaggagcattcgtcgataaagatggtacttatgacaaagtttacattcttttcactgatactatcggctcaaagagaattgtcaaaattccgtatatagcacaaatgtgcctaaacgacgaaggtggtccatcatcattgtctagtcatagatggtcgacgtttctcaaagtcgaattagaatgtgatatcgacggaagaagttatagacaaattattcattctagaactataaaaacagataatgatacgatactatatgtattcttcgatagtccttattccaagtccgcattatgtacctattctatgaataccattaaacaatctttttctacgtcaaaattggaaggatatacaaagcaattgccgtctccagctcctggtatatgtctaccagctggaaaagttgttccacataccacgtttgaagtcatagaaaaatataatgtactagatgatattataaagcctttatctaaccaacctatcttcgaaggaccgtctggtgttaaatggttcgatataaaggagaaggaaaatgaacatcgggaatatagaatatacttcataaaagaaaattctatatattcgttcgatacaaaatctaaacaaactcgtagctcgcaagtcgatgcgcgactattttcagtaatggtaactgcgaaaccgttatttatagcagatatagggataggagtaggaatgccacaaatgaaaaaaatacttaaaatgtaatcttaatcgagtacaccacacgacaatgaacaaacataagacagattatgctggttatgcttgctgcgtaatatgcggtctaattgttggaattatttttacagcgacactattaaaagttgtagaacgtaaattagttcatacaccatcaatagataaaacgataaaagatgcatatattagagaagattgtcctactgactggataagctataataataaatgtatccatttatctactgatcgaaaaacctgggaggaaggacgtaatgcatgcaaagctctaaattcaaattcggatctaattaagatagagactccaaacgagttaagttttttaagaagccttagacgaggctattgggtaggagaatccgaaatattaaaccagacaaccccatataattttatagctaagaatgccacgaagaatggaactaaaaaacggaaatatatttgtagcacaacgaatactcccaaactgcattcgtgttacactatataacaattacactacatttttatcataccactacttcggttagatgttttagaaaaaaataaatatcgccgtaccgttcttgtttttataaaaataacaattaacaattatcaaattttttctttaatattttacgtggttgaccattcttggtggtaaaataatctcttagtgttggaatggaatgctgtttaatgtttccacactcatcgtatattttgacgtatgtagtcacatcgtttacgcaatagtcagactgtagttctatcatgcttcctacatcagaaggaggaacagttttaaagtctcttggttttaatctattaccgttagttttcatgaaatcctttgttttatccacttcacattttaaataaatgtccactatacattcttttgttaattttactagatcgtcatgggtcatagaatttataggttccgtagtccatggatccaaactagcaaacttcgcgtatacggtatcgcgattagtgtatacaccaactgtatgaaaattaagaaaacagtttaatagatcaacagaaatatttaatcctccgtttgatacagatgcgccatatttatggatttcggattcacacgttgtttgtctgaggtgttcgtctagcgttgcttctacgtaaacttcgattcccatatattctttattgtcagaatcgcataccgatttatcatcatacactgtttgaaaactaaatggtatacacatcaaaataataaatactaacgagtacattctgcaatattgttatcgtaattggaaaattagtgttcgagtgagtcggattatgtgagtactggattttatattttgtaataagaataaaatgctaatgtcaagtcttattaaaaacatatataataaataacaatggctgaatggcataaaattatcgaggatatctcaaaaaataataagttcgaggatgccgccatcgttgattacaagactacaaagaatgttctagctgctattcctaacagaacatttgccaagattaatccgggtgaaattattcctctcatcactaatcgtaatattctaaaacctcttattggtcagaaatattgtattgtatatactaactctctaatggatgagaacacgtatgctatggagttgcttactgggtacgcccctgtatctccgatcgttatagcgagaactcataccgcacttatatttttgatgggtaagccaacaacatccagacgtgacgtgtatagaacgtgtagagatcacgctacccgtgtacgtgcaactggtaattaaaataaaaagtaatattcatatgtagtgtcaattttaaatgatgatgatgaaatggataatatccatattgacgatgtcaataatgccggtattggcatacagttcatcgatttttagatttcattcagaggatgtggaattatgttatgggcatttgtattttgataggatctataatgtagtaaatataaaatataatccgcatattccatatagatataattttattaatcgcacgttaaccgtagatgaactagacgataatgtcttttttacacatggttattttttaaaacacaaatatggttcacttaatcctagtttgattgtctcattatcaggaaacttaaaatataatgatatacaatgctcagtaaatgtatcgtgtctcattaaaaatttggcaacgagtacatctactatattaacatctaaacataagacttattctctacatcggtccacgtgtattactataataggatacgattctattatatggtataaagatataaatgacaagtataatgacatctatgattttactgcaatatgtatgctaatagcgtctacattgatagtgaccatatacgtgtttaaaaaaataaaaatgaactcttaattatgctatgctattagaaatggataaaatcaaaattacggttgattcaaaaattggtaatgttgttaccatatcgtataacttggaaaagataactattgatgtcacacctaaaaagaaaaaagaaaaggatgtattattagcgcaatcagttgctgtcgaagaggcaaaagatgtcaaggtagaagaaaaaaatattatcgatattgaagatgacgatgatatggatgtagaaagcgcgtaatacgatctataaaaataagtatataaatactttttatttactgtactcttactgtgtagtggtgataccctactcgattatttttttaaaaaaaaaatacttattctgattcttctagccatttccgtgttcgtttgaatgccacatcgacgtcaaagataggggagtagttgaaatctagttctgcattgttggtacgcacctcaaatgtagtgttggatatcttcaacgtatagttgttgagtagtgatggttttctaaatagaattctcttcatatcattcttgcacgcgtacatttttagcatccatcttggaatcctagatccttgttctattcccaatggtttcatcaatagaagattaaacatatcgtacgaacacgatggagagtaatcgtagcaaaagtaagcatttcctttaatcttagatcccggatactggatatattttgcagccaacacgtgcatccatgcagcatttcctacatatacccggctatgcaccgcgtcatcatcgactgtacgatacataatgttaccgtgttgcttacattgctcgtaaaagactttcatcaatttgtctccttctccgtaaattccagtgggtcttaggcaacaagtatacaattttgctccattcatgattacggaattattggctttcataaccagttgctcggccatacgtttactttttgcgtatacatgtcctggtgatatatcataaagggtatgctcatggccgatgaatggatcaccgtgtttattgggtcctattgcttccatgctactagtatagatcaaatacttgattcctaggtccacacaagctgccaaaatagtctgtgttccataatagtttactttcatgatttcattatcggtgtattttccaaatacatccactagagcagccgtatgaataatcagatttaccccatctagcgcttctctcaccttatcaaagtcgtttatatcacattgtatatagtttataaccttaactttcgaggttattggttgtggatcttctacaatatctatgactctgatttcttgaacatcatctgcactaattaacagttttactatatacctgcctagaaatccggcaccaccagtaaccgcgtacacggccattgctgccactcataatatcagactacttattctattttactaaataatggctgtttgtataatagaccacgataatatcagaggagttatttactttgaaccagtccatggaaaagataaagttttaggatcagttattggattaaaatccggaacgtatagtttgataattcatcgttacggagatattagtcaaggatgtgattccataggcagtccagaaatatttatcggtaacatctttgtaaacagatatggtgtagcatatgtttatttagatacagatgtaaatatatttacaattattggaaaggcgttatctatttcaaaaaatgatcagagattagcgtgtggagttattggtatttcttacataaatgaaaagataatacattttcttacaattaacgagaatggcgtttgatatatcagttaatgcgtctaaaacaataaatgcattagtttacttttctactcagcaaaataaattagtcatacgtaatgaagttaatgatacacactacactgtcgaatttgatagggacaaagtagttgacacgtttatttcatataatagacataatgacaccatagagataagaggggtgcttccagaggaaactaatattggttgcgcggttagtatgacttacttgtataataagtatagttttaaactgattttagcagaatatataagacacagaaatactatatccggcaatatttattcggcattgatgacactagatgatttggctattaaacagtatggagacattgatctattatttaatgagaaacttaaagtagactccgattcgggactatttgactttgtcaactttgtaaaggatatgatatgttgtgattctagaatagtagtagctctatctagtctagtatctaaacattgggaattgacaaataaaaaatataggtgtatggcattagccgaacatatatctgatagtattccaatatctgagctatctagactacgatacaatctatgtaagtatctacgcggacacactgagagcatagaggataaatttgattattttgaagacgatgattcgtctacatgttctgccgtaaccgacagggaaacggatgtataattttttttatagcgtgaaggatatgataaaaaatataattgttgtatttatcccattccaatcaccttatatgattctgtaacacaataaaggagtcttatagatgtatagaggtcagatactggtttgataaactgtttattccacataagtatgtttgactttatggttagacccgcatactttaacaaatcactgaaaattggagttaggtattgacctctcagaatcagttgccgttctggaacattaaatgtattttttatgatatactccaacgcatttatgtgggcatacaacaagtcattactaatggagtattccaagagttttagttgtctagtatttaacaagagaagagatttcaacagactgtttatgaactcgaatgccgcctcattgtcgcttatattgatgatgtcgaattctcccaatatcatcaccgatgagtagctcatcttgttatcgggatccaagttttctaaagatgtcattaaaccctcgatcatgaatggatttatcatcatcgtttttatgttggacatgagcttagtccgtttgtccacatctatagacgacgatttctgaattatttcatatatctctctctttaactccaggaacttgtcaggatggtctactttaatatgttctcgtctaagagatgaaaatctttggatggttgcacgcgacttttctctaaaggatgacgttgcccaagatcctctcttaaatgaatccatcttatccttggacaagatggacagtctattttccttagatggtttaatatttttgttacccatgatctataaaggtagacctaatcgtctcggatgaccatatatttattttcagttttattatacgcataaattgtaaaaaatatgttaggtttacaaaaatgtctcgtggggcattaatcgtttttgaaggattggacaaatctggaaaaacaacacaatgtatgaacatcatggaatctataccggcaaacacgataaaatatcttaactttcctcagagatccactgtcactggaaaaatgatagatgactatctaactcgtaaaaaaacctataatgatcatatagttaatctattattttgtgcaaatagatgggagtttgcatcttttatacaagaacaactagaacagggaattactttaatagttgatagatacgcattttctggagtagcgtatgccgccgctaaaggcgcgtcaatgactctcagtaagagttatgaatctggattgcctaaacccgacttagttatattcttggaatctggtagcaaagaaattaatagaaacgtcggtgaggaaatttatgaagatgttacattccaacaaaaggtattacaagaatataaaaaaatgattgaagaaggagatattcattggcaaattatttcttctgaattcgaggaagatgtaaagaaggagttgattaagaatatagttatagaggctatacacacggttactggaccagtggggcaactgtggatgtaatagtgaaattacattttttataaatagatgttagtacagtgttataaatggatgaagcatattactctggcaacttggaatcagtactcggatacgtgtccgatatgcataccgaactcgtatcaatatctcaattagttattgccaagatagaaactatagataatgatatattaaacaaggacattgtaaattttatcatgtgtagatcaaacttggataatccatttatctctttcctagatactgtatatactattatagatcaagagaactatcagactgagttgattaattcattagacgacaatgaaattatcgattgtatagttaataagtttatgagcttttataaggataacctagaaaatatagtagatgctatcatcactctaaaatatataatgaataatccagattttaaaactacgtatgcagaagtactcggttccagaatagcggatatagatattaaacaagtgatacgtgagaatatactacaattgtctaataatatccgcgaacgatatttgtgaaaaatattaaaaaaaaatactttttttattaaatgacgtcgcttcgcgaatttagaaaattatgctgtgatatatatcacgcatcaggatataaagaaaaatctaaattaattagagactttataacagatagggatgataaatatttgatcattaagctattgcttcccggattagacgatagaatttataacatgaacgataaacaaattataaaattatatagtataatatttaaacaatctcaggaagatatgctacaagatttaggatacggatatataggagacactattaggactttcttcaaagagaacacagaaatccgtccacgagataaaagcattttaactttagaagaagtggatagtttcttaactacgttatcatccgtaactaaagaatcgcatcaaataaaattattgactgatatcgcatccgtttgtacatgtaatgatttaaaatgtgtagtcatgcttattgataaagatctaaaaattaaagcgggtcctcggtacgtacttaacgctattagtcctcatgcctatgatgtgtttagaaaatctaataacttgaaagagataatagaaaattcatctaaacaaaatctagactctatatctatttctgttatgactccaattaatcccatgttagcggaatcgtgtgattctgtcaataaggcgtttaaaaaatttccatcaggaatgtttgcggaagtcaaatacgatggtgaaagagtacaagttcataaaaataataacgagtttgccttctttagtagaaacatgaaaccagtactctctcataaagtggattatctcaaagaatacataccgaaagcatttaaaaaagctacgtctatcgtattggattctgaaattgttcttgtagacgaacataatgtaccgctcccgtttggaagtttaggaatacacaaaaagaaagaatataaaaactctaacatgtgtttgttcgtgtttgactgtttgtactttgatggattcgatatgacggacattccattgtacgaacgaagatcttttctcaaagatgttatggttgaaatacccaatagaatagtattctcagagttgacgaatattagtaacgagtctcagttaactgacgtattggatgatgcactaacgagaaaattagaaggattggtcttaaaagatattaatggagtatacgaaccgggaaagagaagatggttaaaaataaagcgagactatttgaacgagggttccatggcagattctgccgatttagtagtactaggtgcctactatggtaaaggagcaaagggtggtatcatggcagtctttctaatgggttgttacgacgatgaatccggtaaatggaagacggttaccaagtgttcaggacacgatgataatacgttaagggagttgcaagaccaattaaagatgattaaaattaacaaggatcccaaaaaaattccagagtggttagtagttaataaaatctatattcccgattttgtagtagaggatccgaaacaatctcagatatgggaaatttcaggagcagagtttacatcttccaagtcccataccgcaaatggaatatccattagatttcctagatttactaggataagagaggataaaacgtggaaagaatctactcatctaaacgatttagtaaacttgactaaatcttaatagttacatacaaactgaaaattaaaataacactatttagttggtggtcgccatggatggtgttattgtatactgtctaaacgcgctagtaaaacatggcgaggaaataaatcatataaaaaatgatttcatgattaaaccatgttgtgaaagagtttgtgaaaaagtcaagaacgttcacatcggcggacaatctaaaaacaatacagtgattgcagatttgccatatctggataatgctgtatcggatgtatgcaattcactgtataaaaagaatgtatcaagaatatccagatttgctaatttgataaagatagatgacgatgacaagactcctactggtgtatataattattttaaacctaaagatgccattcctgttattatatctataggaaaggatagagatgtctgtgaactattaatctcatcagacatatcgtgtgcatgcgtggagttaaattcatatcacgtagccattcttcccatggatgtttccttttttaccaaaggaaatgcatcattgattattctcctgtttgatttctctatcgatgcggcacctctcttaagaagtgtaaccgataataatgttattatatctagacaccagcgtctacatgacgagcttccgagttccaattggttcaagttttacataagtataaagtccgactattgttctatattatatatggttgttgatggatctgtgatgcatgcgatagctgataatagaactcacgcaattattagcaaaaatatattagacaatactacgattaacgatgagtgtagatgctgttattttgaaccacagattaggattcttgatagagatgagatgctcaatggatcatcgtgtgatatgaacagacattgtattatgatgaatttacctgatgtaggcgaatttggatctagtatgttggggaaatatgaacctgacatgattaagattgctctttcggtggctggtaatttaataagaaatcgagactacattcccgggagacgaggatatagctactacgtttacggtatagcctctagataatttttttaagcacgaaataaaaaacataattttaaaccaatctatttcatactattttgtgtgatcaccatggacataaagatagatattagtatttctggtgataaatttacggtgactactaggagggaaaatgaagaaagaaaaaaatatctacctctccaaaaagaaaaaactactgatgttatcaaacctgattatcttgagtacgatgacttgttagatagagatgagatgtctactattctagaggaatattttatgtacagaggtctattaggcctcagaataaaatatggacgactctttaacgaaattaaaaaattcgacaatgatgcggaagaacaattcggtactatagaagaactcaagcagaaacttagattaaattctgaagagggagcagataactttatagattatataaaggtacaaaaacaggatatcgtcaaacttactgtatacgattgcatatctatgataggattgtgtgcatgcgtggtagatgtttggagaaatgagaaactgttttctagatggaaatattgtttacgagcgattaaactgtttattaatgatcacatgcttgataagataaaatctatactgcagaatagactagtatatgtggaaatgtcatagaaagttaaaagttaatgagagcaaaaatatataaggttgtattccatatttgttattttttctgtaatagttaaaaaatacattcgatggtctatctatcagattattatgtgttataaggtactttttctcataataaactagagtatgagtaagatagtgtttttcaaaacatataaatctaaaattgatggatgagatatacagctattaatttcgaaaatatattttaatctgataactttaaacatggatttttgatggtggtttaacgttttaaaaaaagattttgttattgtagtatatgataatattaaaagatggatataaagaatttgctgactgcatgtactattttttacattactacattggctacggcagatatacctacttcgtcactgccacacgctccggtaaacggggcatgtgacgagggagaatatcttgataagaggcataatcaatgttgtaatcagtgtccacctggagaatttgccaaggtcagatgtaatggtaacgataacacaaaatgtgaacgctgcccacctcatacatataccgcaatccccaattactctaatggatgtcatcaatgtagaaaatgcccaacaggatcatttgataaggtaaagtgtaccggaacacagaacagtaaatgttcgtgtcttcctggttggtattgcgctactgattcttcacagactgaagattgtcgagattgtataccaaaaaggagatgtccatgcggatactttggtggaatagatgaacaaggaaatcctatttgtaaatcgtgttgtgttggtgaatattgcgactacctacgtaattatagacttgatccatttcctccatgcaaactatctaaatgtaattaattatgattttgatgataatgttaccatacattatatcgctacttggttagtgtattattcagtatgaagacctattaataattacttatcttttgacgatcttgttataattataatataaaaacttatggcatagtaacttataattgctgacgcgataaattcgtaataatctgttttgttcaaaggaatctacaggcataaaaataaaaatataatttataatatactcttacagcgcgccatcatgaataacagcagtaaattaattgctgttattaatggatttagaaatagtggacgattttgtgatattaatatagttattaatgatgaaaggataaacgctcacagactcatcctatctggagcctccgaatatttttccattctgttttccaataattttatcgattctaatgaatacgaagttaatctaagtcatttagattatcaaagcgtaaacgatttgatcgattacatttatgggatacctttgagcctaactaacgataacgtgaaatatattctttcaaccgctgattttttacaaattggatctgctattacggagtgtgaaaattacatacttaaaaatctttgttctagaaactgtatcgatttctacatatacgctgataaatataataacaagaaaatagaatcagcgtcgtttaacacaatattacaaaatattttgagactcatcaacgatgaaaactttaaatacttaacagaggaatcaatgataaaaattttaagcgatgatatgttaaatataaaaaatgaggatttcgccccactaattctcattaaatggttagagagtactcaacaaccatgcaccgtcgagttacttaaatgcctcagaatatcattgctttccccacaagttataaaatcactttatagtcatcgactggttagttcaatctacgaatgtataacattcttaaacaatatagcattcttggatgaatcatttcctagataccatagcatcgagttgatatctatcggtataagtaattcgcatgataagatttccataaactgctacaatcataaaaaaaatacatgggaaatgatatcttcacgtagatataggtgtagtttcgcagtggccgtcctggataatattatttatatgatgggtggatatgatcagtccccgtatagaagttcaaaggttatagcgtacaatacatgtacaaattcttggatatatgatataccagagctaaaatatcctcgttctaattgtgggggactggctgatgacgaatacatttattgtataggcggcatacgcgatcaggattcatcgttgacatctagtattgatagatggaagccatcaaaaccatattggcagaagtatgctaaaatgcgcgaaccaaaatgtgatatgggggttgcgatgttaaacggattaatatatgttataggtggaatcgttaaaggtgacacgtgtaccgacgcactagagagtttatcagaagatggatggatgaagcatcaacgtcttccaataaaaatgtccaatatgtcgacgattgttcatgatggcaagatttatatatctggaggttacaacaatagtagtgtagttaatgtaatatcgaatttagtccttagctataattcgatatatgatgaatggaccaaattatcatcattaaacattcctagaattaatcccgctctatggtcagcgcataataaattatatgtaggaggaggaatatctgatgatgttcgaactaatacatctgaaacatacgacaaagaaaaagattgttggacattggataatggtcacgtgttaccacgcaattatataatgtataaatgcgaaccgattaaacataaatatccattggaaaaaacacagtacacgaatgattttctaaagtatttggaaagttttataggtagttgatagaacaaaatacataattttgtaaaaataaatcactttttatactaatatgacacgattaccaatacttttgttactaatatcattagtatacgctacaccttttcctcagacatctaaaaaaataggtgatgatgcaactctatcatgtaatcgaaataatacaaatgactacgttgttatgagtgcttggtataaggagcccaattccattattcttttagctgctaaaagcgacgtcttgtattttgataattataccaaggataaaatatcttacgactctccatacgatgatctagttacaactatcacaattaaatcattgactgctagagatgccggtacttatgtatgtgcattctttatgacatcgcctacaaatgacactgataaagtagattatgaagaatactccacagagttgattgtaaatacagatagtgaatcgactatagacataatactatctggatctacacattcaccggaaactagttctgagaaacctgattatatagataattctaattgctcgtcggtattcgaaatcgcgactccggaaccaattactgataatgtagaagatcatacagacaccgtcacatacactagtgatagcattaatacagtaagtgcatcatctggagaatccacaacagacgagactccggaaccaattactgataaagaagatcatacagtcacagacactgtctcatacactacagtaagtacatcatctggaattgtcactactaaatcaaccaccgatgatacgtacaatgataatgatacagtaccaccaactactgtaggcggtagtacaacctctattagcaattataaaaccaaggactttgtagaaatatttggtattaccgcattaattatattgtcggccgtggcaatattctgtattacgtattatatatgtaataaacgttcacgtaaatacaaaacagagaacaaagtctagatttttgacttacataaatgtctgggatagtaaaatctatcatattgagcgggccatctggtttaggaaagacagccatagccaaaagactatgggaatatatttggatttgtggtgtcccataccactagatttcctcgtcctatggaacgagaaggtgtcgattaccattacgttaacagagaggccatctggaagggaatagccgccggaaactttctagaacatactgagtttttaggaaatatttacggaacttctaaaactgctgtgaatacagcggctattaataatcgtatttgtgtgatggatctaaacatcgatggcgttagaagtcttaaaaatacgtacctaatgccttactcggtgtatataagacctacctctcttaaaatggttgagaccaagcttcgttgtagaaacactgaagcggatgatgagattcatcgtcgtgtgatgttggcaaaaactgacatggatgaggcaggtgaagccggtctattcgacactattatcattgaagatgatgtgaatttagcatatagtaagttaattcagatactacaggaccgtattagaatgtattttaacactaattagagacttaagacttaaaacttgataattaataatataactcgtttttatatgtggctatttcaacgtctaatgtattagttaaatattaaaacttaccacgtaaaacttaaaatttaaaatgatatttcattgacagatagatcacacattatgaactttcaaggacttgtgttaactgacaattgcaaaaatcaatgggtcgttggaccattaataggaaaaggtggattcggtagtatttatactactaatgacaataattatgtagtaaaaatagagcccaaagctaacggatcattatttaccgaacaggcattttatactagagtacttaaaccatccgttatcgaagaatggaaaaaatctcacaatataaagcacgtaggtcttatcacgtgcaaggcatttggtctatacaaatccattaatgtggaatatcgattcttggtaattaatagattaggtgcagatctagatgcggtgatcagagccaataataatagattaccaaaaaggtcggtgatgttgatcggaatcgaaatcttaaataccatacaatttatgcacgagcaaggatattctcacggagatattaaagcgagtaatatagtcttggatcaaatagataagaataaattatatctagtggattacggattggtttctaaattcatgtctaatggcgaacatgttccatttataagaaatccaaataaaatggataacggtactctagaatttacacctatagattcgcataaaggatacgttgtatctagacgtggagatctagaaacacttggatattgtatgattagatggttgggaggtatcttgccatggactaagatatctgaaacaaagaattgtgcattagtaagtgccacaaaacagaaatatgttaacaatactgcgactttgttaatgaccagtttgcaatatgcacctagagaattgctgcaatatattaccatggtaaactctttgacatattttgaggaacccaattacgacaagtttcggcacatattaatgcagggtgtatattattaagtgtggtgtttggtcgataaaaattaaaaaataacttaatttattattgatctcgtgtgtacaaccgaaatcatggcgatgttttacgcacacgctctcggtgggtacgacgagaatcttcatgcctttcctggaatatcatcgactgttgccaatgatgtcaggaaatattctgttgtgtcagtttataataacaagtatgacattgtaaaagacaaatatatgtggtgttacagtcaggtgaacaagagatatattggagcactgctgcctatgtttgagtgcaatgaatatctacaaattggaaatccgatccatgatcaagaaggaaatcaaatctctatcatcacatatcgccacaaaaactactatgctctaagcggaatcgggtacgagagtctagacttgtgtttggaaggagtagggattcatcatcacgtacttgaaacaggaaacgctgtatatggaaaagttcaacatgattattctactatcaaagagaaggccaaagaaatgagtgcacttagtccaggacctatcatcgattaccacgtctggataggagattgtatctgtcaagttactgctgtggacgtacatggaaaggaaattatgaaaatgagattcaaaaagggtgcggtgcttccgatcccaaatctggtaaaagttaaacttggggagaatgatacagaaaatctttcttctactatatcggcgacaccatcgaggtaaccacctctctggaagacagcgtgaataatgtactcatgaaacgtttggaaactatacgccatatgtggtctgttgtatatgatcattttgatattgtgaatggtaaagaatgctgttatgtgcatacgcatttgtctaatcaaaatcttataccgagtactgtaaaaacaaatttgtacatgaagactatgggatcatgcattcaaatggattccatggaagctctagagtatcttagcgaactgaaggaatcaggtggatggagtcccagaccagaaatgcaggaatttgaatatccagatggagtggaagacactgaatcaattgagagattggtagaggagttcttcaatagatcagaacttcaggctggtgaatcagtcaaatttggtaattctattaatgttaaacatacatctgtttcagctaagcaactaagaacacgtatacggcagcagcttccttctatactctcatcttttaccaacacaaagggtggatatttgttcattggagttgataataatacacacaaagtatttggattcacggtgggttacgactacctcagactgatagagaatgatatagaaaagcatatcaaaagactttgtgttgtgtatttctgtgagaagaaagaggacatcaagtacgcgtgtcgattcatcaaggtatataaacctggggatgaggctacctcgacatacgtgtgcgctatcaaagtggaaagatgctgttgtgctgtgtttgcagattggccagaatcatggtatatggatactaatggtatcaagaagtattctccagatgaatgggtgtcacatataaaattttaattaatgtaactatagagaacaaataataaggttgtaatatcatatagacaataactaacaattaattagtaactgttatctcttttttaattaaccaactaactatatacctattaatacatcgtaattatagttcttaacatctattaatcattaattcgcttctttaattttttataaactaacattgttaattgaaaagggataacatgttacagaatataaattatatatggatttttttaaaaaggaaatacttgactggagtatatatttatctcttcattatatagcacgcgtgttttccaatttttccacatcccatataatacaggattataatctcgttcgaacatacgagaaagtggataaaacaatagttgattttttatctaggttgccaaatttattccatattttagaatatggggaaaatattctacatatttattctatggatgatgctaatacgaatattataattttttttctagatagagtattaaatattaataagaacgggtcatttatacacaatctcgggttatcatcatccattaatataaaagaatatgtatatcaattagttaataatgatcatccagataataggataagactaatgcttgaaaatggacgtagaacaagacattttttgtcctatatatcagatacagttaatatctatatatgtattttaataaatcatggattttatatagatgccgaagacagttacggttgtacattattacatagatgtatatatcactataagaaatcagaatcagaatcatacaatgaattaattaagatattgttaaataatggatcagatgtagataaaaaagatacgtacggaaacacaccttttatcctattatgtaaacacgatatcaacaacgtggaattgtttgagatatgtttagagaatgctaatatagactctgtagactttaatagatatacacctcttcattatgtctcatgtcgtaataaatatgattttgtaaagttattaatttctaaaggagcaaatgttaatgcgcgtaataaattcggaactactccattttattgtggaattatacacggtatctcgcttataaaactatatttggaatcagacacagagttagaaatagataatgaacatatagttcgtcatttaataatttttgatgctgttgaatctttagattatctattatccagaggagttattgatattaactatcgtactatatacaacgaaacatctatttacgacgctgtcagttataatgcgtataatacgttggtctatctattaaacaaaaatggtgattttgagacgattactactagtggatgtacatgtatttcggaagcagtcgcaaacaacaacaaaataataatggaagtactattgtctaaacgaccatctttgaaaattatgatacagtctatgatagcaattactaaacataaacagcataatgcagatttattgaaaatgtgtataaaatatactgcgtgtatgaccgattatgatactcttatagatgtacagtcgctacagcaatataaatggtatattttaagatgtttcgatgaaatagatatcatgaagagatgttatataaaaaataaaactgtattccaattagttttttgtatcaaagacattaatactttaatgagatacggtaaacatccttctttcgtgaaatgcactagtctcgacgtatacggaagtcgtgtacgtaatatcatagcatctattagatatcgtcagagattaattagtctattatccaagaagctggatcctggagataaatggtcgtgttttcctaacgaaataaaatataaaatattggaaaactttaacgataacgaactatccacatatctaaaaatcttataaacattattaaaatataaaatctaagtaggataaaatcacactacatcattgtttccttttagtgctcgacagtgtatactatttttaacgctcataaataaaaatgaaaacgatttccgttgttacgttgttatgcgtactacctgctgttgtttattcaacatgtactgtacccactatgaataacgctaaattaacgtctaccgaaacatcgtttaatgataaccagaaagttacgtttacatgtgatcagggatatcattctttggatccaaatgctgtctgtgaaacagataaatggaaatacgaaaatccatgcaaaaaaatgtgcacagtttctgattatgtctctgaactatataataaaccgctatacgaagtgaattccaccatgacactaagttgcaacggcgaaacaaaatattttcgttgcgaagaaaaaaatggaaatacttcttggaatgatactgttacgtgtcctaatgcggaatgtcaacctcttcaattagaacacggatcgtgtcaaccagttaaagaaaaatactcatttggggaatatataactatcaactgtgatgttggatatgaggttattggtgcttcgtacataagttgtacagctaattcttggaatgttattccatcatgtcaacaaaaatgtgatatgccgtctctatctaatggattaatttccggatctacattttctatcggtggcgttatacatcttagttgtaaaagtggttttacactaacggggtctccatcatccacatgtatcgacggtaaatggaatcccgtactcccaacatgtgtacgatctaacgaaaaatttgatccagtggatgatggtcccgacgatgagacagatttgagcaaactctcgaaagacgttgtacaatatgaacaagaaatagaatcgttagaagcaacttatcatataatcatagtggcgttaacaattatgggcgtcatatttttgatctccgttatagtattagtttgttcctgtgacaaaaataatgaccaatataagttccataaattgctaccgtaaatataaatccgttaaaataattaataacgaacaagtatcaaaagattaaagacttatagctagaatcaattgagatgtcttcttcagtggatgttgatatctacgatgccgttagagcatttttactcaggcactattatgacaagagatttattgtgtatggaagaagtaacgccatattacataatatatacaggctatttacaagatgcgccgttataccgttcgatgatatagtacgtactatgccaaatgaatcacgtgttaaacaatgggtgatggatacacttaatggtataatgatgaatgaacgcgatattactgtatgtgtgggcaccggactacgattcatggaaatgtttttcgattacaataaaaatagtatcaacaatcaactaatgtatgatataattctagctaatgagagatatagaagcgcttttaacgacgatggtatatacatccgtagaaatatgattaacaagttgtacggatacgcatctctaactactattggcacgatcgctggaggtgtttgttattatctgttgatgcatctagttagtttgtataaataattatttcaatatactagttaaaattttaagattttaaatgtataaaaaactaataacgtttttatttgtaataggtgcattagcatcctattcgaataatgagtacactccgtttaataaactgagtgtaaaactctatatagatggagtagataatatagaaaattcatatactgatgataataatgaattggtgttaaattttaaagagtacacaatttctattattacagagtcatgcgacgtcggatttgattccatagatataaatgttataaacgactataaaattattgatatgtataccattgactcgtctactattcaacgcagaggtcacacgtgtagaatatctaccaaattatcatgccattatgataagtacccttatattcacaaatatgatggtgatgagcgacaatattctattactgcagagggaaaatgctataaaggaataaaatatgaaataagtatgatcaacgatgatactctattgagaaaacatactcttaaaattggatctacttatatatttgatcgtcatggacatagtaatacatattattcaaaatatgatttttaaaaatttaaaatatattatcacttcagtgacagtagtcaaataacaaacaacaccatgagatatattataattctcgcagttttgttcattaatagtatacatgctaaaataactagttataagtttgaatccgtcaattttgattccaaaattgaatggactggggatggtctatacaatatatcccttaaaaattatggcatcaagacgtggcaaacaatgtatacaaatgtaccagaaggaacatacgacatatccgcatttccaaagaatgatttcgtatctttctgggttaaatttgaacaaggcgattataaagtggaagagtattgtacgggactatgcgtcgaagtaaaaattggaccaccgactgtaacattgactgaatacgacgaccatatcaatttgtacatcgagcatccgtatgctactagaggtagcaaaaagattcctatttacaaacgcggtgacatgtgtgatatctacttgttgtatacggctaacttcacattcggagattctaaagaaccagtaccatatgatatcgatgactacgattgcacgtctacaggttgcagcatagactttgtcacaacagaaaaagtgtgcgtgacagcacagggagccacagaaaggtttctcgaaaaaattactccatggagttcgaaagtatgtctgacacctaaaaagagtgtatatacatgcgcaattagatccaaagaagatgttcccaatttcaaggacaaaatggccagagttatcaagagaaaatttaatacacagtctcaatcttatttaactaaatttctcggtagcacatcaaatgatgttaccacttttcttagcatgcttaacttgactaaatattcataactaatttttattaatgatacaaaaacgaaataaaactgcatattatacactggttaacgcccttataggctctaaccattttcaagatgaggtccctgattatagtccttctgttcccctctatcatctactccatgtctattagacaatgtgagaagactgaagaggaaacatggggattgaaaatagggttgtgtataattgccaaagatttctatcccgaaagaactgattgcagtgttcatctcccaactgcaagtgaaggattgataactgaaggcaatggattcagggatatacgaaacaccgataaattataaaaaaagcaatgtgtccgctgtttccgttaataatactattttcgtaactggcggattattcataaataactctaatagcacgatcgtggttaacaatatggaaaaacttgacatttataaagacaaacaatggtcgattatagaaatgcctatggctagggtatatcacggcatcgactcgacatttggaatgttatattttgccggaggtctatccgttaccgaacaatatggtaatttagagaaaaacaacgagatatcttgttacaatcctagaacgaataagtggtttgatatttcatatactatttataagatatccatatcatcattgtgtaaactaaataacgtcttctatgtatttagtaaggacattggatatgtggaaaagtatgatggtgcatggaagttagtacatgatcgtctccccgctataaaggcattatcaacttctccttattgattgaaaatgaaaatataaatagtttttatgtatagcagtattaccctatagttttattgcttactactaacatggatacagatgttacaaatgtagaagatatcataaatgaaatagatagagagaaagaagaaatactaaaaaatgtagaaattgaaaataataaaaacattaacaagaatcatcccaatgaatatattagagaagcactcgttattaataccagtagtaatagtgattccattgataaagaagttatagaatgtatcagtcacgatgtaggaatatagatcatatctactaatttttataatcgatacaaaacataaaaaacaactcgttattacatagcaggcatggaatccttcaagtattgttttgataacgatggcaagaaatggattatcggaaatactttatattctggtaattcaatactctataaggtcagaaaaaatttcactagttcgttctacaattacgtaatgaagatagatcacaaatcacacaagccattgttgtctgaaatacgattctatatatctgtattggatcctttgactatcgacaactggacacgggaacgtggtataaagtatttggctattccagatctgtatggaattggagaaaccgatgattatatgttcttcgttataaagaattcgggaagagtattcgccccaaaggatactgaatcagtcttcgaagcatgcgtcactatgataaacacgttagagtttatacactctcgaggatttacccatggaaaaatagaaccgaggaatatactgattagaaataaacgtctttcactaattgactattctagaactaacaaactatacaagagtggaaactcacatatagattacaacgaggacatgataacttcaggaaatatcaattatatgtgtgtagacaatcatcttggagcaacagtttcaagacgaggagatttagaaatgttgggatattgcatgatagaatggttcggtggcaaacttccatggaaaaacgaaagtagtataaaagtaataaaacaaaaaaaagaatataaaaaatttatagctactttctttgaggactgttttcctgaaggaaatgaacctctggaattagttagatatatagaattagtatacacgttagattattctcaaactcctaattatgacagactacgtagactgtttatacaagattgaaattatattcttttttttatagagtgtggtagtgttacggatatctaatattaatattagactatctctatcgcgctacacgaccaatatcgattactatggatatcttctatgaaaggagagaatgtattcatttctccagcgtcaatctcgtcagtattgacaatactgtattatggagctaatggatccactgctgaacagctatcaaaatatgtagaaacggaggagaacacggataaggttagcgctcagaatatctcattcaaatccatgaataaagtatatgggcgatattctgccgtgtttaaagattcctttttgagaaaaattggcgataagtttcaaactgttgacttcactgattgtcgcactatagatgcaatcaacaagtgtgtagatatctttactgaggggaaaatcaatccactattggatgaaccattgtctcctagcaattagtgccgtatactttaaagcaaaatggttgacgccattcgaaaaggaatttaccagtgattatcccttttacgtatctccgacggaaatggtagacgtaagtatgatgtctatgtacggcgagctatttaatcacgcatctgtaaaagaatcattcggcaacttttcaatcatagaactgccatatgttggagatactagtatgatggtcattcttccagacaagattgatggattagaatccatagaacaaaatctaacagatacaaattttaagaaatggtgtgactttatggatgctatgtttatagatgttcacattcccaagtttaaggtaacaggttcgtataatctggtggatactctagtaaagtcaggactgacagaggtgttcggttcaactggagattatagcaatatgtgtaatttagatgtgagtgtcgacgctatgatccacaaaacgtatatagatgtcaatgaagagtatacagaagcagctgcagcaacttctgtactagtggcagactgtgcatcaacagttacaaatgagttctgtgcagatcatccgttcatctatgtgattaggcatgttgatggcaaaattcttttcgttggtagatattgctctccaacaactaattgttaaccattttttttaaaaaaaatagaaaaaacatgtggtattagtgcaggtcgttgttcttccaattgcaattggtaagatgacggccaactttagtacccacgtcttttcaccacagcactgtggatgtgacagactgaccagtattgatgacgtcaaacaatgtttgactgaatatatttattggtcgtcctatgcataccgcaacaggcaatgcgctggacaattgtattccacactcctctcttttagagatgatgcggaattagtgttcatcgacattcgcgagctggtaaaaaatatgccgtgggatgatgtcaaagattgtgcagaaatcatccgttgttatataccggatgagcaaaaaaccatcagagagatttcggccatcatcggactttgtgcatatgctgctacttactggggaggtgaagaccatcccactagtaacagtctgaacgcattgtttgtgatgcttgagatgctaaattacgtggattataacatcatattccggcgtatgaattgatgagttgtacatcttgacattttctttcttctcttctccctcttctccctttcccagaaacaaactttttttacccactataaaataaaatgagtatactacctattatatttcttcctatatttttttattcttcattcgttcagacttttaacgcgcctgaatgtatcgacaaagggcaatattttgcatcattcatggagttagaaaacgagccagtaatcttaccatgtcctcaaataaatacgctatcatccggatataatatattagatattttatgggaaaaacgaggagcggataatgatagaattataccgatagataatggtagcaatatgctaattctgaacccgacacaatcagactctggtatttatatatgcattaccacgaacgaaacctactgtgacatgatgtcgttaaatttgacaatcgtgtctgtctcagaatcaaatatagatcttatctcgtatccacaaatagtaaatgagagatctactggcgaaatggtatgtcccaatattaatgcatttattgctagtaacgtaaacgcagatattatatggagcggacatcgacgccttagaaataagagacttaaacaacggacacctggaattattaccatagaagatgttagaaaaaatgatgctggttattatacatgtgttttagaatatatatacagaggtaaaacatataacgtaaccagaattgtaaaattagaggtacgggataaaataataccttctactatgcaattaccagatggcattgtaacttcaataggtagtaatttgactattgcatgcagagtatcgttgagacctcccacaacggacaccgacgtcttttggataagtaatggtatgtattacgaagaagatgatggggacggaaacggtagaataagtgtagcaaataaaatctatatgaccgataagagacgtgttattacatcccggttaaacattaatcctgtcaaggaagaagatgctacaacgtttacgtgtatggcgtttactattcctagcatcagcaaaacagttactgttagtataacgtgaatgtatgttgttacatttccatgtcaattgagtttataagaatttttatacattatcttccaacaagcaattgacgaacgtattgctatgattaactcccacgatactatgcatattattaatcattaacttgcagactatacctagagctattttgacatactcgtgttcttgtgtaattgcagtatctatattattaaagtacgtaaatctagctatagttttattatttaattttagataatataccgtctccttatttttaaaaattgttacatcctttattaaatcatgaatgggaatttctatgtcatcgttagtatattgtgaacaacaagagcagatatctataggaaagggtggaatgcgatacattgatctatgtagttttaaaacacacgcaaactttgaagaatttatataaatcattccatcgatacatccttctatgttgagatgtatatatccaggaattcgtttattaatatcgggaaatgtataaactaaaacattgcccgaaagcggtgcctctatctgcgttatatccgttcttaacttacaaaatgtaaccaatacctttgcatgacttgttttgttcggcaacgttagtttaaacttgacgaatggattaattacaatagcatgatccgcgcatctattaagtttttttactttaacgcccttgtatgtttttacagagactttatctaaatttctagtgcttgtatgtgttataaatataacgggatatagaaccgaatcacctaccttagatacccaattacattttatcagatccagataataaacaaattttgtcgccctaactaattctatattgttatatattttacaattggttatgatatcatgtaataacttggagtctaacgcgcatcgtcgtacgtttatacaattgtgatttagtgtagtatatctacacatgtatttttccgcactatagtattctggactagtgataaaactatcgttatatctgtcttcaatgaactcatcgagatattgctctctgtcatattcatacacctgcataaactttctagacatcttacaatccgtgttattttaggatcatatttacatatttacgggtatatcaaagatgttagattagttaatgggaatcgtctataataatgaatattaaacaattatatgaggacttttaccacaaagcatcataaaaatgagtcgtcgtctgatttatgttttaaatatcaaccgcgaatcaactcataaaatacaagagaatgaaatatatacatattttagtcattgcaatatagaccatacttctacagaacttgattttgtagttaaaaactatgatctaaacagacgacaacctgtaactgggtatactgcactacactgctatttgtataataattactttacaaacgatgtactgaagatattattaaatcatggagtggatgtaacgatgaaaaccagtagcggacgtatgcctgtttatatattgcttactagatgttgcaatatttcacatgatgtagtgatagatatgatagacaaagataaaaaccacttatcgcatagagactattccaacctactactagagtatataaaatctcgttacatgttattgaaggaagaggatatcgatgagaacatagtatccactttattagataagggaatcgatcctaactttaaacaagacggatatacagcgttacattattattatttgtgtctcgcacacgtttataaaccaggtgagtgtagaaaaccgataacgataaaaaaggccaagcgaattatttctttgtttatacaacatggagctaatctaaacgcgttagataattgtggtaatacaccattccatttgtatcttagtattgaaatgtgtaataatattcatatgactaaaatgctgttgacttttaatccgaatttcgaaatatgtaataatcatggattaacgcctatactatgttatataacttccgactacatacaacacgatattcttgttatgttaatacatcactatgaaacaaatgttggagaaatgccgatagatgagcgtcgtatgatcgtattcgagtttatcaaaacatattctacacgtccggcagattcgataacttatttgatgaataggtttaaaaatataaatatttatacccgctatgaaggaaagacattattacacgtagcatgtgaatataataatacacaagtaatagattatcttatacgtatcaacggagatataaatgcgttaaccgacaataacaaacacgctacacaactcattatagataacaaagaaaattccccatataccattaattgtttactgtatatacttagatatattgtagataagaatgtgataagatcgttggtggatcaacttccatctctacctatctttcgtcgcttatcatactagtcatatcctaaatgttgatcatattccaccaaatgattgtgaaagagattgagattaaatcgtctaacaaacaattagtttttatgacattaacatataataaataaattaatcattattgacttaacgatgacgaaagttatcatcatcttaggattcttgattattaatacaaattcattgtctatgaaatgtgaacaaggtgtctcatattataattcacaagaattaaagtgttgtaaactatgtaagccaggaacatattcagatcatcgatgtgataaatacagcgataccatttgtggacattgtccgagtgacacattcacgtcaatatataatcgttctccttggtgtcatagttgtagaggtccatgtggtactaatcgagtagaggtcacaccttgtacacctaccacaaatagaatctgtcattgtgactcgaatagttattgtctccttaaagcttctgatggtaactgtgttacatgtgctcctaaaacaaaatgtggtcgtgggtatggaaagaaaggagaagatgaaatgggtaataccatttgtaagaaatgtcggaagggtacttattcagatattgtatctgactctgatcaatgtaaaccaatgacaagataagacttactcgcatctactggatagacataaaatatcctcctcgtaataatgaaatataaatatacactaattattaatatcaataacaatcgagtattaatatataggtcatttttaaatcccttttgggttccgtcccaaacggcgtttcggtctgcgtcgccgccatggccatgccgagcctctccgcgtgctcctccatcgaggacgacttcaactatggcagctcggtggcgtctgccagcgtgcacatacgaatggcatttctaagaaaagtctacggtatcctttgtctacaatttcttttaacaacggcaacaactgcagtatttttatactttgactgcatgcggacatttatacaagggagtcctgttctaatattggcatcaatgttcggatctataggcttgattttcgcattgactttacacagacataaacatcccctgaatctgtacctgctttgtggatttacactgtcggaatctctaacgctggcctctgttgttactttctatgatgtgcatgtcgttatgcaagctttcatgctgactactgcagcgtttcttgctctgactacatatactctacaatcaaagagagatttcagtaaacttggagcaggattgtttgctgctttgtggattttaattttgtcaggactcttggggatatttgtgcaaaatgagacagtgaagctggtcctgtctgcttttggggcccttgtattctgtggattcattatctatgacacgcactcactaatacataagctctcgcctgaagagtatgtgttagcctctatcaatctctacttggatatcatcaatctgttcttgcatctgttgcagcttttggaagtatctaataagaaataaagtttaaaatagaattaataaaaacatataggtcattttttaaacatggattggaaaccaaggtagttagttaatacacacaagatatatttttttcacatcatccacccatgggtaacaccaaggttgttagttaataatatacaagatattttttctcactctgatccatgtaaaccaaggacgagataagacactctcattcctcatccacaaccccattaaaaaaatggaaattaaagccctctattagcataaacggctacaggtctaccatcaggttaaccttcgtctaccttcacaatggcctctccttgtgcccagttcagaccctgtcattgccactccctgaataccgtggccgacgtcagacattgtctgactgaatacatcctgtgggtttctcatagatggacccatagagaaactgcagggcctctctacaggcttctcatctctttcagaactgatgcaacggagctctttggtggtgagttgaaggagttctcggattcacttccgtgggacaatatcgacaattgcgtggagatcattaaatgtttcatcagaaatgactccatgaaaaccgccgaagaacttcgtgcaatcattggactttgtactcaatcagctatcgtctctggaagagtcttcaacgataagtatatcgacatactacttatgctgcgaaagattctgaacgagaacgactatctcaccctcttggatcatatccgcactgctaaatactaaatctccttcatgctctctcactacactttttatcatcttatgaggaatgattgccttcgtgaaataggaataattagcaccagaatagctatggattgcacatgtattctatgtcgtctactggatgaagatgtgacgtacaaaaaaataaaactagaaattgaaacgtgtcacaacttatcaaaacatatagatagacgaggaaacaatgcgctacattgttacgtctccaataaatgcgatacagacattaagattgttctctcgcggagtcgagagactttgtagaaacaacgaaggattaactccgctaggagcatacagtaagcatagatacgtaaaatctcagattgtgcatctactgatatccagctattcaaattcctctaacgaactcaagtcgaatataaatgatttcgatctgtattcgtataatatcgacttacgtctgctaaaatacctaattgtggataaacggatacgtccgtccaagaatacgaattatgcaatcaatggtctcggattggtggatatatacgtaacgacgcctaatccgagaccagaagtattgctatggcttcttaaatcagaatgttacagcaccggttacgtatttcgtacctgtatgtacgacagtgatatgtgtaagaactctcttcattactatatatcgtctcatagagaatctcaatctctatccaaggatgtaattaaatgtttgatcaataacaatgtttccatccatggcagagacgaaggaggatctttacccatccaatactactggtctttctcaaccatagatatagagattgttaaattattattaataaaggatgtggacacgtgtagagtatacgacgtcagccctatattagaggcgtattatctaaacaagcgatttagagtaaccccatataatgtagacatggaaatcgttaatcttcttattgagagacgtcatactcttgtcgacgtaatgcgtagtattacttcgtacgattccagagaatataaccactacatcatcgataacattctaaagagatttagacaacaggatgtacaagccatgttgataaactacttacattacggcgatatggtaagtatacctatcattcaatgcatgttagataacggagcaaccatggataagacgacggacaacaactatcctctacacgactactttgttaataataatctcgtcgatgtaaacgtcgtaaggtttatcgtggaaaatatggacacgcggctgtaaatcacatatcgaacaatggccgtctatgtatgtacggtctgatattatcgagatttaataattgcgggtatcactgttatgaaaccatactgatagatgtatttgatatactaagcaagtacatggatgatatagatatgatcgataactctactatattacgcggtcgatgtcaataatatacaatttgcaaagcggttattggaatatggagcgagtgtcacaacatcacgctcgataatcaatacggccatccagaaaagcagttaccaaagagaaaacaaaacgaggatagttgatttattactgagttaccatcccactctagagactatgattgacgcatttaatagagatatacgctatctatatcctgaaccattatcggcatgtatcagatacgccttaatcctagatgatgattttccttctaaagtaaagtatgatatcgccggtcgtcataaggaactaaagcgctatagagtagacattaatagaatgaagaatgcctacatatcaggcgtctccatgtttgatatattatttaaacgaagcaaacgccacagattgagatacgcaaagaatccgacatcaaatggtacaaaaaagaactaacgtccatcattacagaaactgtaaagaacaatgagaggatcgactccatagtggacaacattaatacagacgataacttgatttcgaaattacccatggagatactttattactccattaaataatttatcatggagcgataatgtcctgtttcatttgtttccatgacatattacaaaatcgattccgtccaagatgataaaaacatttaccggcatcataaacacggagtttattttatatgtctcgcataaacattactaaaaaaatatattgttcggttttctttcacatctttaattatgaaaaagtaaatcattatgagatggacgagattgtacgcatcgttcgcgacagtatgtggtacatacctaacgtatttatggacgacggtaagaatgaaggtcacgtttctgtcaacaatgtctgtcatatgtattttacgttctttgatgtggatacatcgtctcatctgtttaagctagttattaaacactgcgatctgaataaacgaggtaactctccattacattgctatacgatgaatacacgatttaatccatctgtattaaagatattgttacaccacggcatgcgtaactttgatagcaaggatgaccactatcaatcgataacaagatctttgatatactaacggacaccattgatgactttagtaaatcatccgatctattgctgtgttatcttagatataaattcaatgggagcttaaactattacgttctgtacaaaggatccgaccctaattgcgccgacgaggatgaactcacttctcttcattactactgtaaacacatatccacgttctacgaaagcaattattacaagttaagtcacactaagatgcgagccgagaagcgattcatctacgcgataatagattatggagcaaacattaacgcggttacacacttaccttcaacagtataccaaacatagtcctcgtgtggtgtatgctcttttatctcgaggagccgatacgaggatacgtaataatcttgattgtacacccatcatggaacgattgtgcaacaggtcatattctcataatgttactcaattggcacgaacaaaaggaagaaggacaacatctactttatctattcataaaacataatcaaggatacactctcaatatactacggtatctattagataggttcgacattcagaaagacgaatactataataccgcctttcaaaattgtaacaacaatgttgcctcatacatcggatacgacatcaaccttccgactaaagacggtattcgacttggtgtttgaaaacagaaacatcatatacaaggcggatgttgtgaatgacatcatccaccacagactgaaagtatctctacctatgattaaatcgttgttctacaagatgtctctccctacgacgattactacgtaaaaaagatactagcctactgcctattaagggacgagtcattcgcggaactacatagtaaattctgtttaaacgaggactataaaagtgtatttatgaaaaatatatcattcgataagatagattccatcatcgtgacataagtcgcctcaaagagattcgaatctccgacaccgacctgtatacggtatcacagctatcttaaagccatacattcagacagtcacatttcatttcccatgtacgacgatctcatagaacagtgccatctatcgaaactcgtcgacaaagcactcaataaattagagtctaccatcgatggccaatctagactatcgtatttgcctccggaaattatgcgcaatatcatctaaacagtatgttgtacggaaagaaccattacaaatattatccatgattggagaagtaggaaacaggaacaagacaacgattactacattattaaattatgaagtccgtattatactcgtatatattgtttctctcatgtataataataaacggaagagatatagcaccgcatgcaccatccgatggaaagtgtaaagacaacgaatacaaacgccataatctgtgtccgggaacatacgcttccagattatgcgatagcaagactaacacacgatgtacgccgtgtggttcgggtaccttcacatctcgcaataatcatttacccgcttgtctaagttgtaacggaagacgcgatcgtgtaacacgactcacaatagaatctgtgaatgctctcccggatattattgtcttctcaaaggatcatccggatgcaaggcatgtgtttcccaaacaaaatgtggaataggatacggagtatccggagacgtcatctgttctccgtgtggtctcggaacatattctcacaccgtctcttccgcagataaatgcgaacccgtacccagaaatacgtttaactatatcgatgtggaaattaacctgtatccagttaacgacacgtcgtgtactcggacgaccactaccggtctcagcgaatccatctcaacgtcggaactaactattactatgaatcataaagactgtaatcccgtatttcgtgatggatacttctccgttcttaataaggtagcgacttcaggtttctttacaggagaaaggtgtgcactctgaatttcgagattaaatgcaataacaaagattcttcctccaaacagttaacgaaagcaaagaatgatactatcatgccgcattcggagacagtaactctagtgggcgacatctatatactatatagtaataccaatactcaagactacgaaactgatacaatctcttatcatgtgggtaatgttctcgatgtcgatagccatatgcccggtagttgcgatatacataaactgatcactaattccaaacccacccactttttatagtaagtttttcacccataaataataaatacaataattaatttctcgtaaaagtagaaaatatattctaatttattgcacggtaaggaagtagaatcataaagaacagtactcaatcaatagcaattatgaaacaatatatcgtactggcatgcatgtgcctggcggcagctgctatgcctgccagtcttcagcaatcatcctcatcctcctcctcgtgtacggaagaagaaaacaaacatcatatgggaatcgatgttattatcaaagtcacaaagcaagaccaaacaccgaccaatgataagatttgccaatccgtaacggaaattacagagtccgagtcagatccagatcccgaggtggaatcagaagatgattccacatcagtcgaggatgtagatcctcctaccacttattactccatcatcggtggaggtctgagaatgaactttggattcaccaaatgtcctcagattaaatccatctcagaatccgctgatggaaacacagtgaatgctagattgtccagcgtgtccccaggacaaggtaaggactctcccgcgatcactcatgaagaagctcttgctatgatcaaagactgtgaagtgtctatcgacatcagatgtagcgaagaagagaaagacagcgacatcaagacccatccagtactcgggtctaacatctctcataagaaagtgagttacgaagatatcatcggttcaacgatcgtcgatacaaaatgcgtcaagaatctagagtttagcgttcgtatcggagacatgtgcaaggaatcatctgaacttgaggtcaaggatggattcaagtatgtcgacggatcggcatctgaaggtgcaaccgatgatacttcactcatcgattcaacaaaactcaaagcgtgtgtctgaatcgataactctattcatctgaaattggatgagtagggttaatcgaacgattcaggcacaccacgaattaaaaaagtgtaccggacactatattccggtttgcaaaacaaaaatgttcttaactacattcacaaaaagttacctctcgcgacttcttctttttctgtctcaatagtgtgatacgattatgacactattcctattcctattcctatttcctttcagagtatcacaaaaatattaaacctctttctgatggtctcataaaaaaagttttacaaaaatatttttattctctttctctctttgatggtctcataaaaaaagttttacaaaaatatttttattctctttctctctttgatggtctcataaaaaaagttttacaaaaatatttttattctctttctctctttgatggtctcataaaaaaagttttacaaaaatatttttattctctttctctctttgatggtctcataaaaaaagttttacaaaaatatttttattctctttctctctttgatggtctcataaaaaaagttttacaaaaatatttttattctctttctctctttgatggtctcataaaaaaagttttacaaaaatatttttattctctttctctctttgatggtctcataaaaaaagttttacaaaaatatttttattctctttctctctttgatggtctcataaaaaaagttttacaaaaatatttttattctctttct

SEQ ID NO: 23 - DNA, 188863 bp, Artificial Sequence
  LIVP 5.1.1
cgattaaaactttttttatgagaccatcaaagagagaaagagaataaaaatatttttgtaaaactttttttatgagaccatcaaagagagaaagagaataaaaatatttttgtaaaactttttttatgagaccatcaaagagagaaagagaataaaaatatttttgtaaaactttttttatgagaccatcaaagagagaaagagaataaaaatatttttgtaaaactttttttatgagaccatcaaagagagaaagagaataaaaatatttttgtaaaactttttttatgagaccatcaaagagagaaagagaataaaaatatttttgtaaaactttttttatgagaccatcaaagagagaaagagaataaaaatatttttgtaaaactttttttatgagaccatcaaagagagaaagagaataaaaatatttttgtaaaactttttttatgagaccatcaaagagagaaagagaataaaaatatttttgtaaaactttttttatgagaccatcaaagagagaaagagaataaaaatatttttgtaaaactttttttatgagaccatcaaagagagaaagagaataaaaatatttttgtaaaactttttttatgagaccatcaaagagagaaagagaataaaaatatttttgtaaaactttttttatgagaccatcaaagagagaaagagaataaaaatatttttgtaaaactttttttatgagaccatcaaagagagaaagagaataaaaatatttttgtaaaactttttttatgagaccatcaaagagagaaagagaataaaaatatttttgtaaaactttttttatgagaccatcaaagagagaaagagaataaaaatatttttgtaaaactttttttatgagaccatcaaagagagaaagagaataaaaatatttttgtaaaactttttttatgagaccatcaaagagagaaagagaataaaaatatttttgtaaaactttttttatgagaccatcagaaagaggtttaatatttttgtgatactctgaaaggaaataggaataggaataggaatagtgtcataatcgtatcacactattgagacagaaaaagaagaagtcgcgagaggtaactttttgtgaatgtagttaagaacatttttgttttgcaaaccggaatatagtgtccggtacacttttttaattcgtggtgtgcctgaatcgttcgattaaccctactcatccaatttcagatgaatagagttatcgattcagacacacgctttgagttttgttgaatcgatgagtgaagtatcatcggttgcaccttcagatgccgatccgtcgacatacttgaatccatccttgacctcaagttcagatgattccttgcacatgtctccgatacgaacgctaaactctagattcttgacgcattttgtatcgacgatcgttgaaccgatgatatcttcgtaactcactttcttatgagagatgttagacccgagtactggatgggtcttgatgtcgctgtctttctcttcttcgctacatctgatgtcgatagacacttcacagtctttgatcatagcaagagcttcttcatgagtgatcgcgggagagtccttaccttgtcctggggacacgctggacaatctagcattcactgtgtttccatcagcggattctgagatggatttaatctgaggacatttggtgaatccaaagttcattctcagacctccaccgatgatggagtaataagtggtaggaggatctacatcctcgactgatgtggaatcatcttctgattccacctcgggatctggatctgactcggactctgtaatttccgttacggattggcaaatcttatcattggtcggtgtttggtcttgctttgtgactttgataataacatcgattcccatatgatgtttgttttcttcttccgtacacgaggaggaggatgaggatgattgctgaagactggcaggcatagcagctgccgccaggcacatgcatgccaggacgatatattgtttcataattgctattgattgagtactgttctttatgattctacttccttaccgtgcaataaattagaatatattttctacttttacgagaaattaattattgtatttattatttatgggtgaaaaacttactataaaaagtgggtgggtttggaattagtgatcagtttatgtatatcgcaactaccgggcatatggctatcgacatcgagaacattacccacatgataagagattgtatcagtttcgtagtcttgagtattggtattactatatagtatatagatgtcgcccactagagttactgtctccgaatgcggcatgatagtatcattctttgctttcgttaactgtttggaggaagaatctttgttattgcatttaatctcgaaattcagagtgcacacctttctcctgtaaagaatcctgaagttgctaccttattaagaacggagaagtatccatcacgaaagacgggattacagtctttatgattcatagtaatagttagttccgacgttgagatggattcgctgagaccggtagtggtcgtccgagtacacgacgtgtcgttaactggatacaggttaatttccacatcgatatagttaaacgtatttctgggtacgggttcgcatttatctgcggaagagacggtgtgagaatatgttccgagaccacacggagaacagatgacgtctccggatactccgtatcctattccacattttgtttgggaaacacatgccttgcatccggatgatcctttgagaagacaataatatccgggagagcattcacagattctattgtgagtcgtgttacacgatcgcgtcttccgttacaacttagacaagcgggtaaatgattattgcgagatgtgaaggtacccgaaccacacggcgtacatcgtgtgttagtcttgctatcgcataatctggaagcgtatgttcccggacacaaattatggcgtttgtattcgttgtctttacactttccatcggatggtgcatgcggtgctatatctcttccgtttattattatacatgagagaaacaatatatacgagtataatacggacttcatgatttaataatgtagtaatcgttgtcttgttcctgtttcctacttctccaatcatatagatattttctttctatcatggataatatttgtaatggttctttccgtacaacatactgtttagatgatattgcgcataatttccggaggcaaatacgatagtctagattgaccgatggtagactctaatttattgagtgctttgtcgacgagtttacttttacgctccatcgatagatggcactgttctatgagatcgtcgtacatgggaaatgaaatgtgactgtctgaatgtatggctttaagatagctgtgataccgtatacaggtcggtgtcggagattcgaatctctttgaggcgacttatgtcacgatgatggaatctatcttatcgaatgatatatttttcataaatacacttttatagtcctcgtttaaacagaatttactatgtagttccgcgaatgactcgtcccttaataggcagtaggctagtatcttttttacgtagtaatcgtcgtagggagagacatcttgtagaacaacgatttaatcataggtagagatactttcagtctgtggtggatgatgtcattcacaacatccgccttgtatatgatgtttctgttttcaaacaccaagtcgaataccgtctttagtcggaaggttgatgtcgtatccgatgtatgaggcaacattgttgttacaattttgaaaggcggtattatagtattcgtctttctgaatgtcgaacctatctaatagataccgtagtatattgagagtgtatccttgattatgttttatgaatagataaagtagatgttgtccttcttccttttgttcgtgccaattgagtaacattatgagaatatgacctgttgcacaatcgttccatgatgggtgtacaatcaagattattacgtatcctcgtatcggctcctcgagataaaagagcatacaccacacgaggactatgtttggtatactgttgaaggtaagtgtgtaaccgcgttaatgtttgctccataatctattatcgcgtagatgaatcgcttctcggctcgcatcttagtgtgacttaacttgtaataattgctttcgtagaacgtggatatgtgtttacagtagtaatgaagagaagtgagttcatcctcgtcggcgcaattagggtcggatcctttgtacagaacgtaatagtttaagctcccattgaatttatatctaagataacacagcaatagatcggatgatttactaaagtcatcaatggtgtccgttagtatatcaaagatcttgttatcgattgatagtggtcatccttgctatcaaagttacgcatgccgtggtgtaacaatatctttaatacagatggattaaatcgtgtattcatcgtatagcaatgtaatggagagttacctcgtttattcagatcgcagtgtttaataactagcttaaacagatgagacgatgtatccacatcaaagaacgtaaaatacatatgacagacattgttgacagaaacgtgaccttcattcttaccgtcgtccataaatacgttaggtatgtaccacatactgtcgcgaacgatgcgtacaatctcgtccatctcataatgatttactttttcataattaaagatgtgaaagaaaaacagaacaatatatttttttagtaatgtttatgcgagacatataaaataaactccgtgtttatgatgccggtaaatgtttttatcatcttggacggaatcgattttgtaatatgtcatggaaacaaatgaaacaggacattatcgctccatgataaattatttaatggagtaataaagtatctccatgggtaatttcgaaatcaagttatcgtctgtattaatgttgtccactatggagtcgatcctctcattgttctttacagtttctgtaatgatggacgttagttcttttttgtaccatttgatgtcggattctttgcgtatctcaatttgtggcgtttgcttcgtttaaagaatatatcaaacatggagacgcctgatatgtagacattcttcattctattaatgtctactctatagcgctttagttccttatgacgaccggagatatcatactttactttagaaggaaaatcatcatctaggattaaggcgtatctgatacaggcgaataatggttcaggatatagatagcgtatatctctattaaatgcgtcaatcatagtctctagagtgggatggtagctaagtaataaatcaactatcctcgttttgttttctctttggtaactgcttttctggatggccgtattgattatcgagcgtgacactcgctccatattccaataaccgctttgcaaattgtatattattgacatcgaccgcgtaatatagtagagttatcgatcatatctatatcatccatgtacttgcttagtatatcaaatacatctatcagtatggtttcataacagtgatacccgcaattattaaatctcgataatatcagaccgtacatacatagacggccattgttagatatgtgatttacagccgcgtgtccatattttccacgataaaccttacgacgtttacatcgacgagattattattaacaaagtagtcgtgtagaggatagttgttgtccgtcgtcttatccatggttgctccgttatccaacatgcattgaatgataggtatacttaccatatcgccgtaatgtaagtagtttatcaacatggcttgtacatcctgttgtctaaatctctttagaatgttatcgatgatgtagtggttatattctctggaatcgtacgaagtaatactacgcattacgtcgacaagagtatgacgtctctcaataagaagattaacgatttccatgtctacattatatggggttactctaaatcgcttgtttagataatacgcctctaatatagggctgacgtcgtatactctacacgtgtccacatcctttattaataatttaacaatctctatatctatggttgagcaagaccagtagtattggatgggtaaagatcctccttcgtctctgccatggatggaaacattgttatcgatcaaacatttaattacatccttggatagagattgagattctctatgagacgatatatagtaatgaagagagttcttacacatatcactgtcgtacatacaggtacgaaatacgtaaccggtgctgtaacattctgatttaagaagccatagcaatacttctggtctcggattaggcgtcgttacgtatatatccaccaatccgagaccattgattgcataattcgtattcttggacggacgtatccgtttatccacaattaggtattttagcagacgtaagtcgatattatccgaatacagatcgaaatcatttatattcgacttgagttcgttagaggaattcgaatagctggatatcagtagatgcacaatctgagatttgacgtatctatgcttactgtatgctcctagcggagttaatccttcgttgtttctacaaagtctctcgactccgcgagagagtaacagccgaacaatcttaatgtctgtatcgcatttattgaagacgtaacaatgtagcgcattgtttcctcgtctatctatatgttttgataagttgtgacacgtttcaatctctggttttatttttttgtacgtcacatcttcatccagtagacgacatagaatagtgcactctctaccacaataatccatagctattctggtgctaattattcctatttcacgaaggcaatcattcctcataagatgataaaaagtgtagtgagagagcatgaaggagatttagtatttagcagtgcggatatgatccaagagggtgagatagtcgttctcgttcagaatctttcgcagcataagtagtatgtcgatatacttatcgttgaagactctttataaaagtctatttgtttatatttattgcggatagcagtatttccctataaaaagtatacgtcctgtggtgtctttaatcatgtacatgaatggatggtttatgtagaccttcgtacgatataccatcgaaaagttaatcgtaaatactcctgtaacggccgatgcttctgtatactcctcattaacatctataaacgtcgtatgtagaaatttttctacagtgatagtttcattacacatcttgctaaaatctgcataatatccgaatatattagtaagtcctaaattttctaaaatcggtaccagattatacggttctgtcatttccactttaaactttggcatatacaagtctatacttttagtagataacataccacaccattttttaaatttttcatctgttatatttttttctatgttatatataccttctatgtcgtccggtagtataattaccatactagagtttccctcgtatggaatatcgataatagagaatcctccgaataattcattaatatgtacatattgcaagttattctcggtacccaccatcatatcaacgctggtaactatattcttagaaatataaaacttgtctgtatatgtaagatgtttagaaaatggatatttccacattgctttaaaatggacggcgctaacaactgtcatacgagtattaatggatagcggactagtcaataaggaattaattttaccatttgtcattgtcttaacccattcgttgattagttcctttgtttggttagcattattaaagtttacagtttgaaaatcgtcttttattttttgtaggaaggaggcgtggaactcgatactatcgctaccgtatattttatttgcggtagctagtgtcgcacaatacggaatatctacctccatgtcatcattattgtcatcgggtgtattctcattcatattctctatatattttgatagttgttcagctgtagaaccagctgctccatgatttagaatagataaagtagataaaatggaaactggagaaatcaaaacattttcatcagggtgttttaagattagttctttaaagatatccatggtatagacctaacgataacgatatatatcataaataaataatgttaaatttcaatttatgtttgtaccccgtattcatacttaacaaattggtattgcgtacacaatcaatcatattacataccattaataatgcaagcataaaaaattgttagtagatgtttctaaatataggttccgtaagcaaagaatataagaatgaagcggtaatgataaaatcaatcgttatctaaaatgatcatactcatttattttattctattatattaacacatacatttttaacagcaacacattcaatattgtattgttatttttatattatttacacaattaacaatatattattagtttatattactgaattaataatataaaattcccaatcttgtcataaacacacactgagaaacagcataaacacagaatccatcaaaaatgttgataaattatctgatgttgttgttcgctgctatgataatcagatcattcgccgatagtggtaacgctatcgaaacgacattgccagaaattacaaacgctacaacagatattccagctatcagattatgcggtccagagggagatggatattgtttacacggtgactgtatccacgctagagatattgacggtatgtattgtagatgctctcatggttatacaggcattagatgtcagcatgtagtattagtagactatcaacgttcagaaaacccaaacactacaacgtcatatatcccatctcccggtattatgcttgtattagtaggcattattatgtgttgtctattatctgtttataggttcactcgacgaactaaactacctatacaagatatggttgtgccataatttttataaatttttttatgagtatttttacaaaaatgtataaagtgtatgtcttatgtatatttataaaaatgctaagtatgcgatgtatctatgttatttgtatttatctaaacaatacctctacctctagatattatacaaaaattttttatttcggcatattaaagtaaaatctagttaccttgaaaatgaatacagtgggtggttccgtatcaccagtaagaacataatagtcaaatacagtatccgattgagattttgcatacaatactagtctagaaagaaatttgtaatcatcttctgtgacgggagtccatatatctgtatcatcgtctagtttatcagtgtcccatgctatattcctgttatcatcattagttaatgaaaataactctcgtgcttcagaaaagtcaaatattgtatccatacatacatctccaaaactatcgcttatacgtttatctttaacgatacctatacctagatggttatttactaacagacattttccagatctattgactataactcctatagtttccacatcaaccaagtaatgatcatctattgttatataacaataacataactcttttccatttttatcagtatgtatatctatatcaacgtcgtcgttgtagtgaatagtagtcattgatctattatatgaaacggatatgtctagaacggcaattgttttacgtccagttaacactttcgttgatttaaagtctagagtctttgcaaacataatatccttatccgactttatatttcctgtagggtggtataattttattttgcctccacatatcggtgtttccaaatatattactagacaatattccatatagttattagttaagggtacccaattagaacacgtacgcttattatcatcatttggatcgtatttcataaaagttattgtgttatcgatgtcaacacattctacattttttaatcgtctatatagtatttttctgatattttctataatatcagaattgtcttccatcggaagttgtatactatcggaatcagttacatgtttaaataattctctgatgtcattccttatacaatcaaattcattattaaacagtttaatagtctgtagacctttatcgtcgtaaatatccattgtcttattagttacgcttatttttatgtgtttttacgttgctttattatattttataagaatgattgtttgacgaatcacgagaactattaagacacattattaggtatatattataaaaaagtttttgattacgatgttataagaggaaagaggacacattaacatcatacatcaattaactacattcttataacatcgtaatcaaaagaattgcaattttgatgtataacaactgtcaatgggttatggaattgtatattacatattatacggtatgttggtaacgacaaataccggtcggtaattgtctgccggtgtaatagaattatatatatctatctattacaccggccttgtatacataataataagttgtggtagtatgatctccatatttataatttaggactttgtattcagtatttttggaatcataaaaaataaaaaaaagttttactaatttaaaatttaaaaagtatttacatttttttcactgtttagtcgcggatatggaattcgatcctgccaaaatcaatacatcatctatagatcatgtaacaatattacaatacatagatgaaccaaatgatataagactaacagtatgcattatccgaaatattatatcaatatcacaaaaataaatacacatttggctaatcaatttcgggcttggaaaaaacgtatcgccggaagggactatatgactaacttatctagagatacaggaatacaacaatcaaaacttactgaaactatacgtaactgtcaaaaaaatagaaacatatatggtctatatatacactacaatttagttattaattggataaccgatgtgattatcaatcaatattaagagggttggtaaattggtacatagctaataatacctatacacccaataatacaacaaccatttctgagttggatatcatcaaaatactaaataaatacgaggacgtgtatagagtaagtaaagaaaaagaatgtggaatttgctatgaagttgtttactcaaaacgatagatactttggtttattggattcgtgtactcatatattttgcataacatgcatcaatatatggcatagaacacgaagagaaaccggtgcgtcggataattgtcctatatgccgtacccgttttagaaacataacaatgagcaagttctataagctagttaactaataaataaaaagtttaatttgttgacgacgtatgtcgttattttttctcgtataaaagattaaattcaattcaattcgttgtttctaatataatctgccgtattggatggattctcaagacaattgcatttagattatattatcatgaataaaaatagtagcacacaactacttcagcaaacattctttttataaatgccatctagcgtagcgaggacacaagtgaacctataattatcaaatttattagtatcggttacatgaaggactttacgtagagtgacgattccactatctgtggtacgaacggtttcatcttctttgatgccatcacccagatgttctataaacttggtatcctcgtccgatttcatatcctttgccaaccaatacatatagctaaactcaggcatatgttccacacatcctgaacaatgaaattctccagaagatgttacaatgtctagatttggacatttggtttcaaccgcgttaacatatgagtgaacacacccatacatgaaagcgatgagaaataggattctcatcttgccaaaatatcactagaaaaaatttatttatcagttttaaaggtataaaaaatacttattgttgctcgaatattttgtatttgatggtatacggaagattagaaatgtaggtattatcatcaactgattctatggttttatgtattctatcatgtttcactattgcgttggaaataatatcatatgcttccacatatattttattttgttttaactcataatactcacgtaattctggattattggcatatctatgaataattttagctccatgatcagtaaatattaatgagaacatagtattaccacctaccattatttttttcatctcattcaattcttaattgcaaagatctatataatcattatagcgttgacttatggactctggaatcttagacgatgtacagtcatctataatcatggcatatttaatacattgttttatagcatagtcgttatctacgatgttagatatttctctcaatgaatcaatcacacaatctaatgtaggtttatgacataatagcattttcagcagttcaatgtttttagattcgttgatggcaatggctatacatgtatatccgttatttgatctaatgttgacatctgaaccggattctagcagtaaagatactagagattgtttattatatctaacagccttgtgaagaagtgtttctcctcgtttgtcaatcatgttaatgtctttaagataaggtaggcaaatgtttatagtactaagaattgggcaagcataagacatgtcacaaagacccttttttgtatgtataagtgtaaaaattataacatccatagttggatttacataggtgtccaatcgggatctctccatcatcgagataattgatggcatctcccttccttttttagtagatatttcatcgtgtaagaatcaatattaatatttctaaagtatccgtgtatagcctctttatttaccacagctccatattccactagagggatatcgccgaatgtcatatactcaattagtatatgttggaggacatccgagttcattgttttcaatatcaaagagatggtttccttatcatttctccatagtggtacaatactacacattattccgtgcggctttccattttccaaaaacaatttgaccaaatctaaatctacatctttattgtatctataatcactatttagataatcagccataattcctcgagtgcaacatgttagatcgtctatatatgaataagcagtgttatctattcctttcattaacaatttaacgatgtctatatctatatgagatgacttaatataatattgaagagctgtacaatagtttttatctataaaagacggcttgattccgtgattaattagacatttaacaacttccggacgcacatatgctctcgtatccgactctgaatacagatgagagatgatatacagatgcaatacggtaccgcaatttcgtagttgataatcatcatacgcgtatcagtactcgtcctcataaagaacactgcagccattttctatgaacaaatcaataattttagaaacaggatcattgtcattacataattttctataactgaacgatggttttcacatttaacactcaagtcaaatccatgttctaccaacacctttatcaagtcaacgtctacatttttggatttcatatagctgaatatattaaagttatttatgttgctaaatccagtggcttctagtagagccatcgctatatccttattaactttaacatgtctactatttgtgtattcttctaatggggtaagctgtctccaatttttgcgtaatggattagtgccactgtctagtagtagtttgacgacctcgacattattacaatgctcattaaaaaggtatgcgtgtaaagcattattcttgaattggttcctggtatcattaggatctctgtctttcaacatctgtttaagttcatcaagagccacctcctcattttccaaatagtcaaacattttgactgaatgagctactgtgaactctatacacccacacaactaatgtcattaaatatcatgtcaaaaacttgtacaattattaataaaaataatttagtgtttaaattttaccagttccagattttacacctccgttaatacctccattaaccccactggacgatcctcctccccacattccaccgccaccagatgtataagttttagatcctttattactaccatcatgtccatggataaagacactccacatgccgccactaccccctttagaagacatattaataagacttaaggacaagtttaacaataaaattaatcacgagtaccctactaccaacctacactattatatgattatagtttctatttttacagtaccttgactaaagtttctagtcacaagagcaatactaccaacctacactattatatgattatagtttctatttttataggaacgcgtacgagaaaatcaaatgtctaatttctaacggtagtgttgataaacgattatcgtcaatggatacctcctctatcatgtcgtctattttcttactttgttctattaacttattagcattatatattatttgattataaaacttatattgcttattagcccaatctgtaaatatcggattattaacatatcgtttctttgtaggtttatttaacttgtacatcactgtaagcatgtccttaccatttattttaatttgacgcatatccgcaatttctttttcgcagtcggttataaattctatatatgatggatacatgctacatgtgtacttataatcgactaatatgaagtacttgatacatattttcagtaacgatttattattaccacctatgaataagtacctgtgatcgtctaggtaatcaactgttttcttaatacattcgatggttggtaatttactcagaataatttccaatatcttaatatataattctgctatttctgggatatatttatctgccagtataacacaaatagtaatacatgtaaacccatattttgttattatattaatgtctgcgccattatctattaaccattctactaggctgacactatgcgactcaatacaatgataaagtatactacatccatgtttatctattttgtttatatcattaatatacggcttacaaagttttagtatcgataacacatccaactcacgcatagagaaggtagggaataatggcataatatttattaggttatcatcattgtcattatctacaactaagtttccattttttaaaatatactcgacaactttaggatctctattgccaaatttttgaaaatatttatttatatgcttaaatctatataatgtagctccttcatcaatcatacatttaataacattgatgtatactgtatgataagatacatattctaacaatagatcttgtatagaatctgtatatcttttaagaattgtggatattaggatattattacataaactattacacaattctaaaatataaaacgtatcacggtcgaataatagttgatcaactatataattatcgattttgtgatttttcttcctaaactgtttacgtaaatagttagatagaatattcattagttcatgaccactatagttactatcgaataacgcgtcaaatatttcccgtttaatatcgcatttgtcaagataataatagagtgtggtatgttcacgataagtataataacgcatctctttttcgtgtgaaattaaatagtttattacgtccaaagatgtagcataaccatcttgtgacctagtaataatataataatagagaactgttttacccattctatcatcataatcagtggtgtagtcgtaatcgtaatcgtctaattcatcatcccaattataatattcaccagcacgtctaatctgttctattttgatcttgtatccatactgtatgttgctacatgtaggtattcctttatccaataatagtttaaacacatctacattgggatttgatgttgtagcgtatttttctacaatattaataccatttttgatactatttatttctatacctttcgaaattagtaatttcaataagtctatattgatgttatcagaacatagatattcgaatatatcaaaatcattgatatttttatagtcgactgacgacaataacaaaatcacaacatcgtttttgatattattatttttcttggtaacgtatgcctttaatggagtttcaccatcatactcatataatggatttgcaccactttctatcaatgattgtgcactgctggcatcgatgttaaatgttttacaactatcatagagtatcttatcgttaaccatgattggttgttgatgctatcgcattttttggtttctttcatttcagttatgtatggatttagcacgtttgggaagcatgagctcatatgatttcagtactgtagtgtcagtactattagtttcgatcagatcaatgtctagatctatagaatcaaaacacgataggtcagaagataatgaatatctgtacgcttctttttgtactgtaacttctggttttgttagatggttgcatcgtgctttaacgtcaatggtacaaattttatcctcgctttgtgtatcatattcgtccctactataaaattgtatattcagattatcatgcgatgtgtatacgctaacggtatcaataaacggagcacaccatttagtcataaccgtaatccaaaaatttttaaagtatatcttaacgaaagaagttgtgtcattgtctacggtgtatggtactagatcctcataagtgtatatatctagagtaatgtttaatttattaaatggttgataatatggatcctcgtgacaatttccgaagatggaaataagacataaacacgcaataaatctaattgcggacatggttactccttaaaaaaatacgaataatcaccttggctatttagtaagtgtcatttaacactatactcatattaatccatggactcataatctctatacgggattaacggatgttctatatacggggatgagtagttctcttctttaactttatactttttactaatcatatttagactgatgtatgggtaatagtgtttgaagagctcgttctcatcatcagaataaatcaatatctctgtttttttgttatacagatgtattacagcctcatatattacgtaatagaacgtgtcatctaccttattaactttcaccgcatagttgtttgcaaatacggttaatcctttgacctcgtcgatttccgaccaatctgggcgtataatgaatctaaactttaattgcttgtaatcattcgaaataatttttagtttgcatccgtagttatcccctttatgtaactgtaaatttctcaacgcgatatctccattaataatgatgtcgaattcgtgctgtatacccatactgaatggatgaacgaataccgacggcgttaatagtaatttactttttcatctttacatattgggtactagttttactatcataagtttataaattccacaagctactatggaataagccaaccatcttagtataccacacatgtcttaaagtttattaattaattacatgttgttttatatatatcgctacgaatttaaagagaaattagtttaggaagaaaaattatctatctacatcatcacgtctctgtattctacgatagagtgctactttaagatgcgacagatccgtgtcatcaaatatatactccattaaaatgattattccggcagcgaacttgatattggatatatcacaacctttgttaatatctacgacaatagacagcagtcccatggttccataaacagtgagtttatctttctttgaagagatattttgtagagatcttataaaactgtcgaatgacatcgcatttatatctttagctaaatcgtatatgttaccatcgtaatatctaaccgcgtctatcttaaacgtttccatcgctttaaagacgtttccgatagatggtctcatttcatcagtcatactgagccaacaaatataatcgtgtataacatctttgatagaatcagactctaaagaaaacgaatcggctttattatacgcattcatgataaacttaatgaaaaatgtttttcgttgtttaagttggatgaatagtatgtcttaataattgttattatttcattaattaatatttagtaacgagtacactctataaaaacgagaatgacataactaatcataactagttatcaaagtgtctaggacgcgtaattttcatatggtatagatcctgtaagcattgtctgtattctggagctattttctctatcgcattagtgagttcagaatatgttataaatttaaatcgaataacgaacataactttagtaaagtcgtctatattaactcttttattttctagccatcgtaataccatgtttaagatagtatattctctagttactacgatctcatcgttgtctagaatatcacatactgaatctacatccaattttagaaattggtctgtgttacatatctcttctatattattgttgatgtattgtcgtagaaaactattacgtagaccattttctttataaaacgaatatatagtactccaattatctttaccgatatatttgcacacataatccattctctcaatcactacatctttaagattttcgttgttaagatatttggctaaactatataattctattagatcatcaacagaatcagtatatatttttctagatccaaagacgaactctttggcgtcctctataatattcccagaaaagatattttcgtgttttagtttatcgagatctgatctgttcatatacgccatgattgtacggtacgttatgataaccgcataaaataaaaatccattttcatttttaaccaatactattcataattgagattgatgtaatactttgttactttgaacgtaaagacagtacacggatccgtatctccaacaagcacgtagtaatcaaatttggtgttgttaaacttcgcaatattcatcaatttagatagaaacttatactcatcatctgttttaggaatccatgtattattaccactttccaacttatcattatcccaggctatgtttcgtccatcatcgttgcgcagagtgaataattcttttgtattcggtagttcaaatatatgatccatgcatagatcggcaaagctattgtagatgtgatttttcctaaatctaatataaaactcgtttactagcaaacactttcctgatttatcgaccaagacacatatggtttctaaatctatcaagtggtggggatccatagttatgacgcagtaacatatattattacattcttgactgtcgctaatatctaaatatttattgttatcgtattggattctgcatatagatggcttgtatgtcaaagatatagaacacataaccaatttatagtcgcgctttacattctcgaatctaaagttaagagatttagaaaacattatatcctcggatgatgttatcactgtttctggagtaggatatattaaagtctttacagatttcgtccgattcaaataaatcactaaataatatcccacattatcatctgttagagtagtatcattaaatctattatattttatgaaagatatatcactgctcacctctatatttcgtacatttttaaactgtttgtataatatctctctgatacaatcagatatatctattgtgtcggtagacgataccgttacatttgaattaatggtgttccattttacaacttttaacaagttgaccaattcatttctaatagtatcaaactctccatgattaaatattttaatagtatccattttatatcactacggacacaaagtagctgacataaaccattgtataatttttatgttttatgtttattagcgtacacattttggaagttccggcttccatgtatttcctggagagcaagtagatgatgaggaaccagatagtttatatccgtacttgcacttaaagtctacattgtcgttgtatgagtatgatcttttaaacccgctagacaagtatccgtttgatattgtaggatgtggacatttaacaatctgacacgtgggtggatcggaccattctcctcctgaacacaggacactagagttaccaatcaacgaatatccactattgcaactataagttacaacgcttccatcggtataaaaatcctcgtatccgttatgtcttccgttggatatagatggaggggattggcatttaacagattcacaaataggtgcctcgggattccataccatagatccagtaaatcctaattcacaatacgatttagattcaccgatcaactgatatccgctattacaagagtacgttatactagagccaaagtctactccaccaatatcaagttggccattatcgatatctcgaggcgatgggcatctccgtttaatacattgattaaagagtgtccatccagtacctgtacatttagcatatataggtcccattttttgctttctgtatccaggtagacatagatattctatagtgtctcctatgttgtaattagcattagcatcagtctccacactattcttaaatttcatattaatgggtcgtgacggaatagtacagcatgatagaacgcatcctattcccaacaatgtcaggaacgtcacgctctccaccttcatatttatttatccgtaaaaatgttatcctggacatcgtacaaataataaaaagcccatatatgttcgctattgtagaaattgtttttcacagttgctcaaaaacgatggcagtgacttatgagttacgttacactttggagtctcatctttagtaaacatatcataatattcgatattacgagttgacatatcgaacaaattccaagtatttgattttggataatattcgtattttgcatctgctataattaagatataatcaccgcaagaacacacgaacatctttcctacatggttaaagtacatgtacaattctatccatttgtcttccttaactatatatttgtatagataattacgagtctcgtgagtaattccagtaattacatagatgtcgccgtcgtactctacagcataaactatactatgatgtctaggcatgggagacttttttatccaacgatttttagtgaaacattccacatcgtttaatactacatatttctcatacgtggtataaactccacccattacatatatatcatcgtttacgaataccgacgcgcctgaatatctaggagtaattaagtttggaagtcttatccatttcgaagtgccgtgtttcaaatattctgccacacccgttgaaatagaaaattctaatcctcctattacatataactttccatcgttaacacaagtactaacttctgattttaacgacgacatattagtaaccgttttccattttttcgttttaagatctacccgcgatacggaataaacatgtctattgttaatcatgccgccaataatgtatagacaattatgtaaaacatttgcattatagaattgtctatctgtattaccgactatcgtccaatattctgttctaggagagtaatgggttattgtggatatataatcagagtttttaatgactactatattatgttttataccatttcgtgtcactggctttgtagatttggatatagttaatcccaacaatgatatagcattgcgcatagtattagtcataaacttgggatgtaaaatgttgatgatatctacatcgtttggatttttatgtatccactttaataatatcatagctgtaacatcctcatgatttacgttaacgtcttcgtgggataagatagttgtcagttcatcctttgataattttccaaattctggatcggatgtcaccgcagtaatattgttgattatttctgacatcgacgcattatatagttttttaattccatatcttttagaaaagttaaacatccttatacaatttgtgaaattaatattatgaatcatagtttttacacatagatctactacaggcggaacatcaattattatggcagcaactagtatcatttctacattgtttatggtgatgtttatcttcttccagcgcatatagtctaatagcgattcaaacgcgtgatagtttataccattcaatataatcgcttcatcctttagatggtgatcctgaatgcgtttaaaaaaattatacggagacgccgtaataatttccttattcacttgtataatttccccattgatagaaaatattacgctttccattcttaaagtactataagtaattatagtataatgtaaacgtttatatattcaatatttttataaaaatcattttgacattaattcctttttaaatttccgtctatcatctatagaaacatattctatgaatttataaaatgcttttacgtgtcctatcgtaggcgatagaaccgctaaaaagcctatcgaatttctacaaaagaatctgttatatggtatagggagagtataaaacattaaatgtccgtacttattaaagtattcagtagccaatcctaactctttcgaatacttattaatggctcttgttctgtacgaatctatttttttgaacaacggacctagtggtatatcttgttctatgtatctaaaataatgtctgactagatccgttagtttaatatccgcagtcatcttgtctagaatggcaaatctaactgcgggtttaggctttagtttagtttctatatctacatctatgtctttatctaacaccaaaaatataatagctaatattttattacaatcatccggatattcttctacgatctcactaactaatgtttctttggttatactagtatagtcactatcggacaaataaagaaaatcagatgatcgatgaataatacatttaaattcatcatctgtaagatttttgagatgtctcattagaatattattagggttagtactcattatcattcggcagctattacttattttattatttttcaccatatagatcaatcattagatcatcaaaatatgtttcaatcatcctaaagagtatggtaaatgactcttcccatctaatttctgaacgttcaccaatgtctctagccactttggcactaatagcgatcattcgcttagcgtcttctatattattaactggttgattcaatctatctagcaatggaccgtcggacagcgtcattctcatgttcttaatcaatgtacatacatcgccgtcatctaccaattcatccaacaacataagctttttaaaatcatcattataataggtttgatcgttgtcatttctccaaagaatatatctaataagtagagtcctcatgcttagttaacaactattttttatgttaaatcaattagtacaccgctatgtttaatacttattcatattttagtttttaggattgagaatcaatacaaaaattaatgcatcattaattttagaaatacttagtttccacgtagtcaatgaaacatttgaactcatcgtacaggacgttctcgtacaggacgtaactataaaccggtttatatttgttcaagatagatacaaatccgataactttttttacgaattctacgggatccactttaaaagtgtcataccgggttctttttatttttttaaacagatcaatggtgtgatgttgattaggtcttttacgaatttgatatagaatagcgtttacatattctccataatggtcaatcgccatttgttcgtatgtcataaattctttaattatatgacactgtgtattatttagttcatccttgttcattgttaggaatctatccaaaatggcaattatactagaactataggtgcgttgtatacacatattgatgtgtctgtttatacaatccatgatatttggatccatgctactaccttcgggtaaaattgtagcatcatataccatttctagtactttaggttcattattatccattgcagaggacgtcatgatcgaatcataaaaaaatatattatttttatgttattttgttaaaaataatcatcgaatacttcgtaagatactccttcatgaacataatcagttacaaaacgtttatatgaagtaaagtatctacgatttttacaaaagtccggatgcataagtacaaagtacgcgataaacggaataataatagatttatctagtctatctttttctatagctttcatagttagatacatggtctcagaagtaggattatgtaacatcagcttcgataaaatgactgggttatttagtcttacacattcgctcatacatgtatgaccgttaactacagagtctacactaaaatgattgaacaatagatagtctaccattgtttcgtattcagatagtacagcgtagtacatggcatcttcacaaattatatcattgtctaatagatatttgacgcatcttatggatcccacttcaacagccattttaaaatcggtagaatcatattgctttcctttatcattaataatttctagaacatcatctctatcataaaagatacaaatattaactgtttgatccgtaataacattgctagtcgatagcaatttgttaataagatgcgctgggctcaatgtcttaataagaagtgtaagaggactatctccgaatttgttttgtttattaacatccgttgatggaagtaaaagatctataatgtctacattcttgactgttttagagcatacaatatggagaggtgtatttccatcatgatctggttttgagggactaattcctagtttcatcatccatgagattgtagaagcttttggattgtctgacataagatgtctatgaatatgatttttgccaaatttatccactatcctggcttcgaatccgatggacattatttttttaaacactctttctgaaggatctgtacacgccaacaacggaccacatccttcttcatcaaccgagttgttaatcttggctccatactgtaccaataaatttattctctctatgacttcatcatctgttcccgagagataatatagaggcgttttatgctgtttatcacacgcgtttggatctgcgccgtgcgtcagcagcatcgcgactattctattattattaattttagaagctatatgcaatggataatttccatcatcatccgtctcatttggagagtatcctctatgaagaagttcttcgacaaatcgttcatctagtcctttaattccacaatacgcatgtagaatgtgataattatttccagaaggttcgatagcttgtagcatattcctaaatacatctaaatttttactattatatttggcataaagagatagataatactcggccaacataatgttgtccattgtagtataaaaattaatatttctatttctatttctgtatatttgcaacaatttactctctataacaaatatcataacttagttcttttatgtcaagaaggcactggtttagttcatctataaatgtcacgccataactactacgcatgccatactcagaattatgataaagatatttatccttggggtgtaggtaatggggattaatctttgttggatcagtctctaagttaacacatgtcacacatgatccatttatagttatatcacacgatgatgatttatgaattgattccggaagatcgctatcgtattttgtggttccacaattcatttccatacatgttattgtcacactaatattatgatgaactttatctagccgctgagtggtaaacaacagaacagatagtttattatctttaccaacaccctcagccgctgccacaaatctctgatccgtatccatgatggtcatgtttatttctagtccgtatccagtcaacactatgttagcatttctgtcgatatagctttcactcatatgacactcaccaataatagtagaattaatgtcgtaatttacaccaatagtgagttcggcggcaaagtaccaataccggtaatcttgtcgaggaggacatatagtattcttgtattctaccgaatacccgagagatgcgatacaaaagagtaagactaatttgtaaaccatcttactcaaaatatgtaacaatagtacgatgcaatgagtaagacaataggaaatctatcttatatacacataattattctatcaattttaccaattagttagtgtaatgttaacaaaaatgtgggagaatctaattagtttttctttacacaattgacgtacatgagtctgagttccttgtttttgctaattatttcatccaatttattattcttgacgatatcgagatcttttgtataggagtcagacttgtattcaacatgcttttctataatcattttagctatttcggcatcatccaatagtacattttccagattagcagaatagatattaatgtcgtatttgaacagagcctgtaacatctcaatgtctttattatctatagccaatttaatgtccggaatgaagagaagggaattattggtgtttgtcgacgtcatatagtcgagcaagagaatcatcatatccacgtgtccattttttatagtgatgtgaatacaactaaggagaatagccagatcaaaagtagatggtatctctgaaagaaagtaggaaacaatacttacatcattaagcatgacggcatgataaaatgaagttttccatccagttttcccatagaacatcagtctccaatttttcttaacaaacagttttaccgtttgcatgttaccactatcaaccgcataatacaatgcagtgtttcccttgtcatcaaattgtgaatcatccagtccactgaatagcaaaatctttactattttggtatcttccaatgtggctgcctgatgtaatggaaattcattctctagaagatttttcaatgctccagcgttcaacaacgtacatactagacgcacgttattatcagctattgcataatacaaggcactatgtccatggacatccgccttaaatgtatctttactagagagaaagcttttcagctgcttagacttccaagtattaattcgtgacagatccatgtctgaaacgagacgctaattagtgtatattttttcattttttatcatattgcaccagaattaataatatctctaatagatctgattagtagatacatggctatcgcaaaacaacatatacacatttaataaaaataatatttattaagaaaattcagatttcacgtacccatcaatataaataaaataatgattccttacaccgtacccatattaaggagattccaccttacccataaacaatataaatccagtaatatcatgtctgatgatgaacacaaatggtgtattaaattccagtttttcaggagatgatctcgccgtagctaccataatagtagatgcctctgctacagttccttgttcgtcgacatctatctttgcattctgaaacattttataaatatataatgggtccctagtcatatgtttaaacgacgcattatctggattaaacatactaggagccatcatttcggctatcgacttaatatccctcttattttcgatagaaaatttagggagtttaagattgtacactttattccctaattgagacgaccaatagtctaattttgcagccgtgatagaatctgtgaaatgggtcatattatcacctattgccaggtacatactaatattagcatccttatacggaaggcgtaccatgtcatattctttgtcatcgattgtgattgtatttccttgcaatttagtaactacgttcatcatgggaaccgttttcgtaccgtacttattagtaaaactagcattgcgtgttttagtgatatcaaacggatattgccatatacctttaaaatatatagtattaatgattgcccatagagtattattgtcgagcatattagaatctactacattagacataccggatctacgttctactatagaattaattttattaaccgcatctcgtctaaagtttaatctatataggccgaatctatgatattgttgataatacgacggtttaatgcacacagtattatctacgaaactttgataagttagatcagtgtacgtatatttagatgttttcagcttagctaatcctgatattaattctgtaaatgctggacccagatctctttttctcaaatccatagtcttcaataattctattctagtattacctgatgcaggcaatagcgacataaacatagaaaacgaataaccaaacggtgagaagacaatattatcatcttgaatatttttatacgctactataccggcattggtaaatccttgtagacgataggcggacgctgaacacgctaacgatagtatcaataacgcaatcatgattttatggtattaataattaaccttatttttatgttcggtataaaaaaattattgatgtctacacatccttttgtaattgacatctatatatccttttgtataatcaactctaatcactttaacttttacagttttccctaccagtttatccctatattcaacatatctatccatatgcatcttaacactctctgccaagatagcttcagagtgaggatagtcaaaaagataaatatatagagcataatcattctcgtatactctgccctttattacatcacccgcattgggcaacgaataacaaaatgcaagcatcttgttaacgggctcgtaaattgggataaaaattatgtttttattgtcttatatctattttattcaagagaatattcaggaatttctttttccggttgtatctcgtcgcagtatatatcatttgtacattgtttcatattttttaatagtttacaccttttagtaggactagtatcgtacaattcatagctgtattttgaattccaatcacgcataaaaatatcttccaattgttgacgaagacctaatccatcatccggtgtaatattaatagatgctccacatgtatccgtaaagtaatttcctgtccaatttgaggtacctatataggccgttttatcggttaccatatatttggcatggtttaccctagaatacggaatgggaggatcagcatctggtacaataaatagctttacttctatatttatgtttttagattttagcatagcgatagatcttaaaaagtttctcatgataaacgaagatcgttgccagcaactaatcaatagcttaacggatacttgtctgtctatagcggatcttcttaattcatcttctatataaggccaaaacaaaattttacccgccttcgaataaataatagggataaagttcataacagatacataaacgaatttactcgcatttctaatacatgacaataaagcggttaaatcattggttctttccatagtacatagttgttgcggtgcagaagcaataaatacagagtgtggaacgccgcttacgttaatactaagaggatgatctgtattataatacgacggataaaagtttttccaattatatggtagattgttaactccaagataccagtatacctcaaaaatttgagtgagatccgctgccaagttcctattattgaagatcgcaatacccaattccttgacctgagttagtgatctccaatccatgttagcgcttcctaaataaatatgtgtattatcagatatccaaaattttgtatgaagaactcctcctaggatatttgtaatatctatgtatcgtacttcaactccggccatttgtagtctttcaacatcctttaatggtttgttagatttattaacggctactctaactcgtactcctcttttgggtaattgtacaatctcgtttaatattatcgtgccgaaattcgtacccacttcatccgataaactccaataaaaagatgatatatctagtgtttttgtggtattggatagaatttccctccacatgttaaatgtagacaaatatactttatcaaattgcatacctataggaatagtttctgtaatcactgcgattgtattatccggattcattttatttgttaaaagaataatcctatatcacttcactctattaaaaatccaagtttctatttctttcatgactgattttttaacttcatccgtttccttatgaagatgatgtttggcaccttcataaatttttatttctctattacaatttgcatgttgcatgaaataatatgcacctaaaacatcgctaatcttattgtttgttccctggagtatgagagtcgggggggtgttaatcttggaaattatttttctaaccttgttggtagccttcaagacctgactagcaaatccagccttaattttttcatgattgactaatgggtcgtattggtatttataaactttatccatatctctagatactgattctggacatagctttccgactggcgcatttggtgtgatggttcccataagtttggcagctagcagattcagtcttgaaacagcatctgcattaactagaggagacattagaatcattgctgtaaacaagtttggattatcgtaagaggctagctcccatggaatgacccaataagtagatttaatagttaccacgtgctgtaccaaagtcatcaatcatcattttttcaccattacttcttccatgtccaatatgatcatgtgagaatactaaaattcctaacgatgatatgttttcagctagttcgtcataacgtccagaatgtttaccagctccatgacttatgaatactaatgccttaggatatgtaataggtttccaatatttacaatatatgtaatcattgtccagattgaacatacagtttgcactcatgattcacgttatataactatcaatattaacagttcgtttgatgatcatattatttttatgttttattgataattgtaaaaacatacaattaaatcaatatagaggaaggagacggctactgtcttttgtaagatagtcatggcgactaaattagattatgaggatgctgttttttactttgtggatgatgataaaatatgtagtcgcgactccatcatcgatctaatagatgaatatattacgtggagaaatcatgttatagtgtttaacaaagatattaccagttgtggaagactgtacaaggaattgatgaagttcgatgatgtcgctatacggtactatggtattgataaaattaatgagattgtcgaagctatgagcgaaggagaccactacatcaattttacaaaagtccatgatcaggaaagtttattcgctaccataggaatatgtgctaaaatcactgaacattggggatacaaaaagatttcagaatctagattccaatcattgggaaacattacagatttgatgaccgacgataatataaacatcttgatactttttctagaaaaaaaattgaattgatgatataggggtcttcataacgcataattattacgttagcattctatatccgtgttaaaaaaaattatcctatcatgtatttgagagttttatatgtagcaaacatgatagctgtgatgccaataagctttagatattcacgcgtgctagtgttagggatggtattatctggtggtgaaatgtccgttatataatctacaaaacaatcatcgcatatagtatgcgatagtagagtaaacatttttatagtttttactggattcatacatcgtctacccaattcggttataaatgaaattgtcgccaatcttacacccaaccccttgttatccattagcatagtattaacttcgttatttatgtcataaactgtaaatgattttgtagatgccatatcatacatgatattcatgtccctattataatcattactaactttatcacaatatatgttgataatatctatatatgatctagtctttgtgggcaactgtctatacaagtcgtctaaacgttgtttactcatatagtatcgaacagccatcattacatggtcccgttccgttgatagataatcgagtatgttagtggacttgtcaaatctatataccatattttctggaagtggatatacatagtcgtgatcaacattattgctagcctcatcttctatatcctgtactataccattatctatatcatctacataatctatgatattattacacataaacatcgacaacatactattgtttattatctaagtcctgttgatccaaacccttgatctcctctatttgtactatctagagattgtacttcttccagttctggataatatatacgttgatagattagctgagctattctatctccagtatttacattaaacgtacattttccattattaataagaatgactcctatgtttcccctataatcttcgtctattacaccacctcctatatcaatgccttttagtgacagaccagacctaggagctattctaccatagcagaacttaggcatggacatactaatatctgtcttaattaactgtctttctcctggagggatagtataatcgtaagcgctatacaaatcatatccggcagcacccggcgattgcctagtaggagatttagctctgttagtttccttaacaaatctaactggtgagttaatattcatgttgaacataaaactaatattttatttcaaaattatttaccatcccatatattccatgaataagtgtgatgattgtacacttctatagtatctatatacgatccacgataaaatcctcctatcaatagcagtttattatccactatgatcaattctggattatccctcggataaataggatcatctatcagagtccatgtattgctggattcacaataaaattccgcatttctaccaaccaagaataaccttctaccgaacactaacgcgcatgatttataatgaggataataagtggatggtccaaactgccactgatcatgattgggtagcaaatattctgtagttgtatcagtttcagaatgtcctcccattacgtatataacattgtttatggatgccactgctggattacatctaggtttcagaagactcggcatattaacccaagcagcatccccgtggaaccaacgctcaacagatgtgggatttggtagacctcctactacgtataatttattgttagcgggtatcccgctagcatacagtctggggctattcatcggaggaattggaatccaattgtttgatatataatttaccgctatagcattgttatgtatttcattgttcatccatccaccgatgagatatactacttctccaacatgagtacttgtacacatatggaatatatctataatttgatccatgttcataggatactctatgaatggatacttgtatgatttgcgtggttgtttatcacaatgaaatattttggtacagtctagtatccattttacattatttatacctctgggagaaagataatttgacctgattacatttttgataaggagtagcagatttcctaatttatttcttcgctttatataccacttaatgacaaaatcaactacataatcctcatctggaacatttagttcatcgctttctagaataagtttcatagatagataatcaaaattgtctatgatgtcatcttccagttccaaaaagtgtttggcaataaagtttttagtatgacataagagattggatagtccgtattctatacccatcatgtaacactcgacacaatattcctttctaaaatctcgtaagataaagtttatacaagtgtagatgataaattctacagaggttaatatagaagcacgtaataaattgacgacgttatgactatctatatatacctttccagtatacgagtaaataactatagaagttaaactgtgaatgtcaaggtctagacaaaccctcgtaactggatctttatttttcgtgtatttttgacgtaaatgtgtgcgaaagtaaggagataactttttcaatatcgtagaattgactattatattgcctcctatggcatcaataattgttttgaatttcttagtcatagacaatgctaatatattcttacagtacacagtattgacaaatatcggcatttatgtttctttaaaagtcaacatctagagaaaaatgattatctttttgagacataactcccattttttggtattcacccacacgtttttcgaaaaaattagtttttccttccaatgatatattttccatgaaatcaaacggattggtaacattataaatttttttaaatcccaattcagaaatcaatctatccgcgacgaattctatatatgttttcatcatttcacaattcattcctataagtttaactggaagagccgcagtaagaaattcttgttcaatggatactgcatctgttataatagatctaacggtttcttcactcggtggatgcaataaatgtttaaacatcaaacatgcgaaatcgcagtgcagaccctcgtctctactaattagttcgttggaaaacgtgagtccgggcattaggccacgctttttaagccaaaatatggaagcgaatgatccggaaaagaagattccttctactgcagcaaaggcaataagtctctctccataaccggcgctgtcatgtatccacttttgagcccaatcggccttcttttttacacaaggcatcgtttctatggcattaaagagatagtttttttcattactatctttaacataagtatcgatcaaaagactatacatttccgaatgaatgttttcaatggccatctgaaatccgtagaaacatctagcctcggtaatctgtacttctgtacaaaatcgttccgccaaattttcattcactattccgtcactggctgcaaaaaacgccaatacatgttttataaaatatttttcgtctggtgttagtttattccaatcattgatatctttagatatatctacttcttccactgtccaaaatgatgcttctgcctttttatacatgttccagatgtcatgatattggattgggaaaataacaaatctatttggatttggtgcaaggatgggttccataactaaattaacaataacaataaattttttttcagttatctatatgcctgtacttggatcttttgtacatcgatatcgccgcaatcactacaataattacaagtattattgatagcattgttattagtactatcataattaaattatctacattcatgggtgctgaataatcgttattatcatcattatcattttgtaattgtgacatcatactagataaatcgtttgcgagattgttgtgggaagcgggcatggaggatgcattatcattattatttaacgccttccattcggattcacaaatgttacgcacattcaacattttatggaaactataattttgtgaaaacaaataacaagaaaactcgtcatcgttcaaatttttaacgatagtaaaccgattaaacgtcgagctaatttctaacgctagcgactctgttggatatgggtttccagatatatatcttttcagttcccctacgtatctataatcatctgtaggaaatggaagatatttccatttatctactgttcctaatatcatatgtggtggtgtagtagaaccattaagcgcgaaagatgttatttcgcatcgtattttaacttcgcaataatttctggttagataacgcactctaccagtcaagtcaatgatattagcctttacagatatattcatagtagtcgtaacgatgactccatcttttagatgcgatactcctttgtatgtaccagaatcttcgtacctcaaactcgatatatttaaacaagttaatgagatattaacgcgttttatgaatgatgatatataaccagaagttttatcctcggtggctagcgctataaccttatcattataataccaactagtgtgattaatatgtgacacgtcagtgtgggtacaaatatgtacattatcgtctacgtcgtattcgatacatccgcatacagccaacaaatataaaatgacaaatactctaacgccgttcgtacccatcttgatgcggtttaataaatgttttgatttcaatttattgtaaaaaaagattcggttttatactgttcgatattctcattgcttatattttcatctatcatctccacacagtcaaatccgtggttagcatgcacctcatcaaccggtaaaagactatcggactcttctatcattataactctagaatatttaatttggtcattattaatcaagtcaattatcttatttttaacaaacgtgagtattttactcattttttataaaaacttttagaaatatacagactctatcgtgtgtctatatcttctttttatatccaatgtatttatgtctgatttttcttcatttatcatatataatggtccaaattctacacgtgcttcggattcatccagatcattaaggttcttataattgtaacatccttctcttccctcttctacatcttccttcttattcttattcttagcgtcacagaatctaccacagcaggatcccatgacgagcgtcatattaaactaatccattttcaattataatatatgattagtaatgaccattaaaataaaaaatattcttcataaccggcaagaaagtgaaaagttcacattgaaactatgtcagtagtatacatcatgaaatgatgatatatatatatactctattttggtggaggattatatgatataattcgtggataatcattcttaagacacatttcttcattcgtaaatcttttcacgttaaatgagtgtccatattttgcaatttcttcatatgatggcggtgtacgtggacgaggctgctcctgttcttgttgtagtcgccgactgtcgtgtctgcgtttagatccctccattatcgcgattgcgtagatggagtactattttataccttgtaattaaatttttttattaattaaacgtataaaaacgttccgtatctgtatttaagagccagatttcgtctaatagaacaaatagctacagtaaaaataactagaataattgctacacccactagaaaccacggatcgtaatacggcaatcggttttcgataataggtggaacgtatattttatttaaggacttaacaattgtctgtaaaccacaatttgcttccgcggatcctgtattaactatctgtaaaagcatatgttgaccgggcggagccgaacattctccgatatctaatttctgtatatctataatattattaacctccgcatacgcattacagttcttttctagcttggataccgcactaggtacatcgtctagatctattcctatttcctcagcgatagctcttctatccttttccggaagcaatgaaatcacttcaataaatgattcaaccatgagtgtgaaactaagtcgagaattactcatgcatttgttagttattcggagcgcgcaatttttaaactgtcctataacctctcctatatgaatagcacaagtgacattagtagggatagaatgttgagctaatttttgtaaataactatctataaaaagattatacaaagttttaaactctttagtttccgccatttatccagtctgagaaaatgtctctcataataaatttttccaagaaactaattgggtgaagaatggaaacctttaatctatatttatcacagtctgttttggtacacatgatgaattcttccaatgccgtactaaattcgatatctttttcgatttctggatatgtttttaataaagtatgaacaaagaaatggaaatcgtaataccagttatgtttaactttgaaattgttttttattttcttgttaatgattccagccacttgggaaaagtcaaagtcgtttaatgccgatttaatacgttcattaaaaacaaactttttatcctttagatgaattattattggttcattggaatcaaaaagtaagatattatcgggtttaagatctgcgtgtaaaaagttgtcgcaacagggtagttcgtagattttaatgtataacagagccatctgtaaaaagataaactttatgtattgtaccaaagatttaaatcctaatttgatagctaactcggtatctactttatctgccgaatacagtgctaggggaaaaattataatgtttcctctttcgtattcgtagttagttctcttttcatgttcgaaaaagtgaaacatgcggttaaaatagtttataacattaatattactgttaataactgccggataaaagtgggatagtaatttcacgaatttgatactgtcctttctctcgttaaacgcctttaaaaaaactttagaagaatatctcaatgagagttcctgaccatccatagtttgtatcaataatagcaacatatgaagaacccgtttatacagagtatgtaaaaatgttaatttatagtttaatcccatggcccacgcacacacgattaattttttttcatctccctttagattgttgtatagaaatttgggtactgtgaactccgccgtagtttccatgggactatataattttgtggcctcgaatacaaattttactacatagttatctatcttaaagactataccatatcctcctgtagatatgtgataaaaatcgtcgtttataggataaaatcgtttatccttttgttggaaaaaggatgaattaatgtaatcattctcttctatctttagtagtgtttccttattaaaattcttaaaataatttaacaatctaactgacggagcccaattttggtgtaaatctaattgggacattatattgttaaaatacaaacagtctcctaatataacagtatctgataatctatggggagacatccattgatattcaggggatgaatcattggcaacacccatttattgtacaaaaagccccaatttacaaacgaaagtccaggtttgatagagacaaactattaactattttgtctctgtttttaacacctccacagtttttaatttctttagtaatgaaattattcacaatatcagtatcttctttatctaccagagattttactaacttgataaccttggctgtctcattcaatagggtagtaatatttgtatgtgtgatattgatatctttttgaattgtttcttttagaagtgattctttgatggtgccagcatacgaattacaataatgcagaaactcggttaacatgcaggaattatagtaagccaattccaattgttgcctgtgttgtattagagtgtcaatatgagcaatggtgtccttgcgtttctctgatagaatgcgagcagcgattttggcgttatcatttgacgatatttctggaatgacgaatcctgtttctactaactttttggtaggacaaagtgaaacaatcaagaagatagcttctcctcctatttgtggaagaaattgaactcctctagatgatctactgacgatagtatctccttgacagatattggaccgaattacagaagtacctggaatgtaaagccctgaaaccccctcattttttaagcagattgttgccgtaaatcctgcactatgcccaagatagagagctcctttggtgaatccatctctatgtttcagtttaaccaagaaacagtcagctggtctaaaatttccatctctatctaatacagcatctaacttgatgtcaggaactatgaccggtttaatgttatatgtaacattgagtaaatccttaagttcataatcatcactgtcatcagttatgtacgatccaaacaatgtttctaccggcatagtggatacgaagatgctatccatcagaatgtttccctgattagtattttctatatagctattcttctttaaacgattttccaaatcagtaactatgttcatttttttaggagtaggacgcctagccagtatggaagaggattttctagatcctctcttcaacatctttgatctcgatggaatgcaaaaccccatagtgaaacaaccaacgataaaaataatattgtttttcactttttataattttaccatctgactcatggattcattaatatctttataagagctactaacgtataattctttataactgaactgagatatatacaccggatctatggtttccataattgagtaaatgaatgctcggcaataactaatggcaaatgtatagaacaacgaaattatactagagttgttaaagttaatattttctatgagctgttccaataaattatttgttgtgactgcgttcaagtcataaatcatcttgatactatccagtaaaccgtttttaagttctggaatattattatcccattgtaaagcccctaattcgactatcgaatatcctgctctgatagcagtttcaatatcgacggacgtcaatactgtaataaaggtggtagtattgtcatcatcgtgataaactactggaatatggtcgttagtaggtacggtaactttacacaacgcgatatataactttccttttgtaccatttttaacgtagttgggacgtcctgcagggtattgttttgaagaaatgatatcgagaacagatttgatacgatatttgttggattcctgattattcactataatataatctagacagatagatgattcgataaatagagaaggtatatcgttggtaggataatacatccccattccagtattctcggatactctattgatgacactagttaagaacatgtcttctattctagaaaacgaaaacatcctacatggactcattaaaacttctaacgctcctgattgtgtctcgaatgcctcgtacaaggatttcaaggatgccatagattctttgaccaacgatttagaattgcgtttagcatctgatttttttattaaatcgaatggtcggctctctggtttgctaccccaatgataacaatagtcttgtaaagataaaccgcaagaaaatttatacgcatccatccaaataaccctagcaccatcggatgatattaatgtattattatagattttccatccacaattattgggccagtatactgttagcaacggtatatcgaatagattactcatgtaacctactagaatgatagttcgtgtactagtcataatatctttaatccaatctaaaaaatttaaaattagattttttacactgttaaagttaacaaaagtattacccgggtacgtggatatcatatatggcattggtccattatcagtaatagctccataaactgatacggcgatggtttttatatgtgtttgatctaacgaggaagaaattcgcgcccacaattcatctctagatatgtatttaatatcaaacggtaacacatcaatttcgggacgcgtatatgtttctaaatttttaatccaaatataatgatgacctatatgccctattatcatactgtcaactatagtacacctagggaacttacgatacatctgtttcctataatcgttaaattttacaaatctataacatgctaaaccttttgacgacagccattcattaatttctgatatggaatctgtattctcgataccgtatcgttctaaagccagtgctatatctccctgttcgtgggaacgctttcgtataatatcgatcaacggataatctgaagtttttggagaataatatgactcatgatctatttcgtccataaacaatctagacataggaattggaggcgatgatcttaattttgtgcaatgagtcgtcaatcctataacttctaatcttgtaatattcatcatcgacataatactatctatgttatcatcgtatattagtataccatgaccttcttcatttcgtgccaaaatgatatacagtcttaaatagttacgcaatatctcaatagtttcataattgttagctgttttcatcaaggtttgtatcctgtttaacatgatggcgttctataacgtctctattttctatttttaattttttaaatttttaacgatttactgtggctagatacccaatctctctcaaatatttttttagcctcgcttacaagctgtttatctatactattaaaactgacgaatccgtgattttggtaatgggttccgtcgaaatttgccgaagtgatatgaacatattcgtcgtcgactatcaacaattttgtattattctgaatagtgaaaaccttcacagatagatcattttgaacacacaacgcatctagacttttggcggttgccatagaatatacgtcgttcttatcccaattaccaactagaagtctgatcttaactcctctattaatggctgcttctataatggagttgtaaatgtcgggccaatagtagctattaccgtcgacacgtgtagtgggaactatggccaaatgttcaatatctatactagtcttagctgacctgagtttatcaataactacatcggtatctagatctctagaatatcccaataggtgttccggagaatcagtaaagaacactccacctataggattcttaatatgatacgcagtgctaactggcaaacaacaagccgcagagcataaattcaaccatgaattttttgcgctattaaaggctttaaaagtatcaaatcttctacgaagatctgtggccagcgggggataatcagaatatacacctaacgttttaatcgtatgtatagatcctccagtaaatgacgcgtttcctacataacatctttcatcatctgacacccaaaaacaaccgagtagtagtcccacattattttttttatctatattaacggttataaaatttatatccgggcagtgactttgtagctctcccagatttcttttccctcgttcatctagcaaaactattattttaatccctttttcagatgcctcttttagtttatcaaaaataagcgctcccctagtcgtactcagaggattacaacaaaaagatgctatgtatatatatttcttagctagagtgataatttcgttaaaacattcaaatgttgttaaatgatcggatctaaaatccatattttctggtagtgtttctaccagcctacattttgctcccgcaggtaccgatgcaaatggccacatttagttaacataaaaacttatacatcctgttctatcaacgattctagaatatcatcggctatatcgctaaaattttcatcaaagtcgacatcacaacctaactcagtcaatatattaagaagttccatgatgtcatcttcgtctatttctatatccgtatccattgtagattgttgaccgattatcgagtttaaatcattactaatactcaatccttcagaatacaatctgtgtttcattgtaaatttataggcggtgtatttaagttggtagattttcaattatgtattaatatagcaacagtagttcttgctcctccttgattctagcatcctcttcattattttcttctacgtacataaacatgtccaatacgttagacaacacaccgacgatggcggccgctacagacacgaatatgactaaaccgatgaccatttaaaaacccctctctagctttcacttaaactgtatcgatcattcttttagcacatgtataatataaaaacattattctatttcgaatttaggcttccaaaaatttttcatccgtaaaccgataataatatatatagacttgttaatagtcggaataaatagattaatgcttaaactatcatcatctccacgattagagatacaatatttacattctttttgctgtttcgaaactttatcaatacacgttaatacaaacccaggaaggagatattgaaactgaggctgttgaaaatgaaacggtgaatacaataattcagataatgtaaaatcatgattccgtattctgatgatattagaactgctaatggatgtcgatggtatgtatctaggagtatctattttaacaaagcatcgatttgctaatatacaattatccttttgattaattgttattttattcatattcttaaaaggtttcatatttatcaattcttctacattaaaaatttccatttttaatttatgtagccccgcaatactcctcattacgtttcattttttgtctataatatccattttgttcatctcggtacatagattatccaattgagaagcgcatttagtagttttgtacattttaagtttattgacgaatcgtcgaaaactagttatagttaacattttattatttgataccctgatattaatacccctgccgttactattatttataactgatgtaatccacgtaacattggaattaactatcgatagtaatgcatcgacgcttccaaaattgtctattataaactcaccgataatttttttattgcatgttttcatattcattaggattatcaaatctttaatcttattacgattgtatgcgttgatattacaagacgtcattctaaaagacggaggatctccatcaaatgccagacaatcacgtacaaagtacatggaaataggttttgttctattgcgcatcatagatttatatagaacacccgtagaaatactaatttgttttactctataaaatactaatgcatctatttcatcgttttgtataacgtctttccaagtgtcaaattccaaatttttttcattgatagtaccaaattcttctatctctttaactacttgcatagataggtaattacagtgatgcctacatgccgttttttgaaactgaatagatgcgtctagaagcgatgctacgctagtcacaatcaccactttcatatttagaatatatatatgtaaaaatatagtagaatttcattttgtttttttctatgctataaatgaattctcattttgcatctgctcatactccgttttatattaataccaaagaaggaagatatctggttctaaaagccgttaaagtatgcgatgttagaactgtagaatgcgaaggaagtaaagcttcctgcgtactcaaagtagataaaccctcatcgcccgcgtgtgagagaagaccttcgtccccgtccagatgcgagagaatgaataaccctggaaaacaagttccgtttatgaggacggacatgctacaaaatatgttcgcggctaatcgcgataatgtagcttctagacttttgtcctaaaatactattatatccttttcgatattaataaatccgtgtcgtccaggttttttatctctttcagtatgtgaatagataggtattttatctctattcatcatcgaatttaagagatccgataaacattgtttgtattctccagatgtcagcatctgatacaacaatatatgtgcacataaacctctggcacttatttcatgtaccttccccttatcactaaggagaatagtatttgagaaatatgtatacatgatattatcatgaattagatatacagaatttgtaacactctcgaaatcacacgatgtgtcggcgttaagatctaatatatcactcgataacacattttcatctagatacactagacattttttaaagctaaaatagtctttagtagtaacagtaactatgcgattattttcatcgatgatacatttcatcggcatattattacgcttaccatcaaagactataccatgtgtatatctaacgtattctagcatagttgccatacgcgcattaaacttttcaggatctttggatagatcttccaatctatctatttgagaaaacatttttatcatgttcaatagttgaaacgtcggatccactatatagatattatctataaagattttaggaactacgttcatggtatcctggcgaatattaaaactatcaatgatatgattatcgttttcatcttttatcaccatatagtttctaagatatgggattttacttaatataatattatttcccgtgataaattttattagaaaggccaaatctataagaaaagtcctagaattagtctgaagaatatctatatcgccgtatagtatatttggattaattagatatagagaatatgatccgtaacatatacaacttttattatggcgtctaagatattcttccatcaacttattaacatttttgactagggaagatacattatgacgtcccattacttttgccttgtctattactgcgacgttcatagaatttagcatatctcttgccaattcttccattgatgttacattataagaaattttagatgaaattacatttggagctttaatagtaagaactcctaatatgtccgtgtatgtggtcactaatacagattgtagttctataatcgtaaataatttacctatattatatgtttgagtctgtttagaaaagtagctaagtatacgatcttttatttctgatgcagatgtatcaacatcggaaaaaaatctttttttattcttttttactaaagatacaaatatgtctttgttaaaaacagttattttctgaatatttctagcttgtaattttaacatatgatattcgttcacactaggtactctgcctaaataggtttctataatctttaatgtaatattaggaaaagtattctgatcaggattcctattcattttgaggatttaaaactctgattattgtctaatatggtctctacgcaaactttttcacagagcgatagagtttttgataactcgtttttcttaagaaatataaaactactgtctccagagctcgctctatcttttattttatctaattcgatacaaactcctgatactggttcagaaagtaattcattaattttcagtcctttatagaagatatttaatatagataatacaaaatcttcagtttttgatatcgatctgattgatcctagaactagatatattaataacgtgctcattaggcagtttatggcagcttgataattagatatagtatattccagttcatatttattagataccgcattgcccagattttgatattctatgaattcctctgaaaataaatccaaaataactagacattctattttttgtggattagtgtactctcttccctctatcatgttcactactggtgtccacgatgataaatatctagagggaatataatatagtccataggatgccaatctagcaatgtcgaataactgtaattttattcttcgctcttcattatgaattgattcttgaggtataaacctaacacaaattatattattagacttttcgtatgtaatgtctttcatgttataagtttttaatcctggaatagaatctattttaatgaggcttttaaacgcagagttctccaacgagtcaaagcataatactctgttgtttttcttatatacgatgttacgattttcttctttgaatggaataggtttttgaattagtttataattacaacataatagataaggaagtgtgcaaatagtacgcggaaaaaacataatagctcccctgttttcatccatggttttaagtaaatgatcactggcttctttagtcaatggatattcgaacattaaccgtttcatcatcattggacagaatccatatttcttaatgtaaagagtgatcaaatcattgtgtttattgtaccatcttgttgtaaatgtgtattcggttatcggatctgctcctttttctattaaagtatcgatgtcaatctcgtctaagaattcaactatatcgacatatttcatttgtatacacataaccattactaacgtagaatgtataggaagagatgtaacgggaacagggtttgttgattcgcaaactattctaatacataattcttctgttaatacgtcttgcacgtaatctattatagatgccaagatatctatataattattttgtaagatgatgttaactatgtgatctatataagtagtgtaataattcatgtattttgatatatgttccaactctgtctttgtgatgtctagtttcgtaatatctatagcatcctcaaaaaatatattcgcatatattcccaagtcttcagttctatcttctaaaaaatcttcaacgtatggaatataataatctattttacctcttctgatatcattaatgatatagtttttgacactatcttctgtcaattgattcttattcactatatctaagaaacggatagcgtccctaggacgaactactgccattaatatctctattatagcttctggacataattcatctattataccagaattaatgggaactattccgtatctatctaacatagttttaagaaagtcagaatctaagacctgatgttcatatattggttcatacatgaaatgatctctattgatgatagtgactatttcattctctgaaaattggtaactcattctatatatgctttccttgttgatgaaggatagaatatactcaatagaatttgtaccaacaaactgttctcttatgaatcgtatatcatcatctgaaataatcatgtaaggcatacatttaacaattagagacttgtctcctgttatcaatatactattcttgtgataatttatgtgtgaggcaaatttgtccacgttctttaattttgttatagtagatatcaaatccaatggagctacagttcttggcttaaacagatatagtttttctggaacaaattctacaacattattataaaggactttgggtagataagtgggatgaaatcctattttaattaatgcgatagccttgtcctcgtgcagatatccaaacgcttttgtgatagtatggcattcattgtctagaaacgctctacgaatatctgtgacagatatcatctttagagaatatactagtcgcgttaatagtactacaatttgtattttttaatctatctcaataaaaaaattaatatgtatgattcaatgtataactaaactactaactgttattgataactagaatcagaatctaatgatgacgtacccaagaagtttatctactgccaatttagctgcattatttttagcatctcgtttagattttccatctgccttatcgaatactcttccgtcgatatctacacaggcataaaatgtaggagagttactaggcccaactgattcaatacgaaaagaccaatctctcttagttatttggcagtactcattaataacggtgacagggttagcatctttccaatcaataatttttttagccggaataacatcatcaaaagacttatgatcctctctcattgatttttcgcgggatacatcatctattatgacgtcagccataacatcagcatccggcttatccgcctccgttgtcataaaccaacgaggaggaatatcgtcggagctgtacaccatagcactacgttgaagatcgtacagagctttattaacttctcgcttctccatattaagttgtctagttagttgtgcagcagtagctccttcgattccaatggttttaatagcctcacacacaatctctgcgttagaacgttcgtcgatatagattttagacatttttagagagaactaacacaaccagcaataaaactgaacctactttatcatttttttattcatcatcctctggtggttcgtcgttcctatcaaatgtagctctgattaacccgtcatctataggtgatgctggttctggagattctggaggagatggattattatctggaagaatctctgttatttccttgttttcatgtatcgattgcgttgtaacattaagattgcgaaatgctctaaatttgggaggcttaaagtgttgtttgcaatctctacacgcgtgtctaactagtggaggttcgtcagctgctctagtttgaatcatcatcggcgtagtattcctacttttacagttaggacacggtgtattgtatttctcgtcgagaacgttaaaataatcgttgtaactcacatcctttattttatctatattgtattctactcctttcttaatgcattttataccgaataagagatagcgaaggaattctttttcggtgccgctagtacccttaatcatatcacatagtgttttatattccaaatttgtggcaatagacggtttatttctatacgatagtttgtttctggaatcctttgagtattctataccaatattattctttgattcgaatttagtttcttcgatattagattttgtattacctatattcttgatgtagtactttgatgatttttccatggcccattctattaagtcttccaagttggcatcatccacatattgtgatagtaattctcggatatcagtagcggctaccgccattgatgtttgttcattggatgagtaactactaatgtatacattttccatttataacacttatgtattaactttgttcatttatattttttcattattatgttgatattaacaaaagtgaatatatatatgttaataattgtattgtggttatacggctacaattttataatgagtgaaagtcagtgtccgatgatcaatgacgatagctttactctgaaaagaaagtatcaaatcgatagtgcggagtcaacaataaaaatggataagaagaggataaagtttcagaatagagccaaaatggtaaaagaaataaatcagacaataagagcagcacaaactcattacgagacattgaaactaggatacataaaatttaagagaatgattaggactactactctagaagatatagcaccatctattccaaataatcagaaaacttataaactattctcggacatttcagccatcggcaaagcatcacagaatccgagtaagatggtatatgctctgctgctttacatgtttcccaatttgtttggagatgatcatagattcattcgttatagaatgcatccaatgagtaaaatcaaacacaagatcttctctcctttcaaacttaatcttattagaatattagtggaagaaagattctataataatgaatgcagatctaataaatggaaaataattggaacacaagttgataaaatgttgatagctgaatctgataaatatacaatagatgcaaggtataacctaaaacccatgtatagaatcaagggagaatctgaagaagataccctcttcatcaaacagatggtagaacaatgtgtgacatcccaggaattggtggaaaaagtgttgaagatactgtttagagatttgttcaagagtggagaatacaaagcgtacagatacgatgatgatgtagaaaatggattcattggattggatacactaaaattaaacattgttcatgatatagttgaaccatgtatgcctgttcgtaggccagtggctaagatactgtgtaaagaaatggtaaataaatactttgagaatccgctacatattattggtaaaaatcttcaagagtgcattgactttgttagtgaataggcatttcatctttctccaatactaattcaaattgttaaattaataatggatagtataaatagttattagttataagatagtaaaaataattattagaataagagtgtagtatcatagataactctcttctataaaaatggattttattcgtagaaagtatcttatatacacagtagaaaataatatagattttttaaaggatgatacattaagtaaagtaaacaattttaccctcaatcatgtactagctctcaagtatctagttagcaattttcctcaacacgttattactaaggatgtattagctaataccaatttttttgttttcatacatatggtacgatgttgtaaagtgtacgaagcggttttacgacacgcatttgatgcacccacgttgtacgttaaagcattgactaagaattatttatcgtttagtaacacaatacaatcgtacaaggaaaccgtgcataaactaacacaagatgaaaaatttttagaggttgccgaatacatggacgaattaggagaacttataggcgtaaattatgacttagttcttaatccattatttcacggaggggaacccatcaaagatatggaaatcatttttttaaaactgtttaagaaaacagacttcaaagttgttaaaaaattaagtgttataagattacttatttgggcatacctaagcaagaaagatacaggcatagagtttgcggataatgatagacaagatatatatactctatttcaacaaactggtagaatcgtccatagcaatctaacagaaacgtttagagattatatctttcccggagataagactagctattgggtgtggttaaacgaaagtatagctaatgatgcggatattgttcttaatagacacgccattaccatgtatgataaaattcttagttatatatactctgagataaaacaaggacgcgttaataaaaacatgcttaagttagtttatatctttgagcctgaaaaagatatcagagaacttctgctagaaatcatatatgatattcctggagatatcctatctattattgatgcaaaaaacgacgattggaaaaaatattttattagtttttataaagctaattttattaacggtaatacatttattagtgatagaacgtttaacgaggacttattcagagttgttgttcaaatagatcccgaatatttcgataatgaacgaattatgtctttattctctacgagtgctgcggacattaaacgatttgatgagttagatattaataacagttatatatctaatataatttatgaggtgaacgatatcacattagatacaatggatgatatgaagaagtgtcaaatctttaacgaggatacgtcgtattatgttaaggaatacaatacatacctgtttttgcacgagtcggatcccatggtcatagagaacggaatactaaagaaactgtcatctataaaatccaagagtagacggctgaacttgtttagcaaaaacattttaaaatattatttagacggacaattggctcgtctaggtcttgtgttagatgattataaaggagacttgttagttaaaatgataaaccatcttaagtctgtggaggatgtatccgcattcgttcgattttctacagataaaaaccctagtattcttccatcgctaatcaaaactattttagctagttataatatttccatcatcgtcttatttcaaaggtttttgagagataatctatatcatgtagaagaattcttggataaaagcatccatctaaccaagacggataagaaatatatacttcaattgataagacacggtagatcatagaacagaccaaatatattattaataatttgtatatacatagatataattatcacacatttttgataaatgggaactgctgcaacaattcagactcccaccaaattaatgaataaagaaaatgcagaaatgattttggaaaaaattgttgatcatatagttatgtatattagtgacgaatcaagtgattcagaaaataatcctgaatatattgattttcgtaacagatacgaagactatagatctctcattataaaaagtgatcacgagtttgtaaagctatgtaaaaatcatgcggagaaaagttctccagaaacgcaacaaatgattatcaaacacatatacgaacaatatcttattccagtatctgaagtactattaaaacctataatgtccatgggtgacataattacatataacggatgtaaagacaatgaatggatgctagaacaactctctaccctaaactttaacaatctccgcacatggaactcatgtagcataggcaatgtaacgcgtctgttttatacattttttagttatctgatgaaagataaactaaatatataagtataatcccattctaatactttaacctgatgtattagcatcttattagaatattaacctaactaaaagacataacataaaaactcattacatagttgataaaaagcggtaggatataaatattatggctgccaccgttccgcgttttgacgacgtgtacaaaaatgcacaaagaagaattctagatcaagaaacattttttagtagaggtctaagtagaccgttaatgaaaaacacatatctatttgataattacgcgtatggatggataccagaaactgcaatttggagtagtagatacgcaaacttagatgcaagtgactattatcccatttcgttgggattacttaaaaagttcgagtttctcatgtctctatataaaggtcctattccagtatacgaagaaaaagtaaatactgaattcattgctaatggatctttctccggtagatacgtatcatatcttagaaagttttctgctcttccaacaaacgagtttattagttttttgttactgacttccattccaatctataatatcttgttctggtttaaaaatactcagtttgatattactaaacacacattattcagatacgtctatacagataatgccaaacacctggcgttggctaggtatatgtatcaaacaggagactataagcctttgtttagtcgtctcaaagagaattatatatttaccggtcccgttccaatatgtatcaaagatatagatcaccctaatcttagtagagcaagaagtccatccgattatgagacattagctaatattagtactatattgtactttaccaagtatgatccggtattaatgtttttattgttttacgtacctgggtattcaattactacaaaaattactccagccgtagaatatctaatggataaactgaatctaacaaagagcgacgtacaactgttgtaaattattttatgcttcgtaaaatgtaggttttgaaccaaacattctttcaaagaatgagatgcataaaactttattatccaatagattgactatttcggacgtcaatcgtttaaagtaaacttcgtaaaatattctttgatcactgccgagtttaaaacttctatcgataattgtttcatatgttttaatatttacaagttttttggtccatggtccattaggacaaatatatgcaaaataatatcgttctccaagttctatagtctctggattatttttattatattcagtaaccaaatacatattagggttatctgcggatttataatttgagtgatgcattcgactcaacataaataattctagaggagacgatctactatcaaattcggatcgtaaatctgtttctaaagaacggagaatatctatacatacctgattagaattcatccgtccttcagacaacatctcagacagtctggtcttgtatgtcttaatcatattcttatgaaacttggaaacatctcttctagtttcactagtacctttattaattctctcaggtacagattttgaattcgacgatgctgagtatttcatcgttgtatatttcttcttcgattgcataatcagattcttatataccgcctcaaactctattttaaaattattaaacaatactctattattaatcagtcgttctaactctttcgctatttctatagacttatctacatcttgactgtctatctctgtaaacacggagtcggtatctccatacacgctacgaaaacgaaatctgtaatctataggcaacgatgttttcacaatcggattaatatctctatcgtccatataaaatggattacttaatggattggcaaaccgtaacataccgttagataactctgctccatttagtaccgattctagatacaagatcattctacgtcctatggatgtgcaactcttagccgaagcgtatgagtatagagcactatttctaaatcccatcagaccatatactgagttggctactatcttgtacgtatattgcatggaatcatagatggccttttcagttgaactggtagcctgttttagcatctttttatatctggctctctctgccaaaaatgttcttaatagtctaggaatggttccttctatcgatctatcgaaaattgctatttcagagatgaggttcggtagtctaggttcacaatgaaccgtaatatatctaggaggtggatatttctgaagcaatagctgattatttatttcttcttccaatctattggtactaacaacgacaccgactaatgtttccggagatagatttccaaagatacacacattaggatacagactgttataatcaaagattaatacattattactaaacattttttgttttggagcaaataccttaccgccttcataaggaaacttttgttttgtttctgatctaactaagatagttttagtttccaacaatagctttaacagtggacccttgatgactgtactcgctctatattcgaataccatggattgaggaagcacatatgttgacgcacccgcgtctgtttttgtttctactccataatactcccacaaatactgacacaaacaagcatcatgaatacagtatctagccatatctaaagctatgtttagattataatccttatacatctgagctaaatcaacgtcatcctttccgaaagataatttatatgtatcattaggtaaagtaggacataatagtacgactttaaatccattttcccaaatatctttacgaattactttacatataatatcctcatcaacagtcacataattacctgtggttaaaacctttgcaaatgcagcggctttgcctttcgcgtctgtagtatcgtcaccgatgaacgtcatttctctaactcctctatttaatactttacccatgcaactgaacgcgttcttggatatagaatccaatttgtacgaatccaatttttcaaatttttgaatgaatgaatatagatcgaaaaatatagttccattattgttattaacgtgaaacgtagtattggccatgccgcctactcccttatgactagactgatttctctcataaatacagagatgtacagcttcctttttgtccggagatctaaagataatcttctctcctgttaataactctagacgattagtaatatatctcagatcaaagttatgtccgttaaaggtaacgacgtagtcgaacgttagttccaacaattgtttagctattcgtaacaaaactatttcagaacatagaactagttctcgttcgtaatccatttccattagtgactgtatcctcaaacatcctctatcgacggcttcttgtatttcctgttccgttaacatctcttcattaatgagcgtaaacaataatcgtttaccacttaaatcgatataacagtaacttgtatgcgagattgggttaataaatacagaaggaaacttcttatcgaagtgacactctatatctagaaataagtacgatcttgggatatcgaatctaggtatttttttagcgaaacagttacgtggatcgtcacaatgataacatccattgttaatctttgtcaaatattgctcgtccaacgagtaacatccgtctggagatatcccgttagaaatataaaaccaactaatattgagaaattcatccatggtggcattttgtatgctgcgtttctttggctcttctatcaaccacatatctgcgacggagcattttctatctttaatatctagattataacttattgtctcgtcaatgtctatagttctcatctttcccaacggcctcgcattaaatggaggaggagacaatgactgatatatttcgtccgtcactacgtaataaaagtaatgaggaaatcgtataaatacggtctcaccatttcgacatctggatttcagatataaaaatctgttttcaccgtgactttcaaaccaattaatgcaccgaacatccatttatagaatttagaaatatattttcatttaaatgaatcccaaacattggggaagagccgtatggaccattatttttatagtactttcgcaagcgggtttagacggcaacatagaagcgtgtaaacgaaaactatatactatagttagcactcttccatgtcctgcatgtagacggcacgcgactatcgctatagaggacaataatgtcatgtctagcgatgatctgaattatatttattattttttcatcagattatttaacaatttggcatctgatcccaaatacgcgatcgatgtgacaaaggttaaccctttataaacttaacccattataaaacttatgattagtcacaactgaaataaccgcgtgattattttttggtataattctacacggcatggtttctgtgactatgaattcaacccccgttacattagtgaaatctttaacaaacagcaagggttcgtcaaagacataaaactcattgtttacaatcgaaatagaccccctatcacacttaaaataaaaaatatccttatcctttaccaccaaataaaattctgattggtcaatgtgaatgtattcacttaacagttccacaaatttatttattaactccgaggcacatacatcgtcggtattttttatggcaaactttactcttccagcatccgtttctaaaaaaatattaacgagttccatttatatcatccaatattattgaaatgacgttgatggacagatgatacaaataagaaggtacggtacctttgtccaccatctcctccaattcatgctctattttgtcattaactttaatgtatgaaaacagtacgccacatgcttccatgacagtgtgtaacactttggatacaaaatgtttgacattagtataattgttcaagactgtcaatctataatagatagtagctataatatattctatgatggtattgaagaagatgacaaccttggcatattgatcatttaacacagacatggtatcaacagatagcttgaatgaaagagaatcagtaattggaataagcgtcttctcgatagagtgtccgtataccaacatgtctgatattttgatgtattccattaaattatttagttttttctttttattctcgttaaacagcatttctgtcaacggaccccaacatcgttgaccgattaagttttgattgatttttccgtgtaaggcgtatctagtcagatcgtatagcctatccaataatccatcatctgtgcgtagatcacatcgtacactttttaattctctatagaagagcgacagacatctggagcaattacagacagcaatttctttattctctacagatgtaagatacttgaagacattcctatgatgatgcagaattttggataacacggtattgatggtatctgttaccataattcctttgatggctgatagtgtcagagcacaagatttccaatctttgacaatttttagcaccattatctttgttttgatatctatatcagacagcatggtgcgtctgacaacacagggattaagacggaaagatgaaatgattctctcaacatcttcaatagataccttgctattttttctggcattatctatatgtgcgagaatatcctctagagaatcagtatcctttttgatgatagtggatctcaatgacatgggacgtttaaaccttcttattctatcaccagattgcatggtgatttgtcttctttcttttatcataatgtaatctctaaattcatcggcaaattgtctatatctaaaatcataatatgagatgtttacctctacaaatatctgttcgtccaatgttagagtatttacatcagttttgtattccaaattaaacatggcaacggatttaattttatattcctctattaagtcctcgtcgataataacagaatgtagataatcatttaatccatcgtacatggttggaagatgcttgttgacaaaatctttaattgtcttgatgaaggtgggactatatctaacatcttgattaataaaatttataacattgtccataggatactttgtaactagttttatacacatctcttcatcggtaagtttagacagaatatcgtgaacaggtggtatattatattcatcagatatacgaagaacaatgtccaaatctatattgtttaatatattatatagatgtagcgtagctcctacaggaatatctttaactaagtcaatgatttcatcaaccgttagatctattttaaagttaatcatataggcattgatttttaaaaggtatgtagccttgactacattctcattaattaaccattccaagtcactgtgtgtaagaagattatattctatcataagcttgactacatttggtcccgataccattaaagaattcttatgatataaggaaacagcttttaggtactcatctactctacaagaattttggagagccttaacgatatcagtgacgtttattatttcaggaggaaaaaacctaacattgagaatatcggaattaatagcttccagatacagtgattttggcaatagtccgtgtaatccataatccagtaacacgagctggtgcttgctagacaccttttcaatgtttaatttttttgaaataagctttgataaagccttcctcgcaaattccggatacatgaacatgtcggcgacatgattaagtattgttttttcattatttttatattttctcaacaagttctcaataccccaatagatgatagaatatcacccaatgcgtccatgttgtctatttccaacaggtcgctatatccaccaatagaagtttttccaaaaaagattctaggaacagttctaccaccagtaatttgttcaaaataatcccgcaattcattttcgggtttaaattctttaatatcgacaatttcatacgctcctcttttgaaactaaacttatttagaatatccagtgcatttctacaaaaaggacatgtatacttgacaaaaattgtcactttgttattggccaacctttgttgtacaaattcctcggccattttaatatttaagtgatataaaactatctcgacttatttaactctttagtcgagatatatggacgcagatagctatatgatagccaactacagaaggcaaacgctataaaaaacataattacgacgagcatatttataaatatttttattcagcattacttgatatagtaatattaggcacagtcaaacattcaaccactctcgatacattaactctctcattttctttaacaaattctgcaatatcttcgtaaaaagattcttgaaactttttagaatatctatcgactctagatgaaatagcgttcgtcaacatactatgttttgtatacataaaggcgcccattttaacagtttctagtgacaaaatgctagcgatcctaggatcctttagaatcacatagattgacgattcgtctctcttagtaactctagtaaaataatcatacaatctagtacgcgaaataatattatccttgacttgaggagatctaaacaatctagttttgagaacatcgataagttcatcgggaatgacatacatactatctttaatagaactcttttcatccagttgaatggattcgtccttaaccaactgattaatgagatcttctattttatcattttccagatgatatgtatgtccattaaagttaaattgtgtagcgcttctttttagtctagcagccaatactttaacatcactaatatcgatatacaaaggagatgatttatctatggtattaagaattcgtttttcgacatccgtcaaaaccaattcctttttgcctgtatcatccagttttccatcctttgtaaagaaattattttctactagactattaataagactgataaggattcctccataattgcacaatccaaactttttcacaaaactagactttacaagatctacaggaatgcgtacttcaggttttttagcttgtgattttttcttttgcggacattttcttgtgaccaactcatctaccatttcattgattttagcagtgaaataagctttcaatgcacgggcactgatactattgaaaacgagttgatcttcaaattccgccatttaagttcaccaaacaacttttaaatacaaatatatcaatagtagtagaataagaactataaaaaaaataataattaaccaataccaaccccaacaaccggtattattagttgatgtgactgttttctcatcacttagaacagatttaacaatttctataaagtctgtcaaatcatcttccggagaccccataaatacaccaaatatagcggcgtacaacttatccatttatacattgaatattggcttttctttatcgctatcttcatcatattcatcatcaatatcaacaagtcccagattacgagccagatcttcttctacattttcagtcattgatacacgttcactatctccagagagtccgataacgttagccaccacttctctatcaatgattagtttcttgagcgcgaaagtaatttttgtttccgttccggatctatagaagacgataggtgtgataattgccttggccaattgtctttctcttttactgagtgattctagttcaccttctatagatctgagaatggatgattctccagtcgaaacatattctaccatggatccgtttaatttgttgatgaagatggattcatccttaaatgttttctctgtaatagtttccaccgaaagactatgcaaagaatttggaatgcgttccttgtgcttaatgtttccatagacggcttctagaagttgatacaacataggactagccgcggtaacttttatttttagaaagtatccatcgcttctatcttgtttagatttatttttataaagtttagtctctccttccaacataataaaagtggaagtcatttgactagataaactatcagtaagttttatagagatagacgaacaattagcgtattgagaagcatttagtgtaacgtattcgatacattttgcattagatttactaatcgattttgcatactctataacacccgcacaagtctgtagagaatcgctagatgcagtaggtcttggtgaagtttcaactctcttcttgattaccttactcatgattaaacctaaataattgtactttgtaatataatgatatatattttcactttatctcatttgagaataaaaatgtttttgtttaaccactgcatgatgtacagatttcggaatcgcaaaccaccagtggttttattttatccttgtccaatgtgaattgaatgggagcggatgcgggtttcgtacgtagatagtacattcccgtttttagaccgagactccatccgtaaaaatgcatactcgttagtttggaataactcggatctgctatatggatattcatagattgactttgatcgatgaaggctcccctgtctgcagccatttttatgatcgtcttttgtggaatttcccaaatagttttataaactcgcttaatatcttctggaaggtttgtattctgaatggatccaccatctgccataatcctattcttgatctcatcattccataattttctctcggttaaaactctaaggagatgcggattaactacttgaaattctccagacaatactctccgagtgtaaatattactggtatacggttccaccgactcattatttcccaaaatttgagcagttgatgcagtcggcataggtgccaccaataaactatttctaagaccgtatgttctgattttatcttttagaggttcccaattccaaagatccgacggtacaacattccaaagatcatattgtagaataccgttactggcgtacgatcctacatatgtatcgtatggtccttccttctcagctagttcacaactcgcctctaatgcaccgtaataaatggtttcgaagatcttcttatttagatcttgtgcttccaggctatcaaatggataatttaagagaataaacgcgtccgctaatccttgaacaccaataccgataggtctatgtctcttattagagatttcagcttctggaataggataataattaatatctataattttattgagatttctgacaattactttgaccacatccttcagtttgagaaaatcaaatcgcccatctattacaaacatgttcaaggcaacagatgccagattacaaacggctacctcattagcatccgcatattgtattatctcagtgcaaagattactacacttgatagttcctaaattttgttgattactctttttgttacacgcatccttataaagaatgaatggagtaccagtttcaatctgagattctataatcgctttccagacgactcgagcctttattatagatttgtatctcctttctctttcgtatagtgtatacaatcgttcgaactcgtctccccaaacattgtccaatccaggacattcatccggacacatcaacgaccactctccgtcatccttcactcgtttcataaagagatcaggaatccaaagagctataaatagatctctggttctatgttcctcgtttcctgtattctttttaagatcgaggaacgccataatatcagaatgccacggttccaagtatatggccataactccaggccgtttgtttcctccctgatctatgtatctagcggtgttattataaactctcaacattggaataataccgtttgatataccattggtaccggagatatagcttccactggcacgaatattactaattgatagacctattccccctgccattttagagattaatgcgcatcgttttaacgtgtcatagataccctctatgctatcatcgatcatgttaagtagaaaacagctagacatttggtgacgactagttcccgcattaaataaggtaggagaagcgtgcgtaaaccatttttcagaaagtagattgtacgtctcaatagctgagtctatatcccattgatgaattcctactgcgacacgcattaacatgtgctgaggtctttcaacgatcttgttgtttattttcaacaagtaggatttttccaaagttttaaaaccaaaatagttgtatgaaaagtctcgttcgtaaataataaccgagttgagtttatccttatatttgttaactatatccatggtgatacttgaaataatcggagaatgtttcccatttttaggattaacatagttgaataaatcctccatcacttcactaaatagtttttttgtttccttgtgtagatttgatacggctattctggcggctagaatggcataatccggatgttgtgtagtacaagtggctgctatttcggctgccagagtgtccaattctaccgttgttactccattatatattccttgaataaccttcatagctattttaataggatctatatgatccgtgtttaagccataacataattttctaatacgagacgtgattttatcaaacatgacattttccttgtatccatttcgtttaatgacaaacatttttgttggtgtaataaaaaaattatttaacttttcattaatagggatttgacgtatgtagcgtacaaaatgatcgttcctggtatatagataaagagtcctatatatttgaaaatcgttacggctcgattaaactttaatgattgcatagtgaatatatcattaggatttaactccttgactatcatggcggcgccagaaattaccatcaaaagcattaatacagttatgccgatcgcagttaaaacggttatagcatccaccatttatatctaaaaattagatcaaagaatatgtgacaaagtcctagttgtatactgagaattgacgaaacaatgtttcttacatatttttttcttattagtaactgacttaatagtaggaactggaaagctagacttgattattctataagtatagatacccttccagataatgttctctttgataaaagttccagaaaatgtagaattttttaaaaagttatcttttgctattaccaagattgtgtttagacgcttattattaatatgagtgatgaaatccacaccgcctctagatatcgcctttatttccacattagatggtaaatccaatagtgaaactatctttttaggaatgtatggactcgcgtttagaggagtgaacgtcttgggcgtcggaaaggatgattcgtcaaacgaataaacaatttcacaaatggatgttaatgtattagtaggaaattttttgacgctagtggaattgaagattctaatggatgatgttctacctatttcatccgataacatgttaatttccgacaccaacggttttaatatttcgatgatatacggtagtctctctttcggacttatatagcttattccacaatacgagtcattatatactccaaaaaacaaaataactagtataaaatctgtatcgaatgggaaaaacgaaattatcgacataggtatagaatccggaacattgaacgtattaatacttaattctttttctgtggtaagtaccgataggttattgacattgtatggttttaaatattctataacttgagacttgatagatattagtgatgaattgaaaattatttttatcaccacgtgtgtttcaggatcatcgtcgacgcccgtcaaccaaccgaatggagtaaaataaatatcattaatatatgctctagatattagtatttttattaatcctttgattatcatcttctcgtaggcgaatgattccatgatcaagagtgatttgagaacatcctccggagtattaatgggcttagtaaacagtccatcgttgcaataataaaagttatccaagttaaaggatattatgcattcgtttaaagatatcacctcatctgacggagacaattttttggtaggttttagagactttgaagctacttgtttaacaaagttattcatcgtcgtctactattctatttaattttgtagttaatttatcacatatcacattaattgactttttggtccatttttccatacgtttatattcttttaatcctgcgttatccgtttccgttatatccagggatagatcttgcaagttaaatagaatgctcttaaataatgtcattttcttatccgctaaaaatttaaagaatgtataaacctttttcagagatttgaaactcttaggtggtgtcctagtacacaatatcataaacaaactaataaacattccacattcagattccaacagctgattaacttccacattaatacagcctattttcgctccaaatgtacattcgaaaaatctgaataaaacatcgatgtcacaatttgtattatccaatacagaatgtttgtgattcgtgttaaaaccatcggagaaggaatagaaataaaaattattatagtggtggaattcagttggaatattgcctccggagtcataaaaggatactaaacattgttttttatcataaattacacatttccaatgagacaaataacaaaatccaaacattacaaatctagaggtagaacttttaattttgtctttaagtatatacgataagatatgtttattcataaacgcgtcaaatttttcatgaatcgctaaggagtttaagaatctcatgtcaaattgtcctatataatccacttcggatccataagcaaactgagagactaagttcttaatacttcgattgctcatccaggctcctctctcaggctctattttcatcttgacgacctttggattttcaccagtatgtattcctttacgtgataaatcatcgattttcaaatccatttgtgagaagtctatcgccttagatactttttcccgtagtcgaggtttaaaaaaatacgctaacggtatactagtaggtaactcaaagacatcatatatagaatggtaacgcgtctttaactcgtcggttaactctttcttttgatcgagttcgtcgctactattgggtctgctcaggtgccccgactctactagttccaacatcataccgataggaatacaagacactttgccggcggttgtagatttatcatatttttccactacatatccgttacaatttgttaaaaatttagatacatctatattgctacataatccagctagtgaatatatatgacataataaattggtaaatcctagttctggtattttactaattactaaatctgtatatctttccatttatcatggaaaagaatttaccagatatcttcttttttccaaactgcgttaatgtattctcttacaaatattcacaagatgaattcagtaatatgagtaaaacggaacgtgatagtttctcattggccgtgtttccagttataaaacatagatggcataacgcacacgttgtaaaacataaaggaatatacaaagttagtacagaagcacgtggaaaaaaagtatctcctccatcactaggaaaacccgcacacataaacctaaccgcgaagcaatatatatacagtgaacacacaataagctttgaatgttatagttttctaaaatgtataacaaatacagaaatcaattcgttcgatgagtatatattaagaggactattagaagctggtaatagtttacagatattttccaattccgtaggtaaacgaacagatactataggtgtactagggaataagtatccatttagcaaaattccattggcctcattaactcctaaagcacaacgagagatattttcagcgtggatttctcatagacctgtagttttaactggaggaactggagtgggtaagacgtcacaggtacccaagttattgctttggtttaattatttatttggtggattctctactctagataaaatcactgactttcacgaaagaccagtcattctatctcttcctaggatagctttagttagattgcatagcaataccattttaaaatcattgggatttaaggtactagatggatctcctatttctttacggtacggatctataccggaagaattaataaacaaacaaccaaaaaaatatggaattgtattttctacccataagttatctctaacaaaactatttagttatggcactcttattatagacgaagttcatgagcatgatcaaataggagatattattatagcagtagcgagaaagcatcatacgaaaatagattctatgtttttaatgactgccacattagaggatgaccgagaacggctaaaagtatttttacctaatcccgcatttatacatattcctggagatacactgtttaaaattagcgaggtatttattcataataagataaatccatcttccagaatggcatacatagaagaagaaaagagaaatttagttactgctatacagatgtatactcctcctgatggatcatccggtatagtctttgtggcatccgttgcacagtgtcacgaatataaatcatatttagaaaaaagattaccgtatgatatgtatattattcatggtaaggtcttagatatagacgaaatattagaaaaagtgtattcatcacctaatgtatcgataattatttctactccttatttggaatccagcgttactatacgcaatgttacacacatttatgatatgggtagagtttttgtccccgctccttttggaggatcgcaacaatttatttctaaatctatgagagatcaacgaaaaggaagagtaggaagagttaatcctgggacatacgtctatttctatgatctgtcttatatgaagtctatacagcgaatagattcagaatttctacataattatatattgtacgctaataagtttaatctaacactccccgaagatttgtttataatccctacaaatttggatattctatggcgtacaaaggaatatatagactcgttcgatattagtacagaaacatggaataaattattatccaattattatatgaagatgatagagtatgctaaactttatgtactaagtcctattctcgctgaggagttggataactttgagaggacgggagaattaactagtattgtacgagaagccattttatctctaaatttacgaattaagattttaaattttaaacataaagatgatgatacgtatatacacttttgtaaaatattattcggtgtctataacggaacaaacgctactatatattatcatagacctctaacgggatatatgaatatgatttcagatactatatttgttcctgtagataataactaaaaatcaaactctaatgaccacatctttttttagagatgaaaaattttccacatctccttttgtagacacgactaaacattttgcagaaaaaagtttattagtgtttagataatcgtatacttcatcagtgtagatagtaaatgtgaacagataaaaggtattcttgctcaatagattggtaaattccatagaatatattaatcctttcttcttgagatcccacatcatttcaaccagagacgttttatccaatgatttacctcgtactataccacatacaaaactagattttgcagtgacgtcgtacctggtattcctaccaaacaaaattttacttttagttcttttagaaaattctaaggtagaatctctatttgccaatatgtcatctatggaattaccactagcaaaaaatgatagaaatatatattgatacatcgcagctggttttgatctactatactttaaaaacgaatcagattccataattgcctgtatatcatcagctgaaaaactatgttttacacgtattccttcggcatttctttttaatgatatatcttgtttagacaatgataaagttatcatgtccatgagagacgcgtctccgtatcgtataaatatttcattagatgttagacgcttcattaggggtatacttctataaggtttcttaatcagtccatcattggttgcgtcaagaactactatcggatgttgttgggtatctctagtgttacacatggccttactaaagtttgggtaaataactatgatatctctattaattatagatgcatatatttcattcgtcaaggatattagtatcgacttgctatcgtcattaatacgtgtaatgtaatcatataaatcatgcgatagccaaggaaaatttaaatagatgttcatcatataatcgtcgctataattcatattaatacgttgacattgactaatttgtaatatagcctcgccacgaagaaagctctcgtattcagtttcatcgataaaggataccgttaaatataactggttgccgatagtctcatagtctattaagtggtaagtttcgtacaaatacagaatccctaaaatattatctaatgttggattaatctttaccataactgtataaaatggagacggagtcataactattttaccgtttgtacttactggaatagatgaaggaataatctccggacatgctggtaaagacccaaatgtctgtttgaagaaatccaatgttccaggtcctaatctcttaacaaaaattacgatattcgatcccgatatcctttgcattctatttaccagcatatcacgaactatattaagattatctatcatgtctattctcccaccgttatataaatcgcctccgctaagaaacgttagtatatccatacaatggaatacttcatttctaaaatagtattcgttttctaattctttaatgtgaaatcgtatactagaaagggaaaaattatctttgagttttccgttagaaaagaaccacgaaactaatgttctgattgcgtccgattccgttgctgaattaatggatttacaccaaaaactcatataacttctagatgtagaagcattcgctaaaaaattagtagaatcaaaggatataagtagatgttccaacaagtgagcaattcccaagatttcatctatatcattctcgaatccgaaattagaaattcccaagtagatatcctttttcatccgatcgttgatgaaaatacgaactttattcggtaagacaatcatttactaaggagtaaaataggaagtaatgttcgtatgtcgttatcatcgtataaattaaaggtgtgttttttaccattaagtgacattataattttaccaatattggaattataatataggtgtatttgcgcactcgcgacggttgatgcatcggtaaatatagctgtatctaatgttctagtcggtatttcatcatttcgctgtctaataatagcgttttctctatctgtttccattacagctgcctgaagtttattggtcggataatatgtaaaataataagaaatacatacgaataacaaaaataaaataagatataataaagatgccatttagagatctaattttgttcaacttgtccaaattcctacttacagaagatgaggaatcgttggagatagtgtcttccttatgtagaggatttgaaatatcttatgatgacttgataacttactttccagataggaaataccataaatatatttataaagtatttgaacatgtagatttatcggaggaattaagtatggaattccatgatacaactctgagagatttagtctatcttagattgtacaagtattccaagtgtatacggccgtgttataaattaggagataatctaaaaggcatagttgttataaaggacaggaatatttatattagggaagcaaatgatgacttgatagaatatctcctcaaggaatacactcctcagatttatacatattctaatgagcgcgtccccataactggttcaaaattaattctttgtggattttctcaagttacatttatggcgtatacaacgtcgcatataacaacaaataaaaaggtagatgttctcgtttccaaaaaatgtatagatgaactagtcgatccaataaattatcaaatacttcaaaatttatttgataaaggaagcggaacaataaacaaaatactcaggaagatattttattcggtaacaggtggccaaactccataatttgctttttctatttcggattttagaatttccaaattcaccagcgatttatcggttttggtgaaatccaaggatttattaatgtccacaaatgccatttgttttgtctgtggattgtatttgaaaatggaaacgatgtagttagatagatgcgctgcaaagtttcctattagggttccgcgctttacgtcacccagcatacttgaatcaccatcctttaaaaaaaatgataagatatcaacatggagtatatcatactcggattttaattcttctactgcatcactgacattttcacaaatactacaatacggtttaccgaaaataatcagtacgttcttcatttatgggtatcaaaaacttaaaatcgttactgctggaaaataaatcactgacgatattagatgataatttatacaaagtatacaatggaatatttgtggatacaatgagtatttatatagccgtcgccaattgtgtcagaaacttagaagagttaactacggtattcataaaatacgtaaacggatgggtaaaaaagggagggcatgtaaccctttttatcgatagaggaagtataaaaattaaacaagacgttagagacaagagacgtaaatattctaaattaaccaaggacagaaaaatgttagaattagaaaagtgtacatccgaaatacaaaatgttaccggatttatggaagaagaaataaaggcagaaatgcaattaaaaatcgataaactcacatttcaaatatatttatctgattctgataacataaaaatatcattgaatgagatactaacacatttcaacaataatgagaatgttacattattttattgtgatgaacgagacgcagaattcgttatgtgtctcgaggctaaaacacatttctctaccacaggagaatggccgttgataataagtaccgatcaggatactatgctatttgcatctgctgataatcatcctaagatgataaaaaacttaactcaactgtttaaatttgttccctcggcagaggataactatttagcaaaattaacggcgttagtgaatggatgtgatttctttcctggactctatggggcatctataacacccaccaacttaaacaaaatacaattgtttagtgattttacaatcgataatatagtcactagtttggcaattaaaaattattatagaaagactaactctaccgtagacgtgcgtaatattgttacgtttataaacgattacgctaatttagacgatgtctactcgtatattcctccttgtcaatgcactgttcaagaatttatattttccgcattagatgaaaaatggaatgaatttaaatcatcttatttagagaccgttccgttaccctgtcaattaatgtacgcgttagaaccacgtaaggagattgatgtttcagaagttaaaactttatcatcttatatagatttcgaaaatactaaatcagatatcgatgttataaaatctatatcctcgatcttcggatattctaacgaaaactgtaacacgatagtattcggcatctataaggataatttactactgagtataaataattcattttactttaacgatagtctgttaataaccaatactaaaagtgataatataataaatataggttactagattaaaaatggtgttccaactcgtgtgctctacgtgcggcaaagatatttctcacgaacgatataaattgattatacgaaaaaaatcattaaaggatgtactcgtcagtgtaaagaacgaatgttgtaggttaaaattatctacacaaatagaacctcaacgtaacttaacagtgcaacctctattggatataaactaatatggatccggttaattttattaagacatatgcgcctagaggttctattatttttattaattataccatgtcattaacaagtcatttgaatccatcgatagaaaaacatgtgggtatttattatggtacgttattatcggaacacttggtagttgaatctacctatagaaaaggagttcgaatagtcccattggatagtttttttgaaggatatcttagtgcaaaagtatacatgttagagaatattcaagttatgaaaatagcagctgatacgtcattaactttattgggtattccgtatggatttggtcataatagaatgtattgttttaaattggtagctgaatgttataaaaatgccggtgttgaaacatcgtctaaacgaatattgggtaaaaatatttttctgagccaaaacttcacagacgataatagatggataaagatatatgattctaataatttaacattttggcaaattgattaccttaaagggtgagttaatatgcataactactcctccgttgttttttccctcgttctttttcttaacgttgtttgccatcactctcataatgtaaagatattctaaaatggtaaacttttgcatatcggacgcagaaattggtataaatgttgtaattgtattatttcccgtcaatggactagtcacagctccatcagttttatatcctttagagtatttctcactcgtgtctaacattctagagcattccatgatctgtttatcgttgatattggccggaaagatagattttttattttttattatattactattggcaattgtagatataacttctggtaaatatttttctaccttttcaatctcttctattttcaagccggctatatattctgctatattgttgctagtatcaataccttttcttgctaagaagtcatatgtggtattcactatatcagttttaactggtagttccattagcctttccacttctgcagaataatcagaaattggttctttaccagaaaatccagctactataataggctcaccgatgatcattggcaaaatcctatattgtaccagattaatgagagcatatttcatttccaataattctgctagttcttgagacattgatttatttgatgaatctagttggttctctagatactctaccatttctgccgcatacaataacttgttagataaaatcagggttatcaaagtgtttagcgtggctagaatagtgggcttgcatgtattaaagaatgcggtagtatgagtaaaccgttttaacgaattatatagtctccagaaatctgtggcgttacatacatgagccgaatgacatcgaagattgtccaatatttttaatagctgctctttgtccattatttctatatttgactcgcaacaattgtagataccattaatcaccgattcctttttcgatgctggacaatagcacaattgtttagctttggactctatgtattcagaattaatagatatatctctcaatacagattgcactatacattttgaaactatgtcaaaaattgtagaacgacgctgttctgcagccatttaactttaaataatttacaaaaatttaaaatgagcatccgtataaaaatcgataaactgcgccaaattgtggcatatttttcagagttcagtgaagaagtgtctataaatgtagactcgacggatgagttaatgtatatttttgccgccttgggcggatctgtaaacatttgggcaattatacctctaagtgcatcagtgttttaccgaggagccgaaaatattgtgtttaatcttcctgtgtccaaggtaaaatcgtgtttgtgtagttttcacaatgatgccatcatagatatagaacctgatctggaaaataatctagtaaaactttctagttatcatgtagtaagtgtcgattgtaacaaggaactgatgcctattaggacagatactactatttgtctaagtatagatcaaaagaaatcttacgtgtttaattttcacaagtatgaagaaaaatgttgtggtagaaccgtcattcatctagaatggttgttgggctttatcaagtgtattagtcagcatcagcatctggctattatgtttaaagatgacaatattattatgaagactcctggtaatactgatgcgttttccagggaatattctatgactgaatgttctcaagaactacaaaagttttctttcaaaatagctatctcgtctctcaacaaactacgaggattcaaaaagagagtcaatgtttttgaaactagaatcgtaatggataatgacgataacattttaggaatgttgttttcggatagagttcaatcctttaagatcaacatctttatggcgtttttagattaatactttcaatgagataaatatgggtggcggagtaagtgttgagctccctaaacgggatccgcctccgggagtacccactgatgagatgttattaaacgtggataaaatgcatgacgtgatagctcccgctaagcttttagaatatgtgcatataggaccactagcaaaagataaagaggataaagtaaagaaaagatatccagagtttagattagtcaacacaggacccggtggtctttcggcattgttaagacaatcgtataatggaaccgcacccaattgctgtcgcacttttaatcgtactcattattggaagaaggatggaaagatatcagataagtatgaagagggtgcagtattagaatcgtgttggccagacgttcacgacactggaaaatgcgatgttgatttattcgactggtgtcagggggatacgttcgatagaaacatatgccatcagtggatcggttcagcctttaataggagtaatagaactgtagagggtcaacaatcgttaataaatctgtataataagatgcaaacattatgtagtaaagatgctagtgtaccaatatgcgaatcatttttgcattatttacgcgcacacaatacagaagatagcaaagagatgatcgattatattctaagacaacagtctgcggactttaaacagaaatatatgagatgtagttatcccactagagataagttagaagagtcattaaaatatgcggaacctcgagaatgttgggatccagagtgttcgaatgccaatgttaatttcttactaacacgtaattataataatttaggactttgcaatattgtacgatgtaataccagcgtgaacaacttacagatggataaaacttcctcattaagattgtcatgtggattaagcaatagtgatagattttctactgttcccgtcaatagagcaaaagtagttcaacataatattaaacactcgttcgacctaaaattgcatttgatcagtttattatctctcttggtaatatggatactaattgtagctatttaaatgggtgccgcggcaagcatacagacgacggtgaatacactcagcgaacgtatctcgtctaaattagaacaagaagcgaacgctagtgctcaaacaaaatgtgatatagaaatcggaaatttttatatccgacaaaaccatggatgtaacctcactgttaaaaatatgtgctctgcggacgcggatgctcagttggatgctgtgttatcagccgctacagaaacatatagtggattaacaccggaacaaaaagcatacgtgccagctatgtttactgctgcgttaaacattcagacgagtgtaaacactgttgttagagattttgaaaattatgtgaaacagacttgtaattctagcgcggtcgtcgataacaaattaaagatacaaaacgtaatcatagatgaatgttacggagccccaggatctccaacaaatttggaatttattaatacaggatctagcaaaggaaattgtgccattaaagcgttgatgcaattgacgactaaggccactactcaaatagcacctagacaagttgctggtacaggagttcagttttatatgattgttatcggtgttataatattggcagcgttgtttatgtactatgccaagcgtatgttgttcacatccaccaatgataaaatcaaacttattttagccaataaggaaaacgtccattggactacttacatggacacattctttagaacttctccgatggttattgctaccacggatatgcaaaactgaaaatatattgataatattttaatagattaacatggaagttatcgctgatcgtctagacgatatagtgaaacaaaatatagcggatgaaaaatttgtagattttgttatacacggtctagagcatcaatgtcctgctatacttcgaccattaattaggttgtttattgatatactattatttgttatagtaatttatatttttacggtacgtctagtaagtagaaattatcaaatgttgttggtggtgctagtcatcacattaactattttttattactttatactataatagtactagactgacttctaacaaacatctcacctgccataaataaatgcttgatattaaagtcttctatttctaacactattccatctgtggaaaataatactctgacattatcgctaattgacacatcggtgagtgatatgcctataaagtaataatcttctttgggcacatataccagtgtaccaggttctaacaacctatttactggtgctcctgtagcatactttttctttaccttgagaatatccatcgtttgcttggtcaatagcgatatgtgattttttatcaaccactcaaaaaagtaattggagtgttcatatcctctacgggctattgtctcatggccgtgtatgaaatttaagtaacacgactgtggtagatttgttctatagagccgattgccgcaaatagatagaactaccaatatgtctgtacaaatgttaaacattaattgattaacagaaaaaacaatgttcgttctgggaatagaaaccagatcaaaacaaaattcgttagaatatatgccacgtttatacatggaatataaaataactacagtttgaaaaataacagtatcatttaaacatttaacttgcggggttaatctcacaactttactgtttttgaactgttcaaaatatagcatcgatccgtgagaaatacgtttagccgcctttaatagaggaaatcccaccgcctttctggatctcaccaacgacgatagttctgaccagcaactcatttcttcatcatccacctgttttaacatataataggcaggagatagatatccgtcattgcaatattccttctcgtaggcacacaatctaatattgataaaatctccattctcttctctgcatttattatcttgtctcggtggctgattaggctgtggtcttggtttaggccttggtctatcgttgttgaatctattttggtcattaaatctttcatttcttcctggtatatttctatcacctcgtttggttggatttttgtctatattatcgtttgtaacatcggtacgggtattcatttatcacaaaaaaaacttctctaaatgagtctactgctagaaaacctcatcgaagaagataccatattttttgcaggaagtatatctgagtatgatgatttacaaatggttattgccggcgcaaaatccaaatttccaagatctatgctttctatttttaatatagtacctagaacgatgtcaaaatatgagttggagttgattcataacgaaaatatcacaggagcaatgtttaccacaatgtataatataagaaacaatttgggtctaggagatgataaactaactattgaagccattgaaaactatttcttggatcctaacaatgaagttatgcctcttattattaataatacggatatgactgccgtcattcctaaaaaaagtggtaggagaaagaataagaacatggttatcttccgtcaaggatcatcacctatcttgtgcattttcgaaactcgtaaaaagattaatatttataaagaaaatatggaatccgcgtcgactgagtatacacctatcggagacaacaaggctttgatatctaaatatgcgggaattaatgtcctgaatgtgtattctccttccacatccataagattgaatgccatttacggattcaccaataaaaataaactagagaaacttagtactaataaggaactagaatcgtatagttctagccctcttcaagaacccattaggttaaatgattttctgggactattggaatgtgttaaaaagaatattcctctaacagatattccgacaaaggattgattactataaatggagaatgttcctaatgtatactttaatcctgtgtttatagagcccacgtttaaacattctttattaagtgtttataaacacagattaatagttttatttgaagtattcgttgtattcattctaatatatgtattttttagatctgaattaaatatgttcttcatgcctaaacgaaaaatacccgatcctattgatagattacgacgtgctaatctagcgtgtgaagacgataaattaatgatctatggattaccatggatgacaactcaaacatctgcgttatcaataaatagtaaaccgatagtgtataaagattgtgcaaagcttttgcgatcaataaatggatcacaaccagtatctcttaacgatgttcttcgcagatgatgattcattttttaagtatttggctagtcaagatgatgaatcttcattatctgatatattgcaaatcactcaatatctagactttctgttattattattgatccaatcaaaaaataaattagaagccgtgggtcattgttatgaatctctttcagaggaatacagacaattgacaaaattcacagactttcaagattttaaaaaactgtttaacaaggtccctattgttacagatggaagggtcaaacttaataaaggatatttgttcgactttgtgattagtttgatgcgattcaaaaaagaatcctctctagctaccaccgcaatagatcctgttagatacatagatcctcgtcgcgatatcgcattttctaacgtgatggatatattaaagtcgaataaagtgaacaataattaattctttattgtcatcatgaacggcggacatattcagttgataatcggccccatgttttcaggtaaaagtacagaattaattagacgagttagacgttatcaaatagctcaatataaatgcgtgactataaaatattctaacgataatagatacggaacgggactatggacgcatgataagaataattttgaagcattggaagcaactaaactatgtgatgtcttggaatcaattacagatttctccgtgataggtatcgatgaaggacagttctttccagacattgtttaattctgtgagcgtatggcaaacgaaggaaaaatagttatagtagccgcactcgatgggacatttcaacgtaaaccgtttaataatattttgaatcttattccattatctgaaatggtggtaaaactaactgctgtgtgtatgaaatgctttaaggaggcttccttttctaaacgattgggtgaggaaaccgagatagagataataggaggtaatgatatgtatcaatcggtgtgtagaaagtgttacgtcggctcataatattatattttttatctaaaaaactaaaaataaacattgattaaattttaatataatacttaaaaatggatgttgtgtcgttagataaaccgtttatgtattttgaggaaattgataatgagttagattacgaaccagaaagtgcaaatgaggtcgcaaaaaaactgccgtatcaaggacagttaaaactattactaggagaattattttttcttagtaagttacagcgacacggtatattagatggtgccaccgtagtgtatataggatcggctcctggtacacatatacgttatttgagagatcatttctataatttaggagtgatcatcaaatggatgctaattgacggccgccatcatgatcctattttaaatggattgcgtgatgtaactctagtgactcggttcgttgatgaggaatatctacgatccatcaaaaaacaactgcatccttctaagattattttaatttctgatgtaagatccaaacgaggaggaaatgaacctagtacggcggatttactaagtaattacgctctacaaaatgtcatgattagtattttaaaccccgtggcatctagtcttaaatggagatgcccgtttccagatcaatggatcaaggacttttatatcccacacggtaataaaatgttacaaccttttgctccttcatattcagctgaaatgagattattaagtatttataccggtgagaacatgagactgactcgagttaccaaattagacgctgtaaattatgaaaaaaagatgtactaccttaataagatcgtccgtaacaaagtagttgttaactttgattatcctaatcaggaatatgactattttcacatgtactttatgctgaggaccgtgtactgcaataaaacatttcctactactaaagcaaaggtactatttctacaacaatctatatttcgtttcttaaatattccaacaacatcaactgaaaaagttagtcatgaaccaatacaacgtaaaatatctagcaaaaattctatgtctaaaaacagaaatagcaagagatccgtacgcagtaataaatagaaacgtactactgagatatactaccgatatagagtataatgatttagttactttaataaccgttagacataaaattgattctatgaaaactgtgtttcaggtatttaacgaatcatccataaattatactccggttgatgatgattatggagaaccaatcattataacatcgtatcttcaaaaaggtcataacaagtttcctgtaaattttctatacatagatgtggtaatatctgacttatttcctagctttgttagactagatactacagaaactaatatagttaatagtgtactacaaacaggcgatggtaaaaagactcttcgtcttcccaaaatgttagagacggaaatagttgtcaagattctctatcgccctaatataccattaaaaattgttagatttttccgcaataacatggtaactggagtagagatagccgatagatctgttatttcagtcgctgattaatcaattagtagagatgagataagaacattataataatcaataatatatcttatatcttatatcttatatcttatatcttgtttagaaaaatgctaatattaaaatagctaacgctagtaatccaatcggaagccatttgatatctataatagggtatctaatttcctgatttaaatagcggacagctatattctcggtagctactcgtttggaatcacaaacattatttacatctaatttactatctgtaatggaaacgtttcccaatgaaatggtacaatccgatacattgcattttgttatatttttttttaaagaggctggtaacaacgcatcgcttcgtttacatggctcgtaccaacaataatagggtaatcttgtatctattcctatccgtactatgcttttatcaggataaatacatttacatcgtatatcgtctttgttagcatcacagaatgcataaatttgttcgtccgtcatgataaaaatttaaagtgtaaatataactattatttttatagttgtaataaaaagggaaatttgattgtatactttcggttctttaaaagaaactgacttgataaaaatggctgtaatctctaaggttacgtatagtctatatgatcaaaaagagattaatgctacagatattatcattagtcatgttaaaaatgacgacgatatcggtaccgttaaagatggtagactaggtgctatggatggggcattatgtaagacttgtgggaaaacggaattggaatgtttcggtcactggggtaaagtaagtatttataaaactcatatagttaagcctgaatttatttcagaaattattcgtttactgaatcatatatgtattcactgcggattattgcgttcacgagaaccgtattccgacgatattaacctaaaagagttatcgggacacgctcttaggagattaaaggataaaatattatccaagaaaaagtcatgttggaacagtgaatgtatgcaaccgtatcaaaaaattactttttcaaagaaaaaggtttgtttcgtcaacaagttggatgatattaacgttcctaattctctcatctatcaaaagttaatttctattcatgaaaagttttggccattattagaaattcatcaatatccagctaacttattttatacagactactttcccatccctccgttgattattagaccggctattagtttttggatagatagtatacccaaagagaccaatgaattaacttacttattaggtatgatcgttaagaattgtaacttgaatgctgatgaacaggttatccagaaggcggtaatagaatacgatgatattaaaattatttctaataacactaccagtatcaatttatcatatattacatccggcaaaaataatatgattagaagttatatcgtcgcccgacgaaaagatcagaccgctagatctgtaattggtcccagtacatctatcaccgttaatgaggtaggaatgcccgcatatattagaaatacacttacagaaaagatatttgttaatgcctttacagtggataaagttaaacaactattagcgtcaaaccaagttaaattttactttaataaacgattaaaccaattaacaagaatacgccaaggaaagtttattaaaaataaaatacatttattgcctggtgattgggtagaagtagctgttcaagaatatacaagtattatttttggaagacagccgtctctacatagatacaacgtcatcgcttcatctatcagagctaccgaaggagatactatcaaaatatctcccggaattgccaactctcaaaatgctgatttcgacggggatgaggaatggatgatattagaacaaaatcctaaagctgtaattgaacaaagtattcttatgtatccgacgacgttactcaaacacgatattcatggagcccccgtttatggatctattcaagatgaaatcgtagcagcgtattcattgtttaggatacaagatctttgtttagatgaagtattgaacatcttggggaaatatggaagagagttcgatcctaaaggtaaatgtaaattcagcggtaaagatatctatacttacttgataggtgaaaagattaattatccgggtctcttaaaggatggtgaaattattgcaaacgacgtagatagtaattttgttgtggctatgaggcatctgtcattggctggactcttatccgatcataagtcgaacgtggaaggtatcaactttattatcaagtcatcttatgtttttaagagatatctatctatttacggttttggggtgacattcaaagatctgagaccaaattcgacgttcactaataaattggaggccatcaacgtagaaaaaatagaacttatcaaagaagcatacgccaaatatctcaacgatgtaagagacgggaaaatagttccattatctaaagctttagaggcggactatgtggaatccatgttatccaacttgacaaatcttaatatccgagagatagaagaacatatgagacaaacgctgatagatgatccagataataacctcctgaaaatggccaaagcgggttataaagtaaatcccacagaactaatgtatattctaggtacgtatggacaacaaaggattgatggtgaaccagcagagactcgagtattgggtagagttttaccttactatcttccagactctaaggatccagaaggaagaggttatattcttaattctttaacaaaaggattaacgggttctcaatattacttttcgatgctggttgccagatctcaatctactgatatcgtctgtgaaacatcacgtaccggaacactggctagaaaaatcattaaaaagatggaggatatggtggtcgacggatacggacaagtagttataggtaatacgctcatcaagtacgccgccaattataccaaaattctaggctcagtatgtaaacctgtagatcttatctatccagatgagtccatgacttggtatttggaaattagtgctctgtggaataaaataaaacagggattcgtttactctcagaaacagaaacttgcaaagaagacattggcgccgtttaatttcctagtattcgtcaaacccaccactgaggataatgctattaaggttaaggatctgtacgatatgattcataacgtcattgatgatgtgagagagaaatacttctttacggtatctaatatagattttatggagtatatattcttgacgcatcttaatccttctagaattagaattacaaaagaaacggctatcactatctttgaaaagttctatgaaaaactcaattatactctaggtggtggaactcctattggaattatttctgcacaggtattgtctgagaagtttacacaacaagccctgtccagttttcacactactgaaaaaagtggtgccgtcaaacaaaaacttggtttcaacgagtttaataacttgactaatttgagtaagaataagaccgaaattatcactctggtatccgatgatatctctaaacttcaatctgttaagattaatttcgaatttgtatgtttgggagaattaaatccagacatcactcttcgaaaagaaacagataggtatgtagtagatataatagtcaatagattatacatcaagagagcagaaataaccgaattagtcgtcgaatatatgattgaacgatttatctcctttagcgtcattgtaaaggaatggggtatggaaacattcattgaggatgaggataatattagatttactgtctacctaaatttcgttgaaccggaagaattgaatcttagtaagtttatgatggttcttccgggtgccgccaacaagggaaagattagtaaattcaagattcctatctctgactatacgggttatgacgacttcaatcaaacaaaaaagctcaataagatgactgtagaactcatgaatctaaaagaattgggttctttcgatttggaaaacgtcaacgtgtatcctggagtatggaatacatacgatatcttcggtatcgaggccgctcgtgaatacttgtgcgaagccatgttaaacacctatggagaagggttcgattatctgtatcagccttgtgatcttctcgctagtttactatgtgctagttacgaaccagaatcagtgaataaattcaagttcggcgcagctagtactcttaagagagctacgttcggagacaataaagcattgttaaacgcggctcttcataaaaagtcagaacctattaacgataatagtagctgccacttttttagcaaggtccctaatataggaactggatattacaaatactttatcgacttgggtcttctcatgagaatggaaaggaaactatctgataagatatcttctcaaaagatcaaggaaatggaagaaacagaagacttttaattcttatcaataacatatttttctatgatctgtcttttaaacgatggattttccacaaatgcgcctctcaagtccctcatagaatgatacacgtataaaaaatatagcataggcgatgactccttatttttagacattagatatgccaaaatcatagccccgcttctatttactcccgcagcacaatgaaccaacacgggctcgtttcgttgatcacatttagataaaaaggcggttacgtcgtcaaaatatttactaatatcggtagttgtatcatctaccaacggtatatgaataatattaatattagagttaggtaatgtatatttatccatcgtcaaatttaaaacatatttgaacttaacttcagatgatggtgcatccatagcatttttataatttcccaaatacacattattggttacccttgtcattatagtgggagatttggctttgtgcatatctccagttgaacgtagtagtaagtatttatacaaacttttcttatccatttataacgtacaaatggataaaactactttatcggtaaacgcgtgtaatttagaatacgttagagaaaaggctatagtaggcgtacaagcagccaaaacatcaacacttatattctttgttattatattggcaattagtgcgctattactctggtttcagacgtctgataatccagtctttaatgaattaacgagatatatgcgaattaaaaatacggttaacgattggaaatcattaacggatagcaaaacaaaattagaaagtgatagaggtagacttctagccgctggtaaggatgatatattcgacttcaaatgtgtggatttcggcgcctattttatagctatgcgattggataagaaaacatatctgccgcaagctattaggcgaggtactggagacgcgtggatggttaaaaaggcggcaaaggtcgatccatctgctcaacaattttgtcagtatttgataaaacacaagtctaataatgttattacttgtggtaatgagatgttaaatgaattaggttatagcggttattttatgtcaccgcattggtgttccgattttagtaatatggaatagtgttagataaatgcggtaacgaatgttcctgtaaggaaccataacagcttagatttaacgttaaagatgagcataaacataataaacaaaattacaatcaaacttataacattaatatcaaacaatccaaaaaatgaaatcagtggagtagtaaacgcgtacataactcctggataacgtttagcagctgccgttcctattctagaccaaaaatttggtttcatgttttcgaaacggtattctgcaacaagtcggggatcgtgttctacatatttggcggcattatccagtatctgcctattgatcttcatttcgttttcgattctggctatttcaaaataaaatcccgatgatagacctccagactttataatttcatctacgatgttcagcgccgtagtaactctaataatataggctgataagctaacatcataccctcctgtatatgtgaatatggcatgatttttgtccattacaagctcggttttaactttattgcctgtaataatttctctcatctgtaggatatctatttttttgtcatgcattgccttcaagacgggacgaagaaacgtaatatcctcaataacgttatcgttttctacaataactacatattctacctttttattttctaactcggtaaaaaaattagaatcccatagggctaaatgtctagcgatatttcttttcgtttcttctgtacacatagtgttacaaaaccctgaaaagaagtgagtatacttgtcatcatttctaatgtttcctccagtccactgtataaacgcataatccttgtaatgatctggatcatccttgactaccacaacatttcttttttctggcataacttcgttgtcctttacatcatcgaacttctgatcattaatatgctcatgaacattaggaaatgtttctgatggaggtctatcaataactggcacaacaataacaggagttttcaccgccgccatttagttattgaaattaatcatatacaactctttaatacgagttatattttcgtctatccattgtttcacattgacatatttcgacaaaaagatataaaatgcgtattccaatgcttctctgtttaatgaattactaaaatatacaaacacgtcactgtctggcaataaatgatatcttagaatattgtaacaatttattttgtattgcacatgttcgtgatctatgagttcttcttcgaatggcataggatctccgaatctgaaaacgtataaataggagttagaataataatatttgagagtattggtaatatataaactctttagcggtataattagtttttttctctcaatttctatttttagatgtgatggaaaaatgactaattttgtagcattagtatcatgaactctaatcaaaatcttaatatcttcgtcacacgttagctctttgaagtttttaagagatgcatcagttggttctacagatggagtaggtgcaacaattttttgttctacacatgtatgtactggagccattgttttaactataatggtgcttgtatcgaaaaactttaatgcagatagcggaagctcttcgccgcgactttctacgtcgtaattgggttctaacgccgatctctgaatggatactagttttctaagttctaatgtgattctctgaaaatgtaaatccaattcctccggcattatagatgtgtatacatcggtaaataaaactatagtatccaacgatcccttctcgcaaattctagtcttaaccaaaaaatcgtatataaccacggagatggcgtatttaagagtggattcttctaccgttttgttcttggatgtcatataggaaactataaagtccgcactactgttaagaatgattactaacgcaactatatagtttaaattaagcattttggaaacataaaataactctgtagacgatacttgactttcgaataagtttgcagacaaacgaagaaagaacagacctctcttaatttcagaagaaaactttttttcgtattcctgacgtctagagtttatatcaataagaaagttaagaattagtcggttaatgttgtatttcattacccaagtttgagatttcataatattatcaaaagacatgataatattaaagataaagcgctgactatgaacgaaatagctatatggttcgctcaagaatatagtcttgttaaacgtggaaacgataactgtatttttaatcacgtcagcggcatctaaattaaatataggtatatttattccacacactctacaatatgccacaccatcttcataataaataaattcgttagcaaaattattaattttagtgaaatagttagcgtcaactttcatagcttccttcaatctaatttgatgctcacacggtgcgaattccactctaacatcccttttccatgcctcaggttcatcgatctctataatatctagttttttgcgtttcacaaacacaggctcgtctctcgcgatgagatctgtatagtaactatgtaaatgataactagatagaaagatgtagctatatagatgacgatcctttaagagaggtataataactttaccccaatcagatagactgttgttatggtcttcggaaaaagaatttttataaatttttccagtattttccaaatatacgtacttaacatctaaaaaatccttaatgataataggaatggataatccgtctattttataaagaaatacatatcgcacattatacttttttttggaaatgggaataccgatgtgtctacataaatatgcaaagtctaaatattttttagagaatcttagttggtccaaattcttttccaagtacggtaatagatttttcatattgaacggtatcttcttaatctctggttctagttccgcattaaatgatgaaactaagtcactatttttataactaacgattacatcacctctaacatcatcatttaccagaatactgatcttcttttgtcgtaaatacatgtctaatgtgttaaaaaaaagatcatacaagttatacgtcatttcatctgtggtattcttgtcattgaaggataaactcgtactaatctcttctttaacagcctgttcaaatttatatcctatatacgaaaaaatagcaaccagtgtttgatcatccgcgtcaatattctgttctatcgtagtgtataacaatcgtatatcttcttctgtgatagtcgatacgttataaaggttgataacgaaaatatttttatttcgtgaaataaagtcatcgtaggattttggacttatattcgcgtctagtagatatgcttttatttttggaatgatctcaattagaatagtctctttagagtccatttaaagttacaaacaactaggaaattggtttatgatgtataatttttttagtttttatagattctttattctatacttaaaaaatgaaaataaatacaaaggttcttgagggttgtgttaaattgaaagcgagaaataatcataaattatttcattatcgcgatatccgttaagtttgtatcgtaatggcgtggtcaattacgaataaagcggatactagtagcttcacaaagatggctgaaatcagagctcatctaaaaaatagcgctgaaaataaagataaaaacgaggatattttcccggaagatgtaataattccatctactaagcccaaaaccaaacgagccactactcctcgtaaaccagcggctactaaaagatcaaccaaaaaggaggaagtggaagaagaagtagttatagaggaatatcatcaaacaactgaaaaaaattctccatctcctggagtcagcgacattgtagaaagcgtggctgctgtagagctcgatgatagcgacggggatgatgaacctatggtacaagttgaagctggtaaagtaaatcatagtgctagaagcgatctttctgacctaaaggtggctaccgacaatatcgttaaagatcttaagaaaattattactagaatctctgcagtatcgacggttctagaggatgttcaagcagctggtatctctagacaatttacttctatgactaaagctattacaacactatctgatctagtcaccgagggaaaatctaaagttgttcgtaaaaaagttaaaacttgtaagaagtaaatgcgtgcacttttttataaagatggtaaactctttaccgataataattttttaaatcctgtatcagacgataatccagcgtatgaggttttgcaacatgttaaaattcctactcatttaacagatgtagtagtatatgaacaaacgtgggaggaggcgttaactagattaatttttgtgggaagcgattcaaaaggacgtagacaatacttttacggaaaaatgcatgtacagaatcgcaacgctaaaagagatcgtatttttgttagagtatataacgttatgaaacgaattaattgttttataaacaaaaatataaagaaatcgtccacagattccaattatcagttggcggtttttatgttaatggaaactatgttttttattagatttggtaaaatgaaatatcttaaggagaatgaaacagtagggttattaacactaaaaaataaacacatagaaataagtcccgatgaaatagttatcaagtttgtaggaaaggacaaagtttcacatgaatttgttgttcataagtctaatagactatataaaccgctattgaaactgacggatgattctagtcccgaagaatttctgttcaacaaactaagtgaacgaaaggtatacgaatgtatcaaacagtttggtattagaatcaaggatctccgaacgtatggagtcaattatacgtttttatataatttttggacaaatgtaaagtccatatctcctcttccgtcaccaaaaaagttaatagcgttaactatcaaacaaactgctgaagtggtaggtcatactccatcaatttcaaaaagagcttatatggcaacgactattttagaaatggtaaaggataaaaattttttagatgtagtatctaaaactacgttcgatgaattcctatctatagtcgtagatcacgttaaatcatctacggatggatgatatagatctttacacaaataattacaagaccgataaatggaaatggataagcgtatgaaatctctcgcaatgacagctttcttcggagagctaagcacattagatattatggcattgataatgtctatatttaaacgccatccaaacaataccattttttcagtggataaggatggtcagtttatgattgatttcgaatacgataattataaggcttctcaatatttggatctgaccctcactccgatatctggagatgaatgcaagactcacgcatcgagtatagccgaacaattggcgtgtgtggatattattaaagaggatattagcgaatatatcaaaactactccccgtcttaaacgatttataaaaaaataccgcaatagatcagatactcgcatcagtcgagatacagaaaagcttaaaatagctctagctaaaggcatagattacgaatatataaaagacgcttgttaataagtaaatgaaaaaaaactagtcgtttataataaaacacgatatggatgccaacgtagtatcatcttctactattgcgacgtatatagacgctttagcgaagaatgcttcagaattagaacagaggtctaccgcatacgaaataaataatgaattggaactagtatttattaagccgccattgattactttgacaaatgtagtgaatatctctacgattcaggaatcgtttattcgatttaccgttactaataaggaaggtgttaaaattagaactaagattccattatctaaggtacatggtctagatgtaaaaaatgtacagttagtagatgctatagataacatagtttgggaaaagaaatcattagtgacggaaaatcgtcttcacaaagaatgcttgttgagactatcgacagaggaacgtcatatatttttggattacaagaaatatggatcctctatccgactagaattagtcaatcttattcaagcaaaaacaaaaaactttacgatagactttaagctaaaatattttctaggatccggtgcccaatctaaaagttctttgttgcacgctattaatcatccaaagtcaaggcctaatacatctctggaaatagaattcacacctagagacaatgaaacagttccatatgatgaactaataaaggaattgacgactctctcgcgtcatatatttatggcttctccagagaatgtaattctttctccgcctattaacgcgcctataaaaacctttatgttgcctaaacaagatatagtaggtttggatctggaaaatctatatgccgtaactaagactgacggcattcctataactatcagagttacatcaaacgggttgtattgttattttacacatcttggttatattattagatatcctgttaagagaataatagattccgaagtagtagtctttggtgaggcagttaaggataagaactggaccgtatatctcattaagctaatagagcccgtgaatgcaatcagtgatagactagaagaaagtaagtatgttgaatctaaactagtggatatttgtgatcggatagtattcaagtcaaagaaatacgaaggtccgtttactacaactagtgaagtcgtcgatatgttatctacatatttaccaaagcaaccagaaggtgttattctgttctattcaaagggacctaaatctaacattgattttaaaattaaaaaggaaaatactatagaccaaactgcaaatgtagtatttaggtacatgtccagtgaaccaattatctttggagaatcgtctatctttgtagagtataagaaatttagcaacgataaaggctttcctaaagaatatggttctggtaagattgtgttatataacggcgttaattatctaaataatatctattgtttggaatatattaatacacataatgaagtgggtattaagtccgtggttgtacctattaagtttatagcagaattcttagttaatggagaaatacttaaacctagaattgataaaaccatgaaatatattaactcagaagattattatggaaatcaacataatatcatagtcgaacatttaagagatcaaagcatcaaaataggagatatctttaacgaggataaactatcggatgtgggacatcaatacgccaataatgataaatttagattaaatccagaagttagttattttacgaataaacgaactagaggaccgttgggaattttatcaaactacgtcaagactcttcttatttctatgtattgttccaaaacatttttagacgattccaacaaacgaaaggtattggcgattgattttggaaacggtgctgacctggaaaaatacttttatggagagattgcgttattggtagcgacggatccggatgctgatgctatagctagaggaaatgaaagatacaacaaattaaactctggaattaaaaccaagtactacaaatttgactacattcaggaaactattcgatccgatacatttgtctctagtgtcagagaagtattctattttggaaagtttaatatcatcgactggcagtttgctatccattattcttttcatccgagacattatgctaccgtcatgaataacttatccgaactaactgcttctggaggcaaggtattaatcactaccatggacggagacaaattatcaaaattaacagataaaaagacttttataattcataagaatttacctagtagcgaaaactatatgtctgtagaaaaaatagctgatgatagaatagtggtatataatccatcaacaatgtctactccaatgactgaatacattatcaaaaagaacgatatagtcagagtgtttaacgaatacggatttgttcttgtagataacgttgatttcgctacaattatagaacgaagtaaaaagtttattaatggcgcatctacaatggaagatagaccgtctacaaaaaactttttcgaactaaatagaggagccattaaatgtgaaggtttagatgtcgaagacttacttagttactatgttgtttatgtcttttctaagcggtaaataataatatggtatgggttctgatatccccgttctaaatgcattaaataattccaatagagcgatttttgttcctataggaccttccaactgtggatactctgtattgttaatagatatattaatacttttgtcgggtaacagaggttctacgtcttctaaaaataaaagttttataacatctggcctgttcataaataaaaacttggcgattctatatatactcttattatcaaatctagccattgtcttatagatgtgagctactgtaggtgtaccatttgattttctttctaatactatatatttctctcgaagaagttcttgcacatcatctgggaataaaatactactgttgagtaaatcagttattttttttatatcgatattgatggacatttttatagttaaggataataagtatcccaaagtcgataacgacgataacgaagtatttatacttttaggaaatcacaatgactttatcagattaaaattaacaaaattaaaggagcatgtatttttttctgaatatattgtgactccagatacatatggatctttatgcgtcgaattaaatgggtctagttttcagcacggtggtagatatataaaggtggaggaatttatagatgctggaagacaagttagatggtgttctacatccaatcatatatctaaagatatacccgaagatatgcacactgataaatttgtcatttatgatatatacacttttgacgctttcaagaataaacgattggtattcgtacaggtacctccgtcgttaggagatgatagtcatttgactaatccgttattgtctccgtattatcgtaattcagtagccagacaaatggtcaataatatgatttttaatcaagattcatttttaaaatatttattagaacatctgattagaagccactatagagtttctaaacatataacaatagttagatacaaggataccgaagaattaaatctaacgagaatatgttataatagagataagtttaaggcgtttgtattcgcttggtttaacggcgtttcggaaaatgaaaaggtactagatacgtataaaaaggtatctaatttgatataatgaattcagtgactgtatcacacgcgccatatactattacttatcacgatgattgggaaccagtaatgagtcaattggtagagttttataacgaagtagccagttggctgctacgagacgagacgtcgcctattcctgataagttctttatacagttgaaacaaccgcttagaaataaacgagtatgtgtgtgcggtatagatccgtatccgaaagatggaactggtgtaccgttcgaatcaccaaattttacaaaaaaatcaattaaggagatagcttcatctatatctagattaaccggagtaattgattataaaggttataaccttaatataatagacggggttataccctggaattattacttaagttgtaaattaggagaaacaaaaagtcacgcgatctactgggataagatttccaagttactgctgcagcatataactaaacacgttagtgttctttattgtttgggtaaaacagatttctcgaatatacgggcaaagttagaatccccggtaactaccatagtcggatatcatccagcggctagagaccgccaattcgagaaagatagatcatttgaaattatcaacgttttactggaattagacaacaaggcacctataaattgggctcaagggtttatttattaatgctttagtgaaattttaacttgtgttctaaatggatgcggctattagaggtaatgatgttatctttgttcttaagactataggtgtcccgtcagcgtgcagacaaaatgaagatccaagatttgtagaagcatttaaatgcgacgagttagaaagatatattgagaataatccagaatgtacactattcgaaagtcttagggatgaggaagcatactctatagtcagaattttcatggatgtagatttagacgcgtgtctagacgaaatagattatttaacggctattcaagattttattatcgaggtgtcaaactgtgtagctagattcgcgtttacagaatgcggtgccattcatgaaaatgtaataaaatccatgagatctaatttttcattgactaagtctacaaatagagataaaacaagttttcatattatctttttagacacgtataccactatggatacattgatagctatgaaacgaacactattagaattaagtagatcatctgaaaatccactaacaagatcgatagacactgccgtatataggagaaaaacaactcttcgggttgtaggtactaggaaaaatccaaattgcgacactattcatgtaatgcaaccaccgcatgataatatagaagattacctattcacttacgtggatatgaacaacaatagttattacttttctctacaacaacgattggaggatttagttcctgataagttatgggaaccagggtttatttcattcgaagacgctataaaaagagtttcaaaaatattcattaattctataataaactttaatgatctcgatgaaaataattttacaacggtaccactggtcatagattacgtaacaccttgtgcattatgtaaaaaacgatcgcataaacatccgcatcaactatcgttggaaaatggtgctattagaatttacaaaactggtaatccacatagttgtaaagttaaaattgttccgttggatggtaataaactgtttaatattgcacaaagaattttagacactaactctgttttattaaccgaacgaggagaccatatagtttggattaataattcatggaaatttaacagcgaagaacccttgataacaaaactaattttgtcaataagacatcaactacctaaggaatattcaagcgaattactctgtccgaggaaacgaaagactgtagaagctaacatacgagacatgttagtagattcagtggagaccgatacctatccggataaacttccgtttaaaaatggtgtattggacctggtagacggaatgttttactctggagatgatgctaaaaaatatacgtgtactgtatcaaccggatttaaatttgacgatacaaagttcgtcgaagacagtccagaaatggaagagttaatgaatatcattaacgatatccaaccattaacggatgaaaataagaaaaatagagagctatatgaaaaaacattatctagttgtttatgcggtgctaccaaaggatgtttaacattcttttttggagaaactgcaactggaaagtcgacaaccaaacgtttgttaaagtctgctatcggtgacctgtttgttgagacgggtcaaacaattttaacagatgtattggataaaggacctaatccatttatcgctaacatgcatttgaaaagatctgtattctgtagcgaactacctgattttgcctgtagtggatcaaagaaaattagatctgacaatattaaaaagttgacagaaccttgtgtcattggaagaccgtgtttctccaataaaattaataatagaaaccatgcgacaatcattatcgatactaattacaaacctgtttttgataggatagataacgcattaatgagaagaattgccgtcgtgcgattcagaacacacttttctcaaccttctggtagagaggctgctgaaaataatgacgcgtacgataaagtcaaactattagacgaggggttagatggtaaaatacaaaataatagatatagattcgcatttctatacttgttggtgaaatggtacagaaaatatcatgttcctattatgaaactatatcctacacccgaagagattcctgactttgcattctatctcaaaataggtactctgttagtatctagctctgtaaagcatattccattaatgacggacctctccaaaaagggatatatattgtacgataatgtggttactcttccgttgactactttccaacagaaaatatccaagtattttaattctagactatttggacacgatatagagagcttcatcaatagacataagaaatttgccaatgttagtgatgaatatctgcaatatatattcatagaggatatttcatctccgtaaatatatgctcatatatttatagaagatatcacatatctaaatgaataccggaatcatagatttatttgataatcatgttgatagtataccaactatattacctcatcagttagctactctagattatctagttagaactatcatagatgagaacagaagcgtgttattgttccatattatgggatcaggtaaaacaataatcgctttgttgttcgccttggtagcttccagatttaaaaaggtttacattctagtgccgaacatcaacatcttaaaaattttcaattataatatgggtgtagctatgaacttgtttaatgacgaattcatagctgagaatatctttattcattccacaacaagtttttattctcttaattataacgataacgtcattaattataacggattatctcgctacaataactctatttttatcgttgatgaggcacataatatctttgggaataatactggagaacttatgaccgtgataaaaaataaaaacaagattccttttttactattgtctggatctcccattactaacacacctaatactctgggtcatattatagatttaatgtccgaagagacgatagattttggtgaaattattagtcgtggtaagaaagtaattcagacacttcttaacgaacgaggtgtgaatgtacttaaggatttgcttaaaggaagaatatcatattacgaaatgcctgataaagatctaccaacgataagatatcacggacgtaagtttctagatactagagtagtatattgtcacatgtctaaacttcaagagagagattatatgattactagacgacagctatgttatcatgaaatgtttgataaaaatatgtataacgtgtcaatggcagtattgggacaacttaatctgatgaataatttagatactttatttcaggaacaggataaggaattgtacccaaatctgaaaataaataatggcgtgttatacggagaagaattggtaacgttaaacattagttccaaatttaaatactttattaatcggatacagacactcaacggaaaacattttatatacttttctaattctacatatggcggattggtaattaaatatatcatgctcagtaatggatattctgaatataatggttctcagggaactaatccacatatgataaacggcaaaccaaaaacatttgctatcgttactagtaaaatgaaatcgtctttagaggatctattagatgtgtataattctcctgaaaacgatgatggtagtcaattgatgtttttgttttcatcaaacattatgtccgaatcctatactctgaaagaggtaaggcatatttggtttatgactatcccagatactttttctcaatacaaccaaattcttggacgatctattagaaaattctcttacgccgatatttctgaaccagttaatgtatatcttttagccgccgtatattccgatttcaatgacgaagtgacgtcattaaacgattacacacaggatgaattaattaatgttttaccatttgacatcaaaaagctgttatatctaaaatttaagacgaaagaaacgaatagaatatactctattcttcaagagatgtctgaaacgtattctcttccaccacatccatcaattgtaaaagttttattgggagaattggtcagacaatttttttataataattctcgtattaagtataacgataccaagttacttaaaatggttacatcagttataaaaaataaagaagacgctaggaattacatagatgatattgtaaacggtcacttctttgtatcgaataaagtatttgataaatctcttttatacaaatacgaaaacgatattattacagtaccgtttagactttcctacgaaccatttgtttggggagttaactttcgtaaagaatataacgtggtatcttctccataaaactgatgagatatataaagaaataaatgtcgagctttgttaccaatggatacctttccgttacattggaaccacacgagctgacgttagacataaaaactaatattaggaatgccgtatataagacgtatctccatagagaaattagtggtaaaatggccaagaaaatagaaattcgtgaagacgtggaattacctctcggcgaaatagttaataattctgtagttataaacgttccgtgtgtaataacctacgcgtattatcacgttggggatatagtcagaggaacattaaacatcgaagatgaatcaaatgtaactattcaatgtggagatttaatctgtaaactaagtagagattcgggtactgtatcatttagcgattcaaagtactgcttttttcgaaatggtaatgcgtatgacaatggcagcgaagtcactgccgttctaatggaggctcaacaaggtatcgaatctagttttgtttttctcgcgaatatcgtcgactcataaaaaagagaatagcggtaagtataaacacgaatactatggcaataattgcgaatgttttattctcttcgatatatttttgataatatgaaaaacatgtctctctcaaatcggacaaccatctcataaaatagttctcgcgcgctggagaggtagttgccgctcgtataatctctccagaataatatacttgcgtgtcgtcgttcaatttatacggatttctatagttctctgttatataatgcggtttgccctcatgattagacgacgacaatagtgttctaaatttagatagttgatcagaatgaatgtttattggcgttggaaaaattatccatacagcgtctgcagagtggttgatagttgttcctagatatgtaaaataatccaacttactaggcagcaaattgtctagataaaatactgaatcaaacggtgcagacgtattggcggatctaatggaatccaattgattaactatcttttgaaaatatacatttttatgatccaatacttgtaagaatatagaaataatgataagtccatcatcgtgtttttttgcctcttcataagaactatattttttcttattccaatgaacaagattaatctctccagagtatttgtacacatctatcaagtgattggatccataatcgtcttcctttccccaatatatatgtagtgatgataacacatattcattggggagaaaccctccacttatatatcctcctttaaaattaatccttactagttttccagtgttctggatagtggttggtttcgactcattataatgtatgtctaacggcttcaatcgcgcgttagaaattgcttttttagtttctatattaataggagatagttgttgcggcatagtaaaaatgaaatgataactgtttaaaaatagctcttagtatgggaattacaatggatgaggaagtgatatttgaaactcctagagaattaatatctattaaacgaataaaagatattccaagatcaaaagacacgcatgtgtttgctgcgtgtataacaagtgacggatatccgttaataggagctagaagaacttcattcgcgttccaggcgatattatctcaacaaaattcagattctatctttagagtatccactaaactattacggtttatgtactacaatgaactaagagaaatctttagacggttgagaaaaggttctatcaacaatatcgatcctcactttgaagagttaatattattgggtggtaaactagataaaaaggaatctattaaagattgtttaagaagagaattaaaagaggaaagtgatgaacgtataacagtaaaagaatttggaaatgtaattctaaaacttacaacacgggataaattatttaataaagtatatataagttattgcatggcgtgttttattaatcaatcgttggaggatttatcgcatactagtatttacaatgtagaaattagaaagattaaatcattaaatgattgtattaacgacgataaatacgaatatctgtcttatatttataatatgctagttaatagtaaatgaacttttacagatctagtataattagtcagattattaagtataatagacgactagctaagtctattatttgcgaggatgactctcaaattattacactcacggcattcgttaaccaatgcctatggtgtcataaacgagtatccgtgtccgctattttattaactactgataacaaaatattagtatgtaacagacgagatagttttctctattctgaaataattagaactagaaacatgtttagaaaaaaacgattatttctgaattattccaattatttgaacaaacaggaaagaagtatactatcgtcatttttttctctagatccagctactactgataatgatagaatagacgctatttatccgggtggcatacccaaaaggggtgagaatgttccagagtgtttatccagggaaattaaagaagaagttaatatagacaattcttttgtattcatagacactcggttttttattcatggcatcatagaagataccattattaataaattttttgaggtaatcttctttgtcggaagaatatctctaacgagtgatcaaatcattgatacatttaaaagtaatcatgaaatcaaggatctaatatttttagatccgaattcaggtaatggactccaatacgaaattgcaaaatatgctctagatactgcaaaacttaaatgttacggccatagaggatgttattatgaatcattaaaaaaattaactgaggatgattgattaaaaaatataaattaatttaccatcgtgtatttttataacgggattgtccggcatatcatgtagatagttaccgtctacatcgtatactcgaccatctacgcctttaaatcctctatttattgacattaatctattagaattggaataccaaatattagtaccctcaattagtttattggtaatattttttttagacgatagatcgatggctcttgaaaccaaggttttccaaccggactcattgtcgatcggtgagaagtctttttcattagcatgaatccattctaatgatgtatgtttaaacactctaaacaattggacaaattcttttgatttgctttgaatgatttcaaataggtcttcgtctacagtaggcataccattagataatctagccattataaagtgcacgtttacatatctacgttctggaggagtaagaacgtgactattgagacgaatggctcttcctactatctgacgaagagacgcctcgttccatgtcatatctaaaatgaagatatcattaattgagaaaaaactaataccctcgcctccactagaagagaatacgcatgttttaatgcattctccgttagtgtttgattcttggttaaactcagccaccgccttgattctagtatcttttgttctagatgagaactctatattagagataccaaagactttgaaatatagtaataagatttctattcctgactgattaacaaatggttcaaagactagacatttaccatgggatgctaatattcccaaacatacatctataaatttgacgcttttctcttttaattcagtaaatagagagatatcagccgcactagcatcccctttcaatagttctccctttttaaaggtatctaatgcggatttagaaaactctctatctcttaatgaatttttaaaatcattatatagtgttgctatctcttgcgcgtattcgcccggatcacgattttgtctttcaggaaagctatcgaacgtaaacgtagtagccatacgtctcagaattctaaatgatgatatacctgtttttatttcagcgagtttagccttttgataaatttcttcttgctttttcgacatattaacgtatcgcattaatactgttttcttagcgaatgatgcagacccttctacgtcatcaaaaatagaaaactcgttattaactatatacgaacatagtcctcctagtttggagactaattctttttcatcgactagacgtttattctcaaatagtgattggtgttgtaaggatcctggtcgtagtaagttaaccaacatggtgaattcttgcacactattgacgataggtgtagccgataaacaaatcatcttatggttttttaacgcaatggtcttagataaaaaattatatactgaacgagtaggacggatcttaccatcttctttgattaatgatttagaaatgaagttatgacattcatcaatgatgacgcatattctactcttggaattaatagttttgatattagtaaaaaatttatttctaaaattttgatcatcgtaattaataaaaatacaatccttcgttatctctggagcgtatctgagtatagtgttcatccaaggatcttctatcaaagcctttttcaccaataagataatagcccaattcgtataaatatccttaagatgtttgagaatatatacagtagtcattgttttaccgacacccgtttcatggaacaataaaagagaatgcatactgtctaatcctaagaaaactcttgctacaaaatgttgataatccttgaggcgtactacgtccgaccccatcatttcaacaggcatattagtagttctgcgcaatgcataatcgatataggccgcgtgtgatttactcatttatgagtgataagtaataactatgttttaaaaatcacagcagtagtttaactagtcttctctgatgtttgttttcgatactttttgaatcagaagtcatactagaataaagcaacgagtgaacgtaatagagagcttcgtatactctattcgaaaactctaagaacttattaatgaattccgtatccactggattgtttaaaatactaaattgaacactgttcacatccttccaagaagaagacttagtgacggacttaacatgagacataaataaatccaaattttttttacaaacatcactagccaccataatggcgctatctttcaaccagctatcgcttacgcattttagcagtctaacatttttaaagagactacaatatattctcatagtatcgattacacctctaccgaataaagttggaagtttaataatacaatatttttcgtttacaaaatcaaataatggtcgaaacacgtcgaaggttaacatcttataatcgctaatgtatagattgttttcagtgagatgattattagatttaatagcatctcgttcacgtttgaacagtttattgcgtgcgctgaggtcggcaactacggcgtccgctttagtactcctcccataatactttacgctattaatctttaaaatttcatagactttatctagatcgctttctggtaacatgatatcatgtgtaaaaagttttaacatgtcggtcggcattctatttagatcattaactctagaaatctgaagaaagtaattagctccgtattccagactaggtaatgggcttttacctagagacagattaagttctggcaatgtttcataaaatggaagaaggacatgcgttccctcccggatattttttacaatttcatccatttacaactctatagtttgttttcattattattagttattatctcccataatcttggtaatacttaccccttgatcgtaagataccttatacaggtcattacatacaactaccaattgtttttgtacataatagattggatggttgacatccatggtggaataaactactcgaacagatagtttatctttccccctagatacattagccgtaatagttgtcggcctaaagaatatctttggtgtaaagttaaaagttagggttcttgttccattattgctttttgtcagtagttcattataaattctcgagatgggtccgttctctgaatatagaacatcatttccaaatctaacttctagtctagaaataatatcggtcttattcttaaaatctattcccttgatgaagggatcgttaatgaacaaatccttggcctttgattcggctgatctattatctccgttatagacgttacgttgactagtccaaagacttacaggaatagatgtatcgatgatgttgatactatgtgatatgtgagcaaagattgttctcttagtggcatcactatatgttccagtaatggcggaaaactttttagaaatgttatatataaaagaattttttcgtgttccaaacattagcagattagtatgaagataaacactcatattatcaggaacattatcaatttttacatacacatcagcatcttgaatagaaacgataccatcttctggaacctctacgatctcagcagactccggataaccagtcggtggaccatcgctaacaataactagatcatccaacaatctactcacatatgcatctatataatctttttcatcttgtgagtaccctggatacgaaataaatttattatccgtatttccataataaggtttagtataaacagagagagatgttgccgcatgaacttcagttacagtcgccgttggttggtttatttgacctattactctcctaggtttctctataaacgatggtttaatttgtacattcttaaccatatatccaataaagctcaattcaggaacataaacaaattctttgttgaacgtttcaaagtcgaacgaagagtcacgaataacgatatcggatactggattgaaggttaccgttacggtaatttttgaatcggatagtttaagactgctgaatgtatcttccacatcaaacggagttttaatataaacgtatactgtagatggttctttaatagtgtcattaggagttaggccaatagaaatatcattaagttcactagaatatccagagtgtttcaaagcaattgtattattgatacaattattatataattcttcgccctcaatttcccaaataacaccgttacacgaagagatagatacgtgattaatacatttatatccaacatatggtacgtaactgaatcttcccatacctttaacttctggaagttccaaactcagaaccaaatgattaagcgcagtaatatactgatccctaatttcgaagctagcgatagcctgattgtctggaccatcgtttgtcataactccggatagagaaatatattgcggcatatataaagttggaatttgactatcgactgcgaagacattagaccgtttaatagagtcatccccaccgatcaaagaattaatgatagtattattcattttctatttaaaatggaaaaagcttacaataaactccgtagagaaatatctataatttgtgagttttccttaaagtaacagcttccgtaaacgccgtctttatctcttagtaagtttattgtatttatgaccttttccttatcttcatagaatactaaaggcaacaaagaaatttttggttcttctctaagagctacgtgagacttaaccatagaagccaacgaatccctacatattttagaacagaaataccctacttcaccacccttgtatgtctcaatactaataggtctaaaaaccaaatcttgattacaaaaccaacacttatcaattacactatttgtcttaatagacacatctgccatagatttataatactttggtagtatacaagcgagtgcttcttctttagcgggcttaaagactgctttaggtgctgaaataaccacatctggaaggcttactcgcttagccatttaattacggaactatttttttatacttctaatgagcaagtagaaaacctctcatctacaaaaacgtactcgtgtccataatcctctaccatagttacacgttttttagatctcatatgtgctaaaaagttttcccatactaattggttactattatttttcgtataatttttaacagtttgaggttttagatttttagttacagaagtgatatcgaatattttatccaaaaagaatgaataattaattgtcttagaaggagtgttttcttggcaaaagaataccaagtgcttaaatatttctactacttcattaatcttttctgtactcagattcagtttctcatcttttacttgattgattatttcaaagactaacttataatcctttttatttattctctcgttagccttaagaaaactagatacaaaatttgcatctacatcatccgtggatatttgatttttttccatgatatccaagagttccgagataatttctccagaacattgatgagacaataatctccgcaatacatttctcaaatgaataagtttattagacacgtggaagtttgactttttttgtacctttgtacatttttgaaataccgactcgcaaaaaatacaatattcatatccttgttcagatactataccgttatgtctacaaccgctacataatcgtagattcatgttaacactctacgtatctcgtcgtccaatattttatataaaaacattttatttctagacgttgccagaaaatcctgtaatatttttagttttttgggctgtgaataaagtatcgccctaatattgttaccgtcttccgccaatatagtagttaaattatccgcacatgcagaagaacaccgcttaggcggattcagtacaatgttatatttttcgtaccaactcatttaaatatcataatctaaaatagttctgtaatatgtctagcgctaatatattgatcataatcctgtgcataaattaagatacaacaatgtctcgaaatcatcgacatggcttcttccatagttagaagatcgtcgtcaaagttagcaacgtgattcatcaacatttgctgttttgaggcagcaaatactgaaccgtcgccattcaaccattcataaaaaccatcgtctgaatccattgataatttcttgtactggtttttgagagctcgcatcaatctagcatttctagctcccggattgaaaacagaaagaggatcgtacatccagggtccattttctgtaaatagaatcgtataatgtcccttcaagaaaatatcagacgatccacaatcaaagaattggtctccgagtttgtaacagacagcggactttaacctatacatgataccgtttagcataatttctggtgatacgtcaatcggagtatcatctattagagatctaaagccggtgtaacattctccaccaaacatattcttattctgacgtcgttctacataaaacatcattgctccattaacgataacaggggaatgaacagcactacccatcacattagttcccaatggatcaatgtgtgtaactccagaacatcttccatagcctatgttaggaggagcgaacaccactcttccactattgccatcgaatgccatagaataaatatccttggaattgatagaaatcggactgtcggatgttgtgatcatcttcataggattaacaactatgtatggtgccgcctgaagtttcatatcgtaactgatgccgtttataggtctagccacagaaaccaacgtaggtctaaatccaactatagacaaaatagaagccaatatctgttcctcatctgtcataacttgagagcatccagtatgaataatcttcattagatggggatctaccgcatcatcatcgttacaataaaaaattcccattctaatgttcataattgcttttctaatcatggtatgcatgtttgctctctgaatctctgtggaaattagatctgatacacctgtaatcactatcggattatcctccgtaagacgattaaccaacaacatataattataagactttacttttctaaattcataaagttgctggattaggctataggtgtctccatgtacatacgcgttctcgagcgcaggaagtttaataccgaatagtgccatcagaataggatgaatatagtaattagtttctggttttctataaataaaagacaaatcttgtgaactagacatatcggtaaaatgcatggattggaatcgtgtagtcgacagaagaatatgatgattagatggagagtatattttatctaactctttgagttggtcaccgattctaggactagctcgagaatgaataagtactaaaggatgagtacatttcacagaaacactagcattgttcaatgtgctctttacatgggtaaggagttgaaatagctcgtttctatttgttctgacaatatttagtttattcataatgttaagcatatcctgaatagtaaagttagatgtgtcatacttgttagtagttagatatttagcaattgcattcccatcatttctcaatctcgtactccaatcatgtgtagatgctacttcatctatagaaaccatacaatcctttttgataggctgttgagattgattatttcctgcacgtttaggtttggtacgttgatttctagcccctgcggatataaagtcatcgtctacaatttgggacaatgaattgcatacactacaagacaaagatttatcagaagtgtgaatatgatcttcatctaccaaagaaagagtttgattagtataactagattttagtcctgcgttagatgttaaaaaaacatcgctattgaccacggcttccattatttatattcgtagtttttactcgaaagcgtgattttaatatccaatcttattacttttggaatcgttcaaaacctttgactagttgtagaatttgatctattgccctacgcgtatactcccttgcatcatatacgttcgtcaccagatcgtttgtttcggcctgaagttggtgcatatctctttcaacattcgacatgagatccttaagggccatatcgtctagattttgttgagatgttgctcctggatttggattttgttgtgctgttgtacatactgtaccaccagtaggtgtaggagtacatacagtggccacaataggaggttgaggaggtgtaaccgttggagtagtacaagaaatacttccatccgattgttgtgtacatgtagttgttggtaacgtctgagaaggttgggtagatggcggtgtcgtcgtcttttgatctttattaaatttagagataatatcctgaacagcattgctcggcgtcaacgctggaaggagtgaactcgccggcgcatcagtatcttcagacagccaatcaaaaagattagacatatcagatgatgtattagtttgttgtcgtggttttggtgtaggagcagtactactaggtagaagaataggagccgatgtagctgttggaaccggctgtggagttatatgaatagttggttgtagcggttggataggctgtctgctggcggccatcatattatctctagctagttgttctcgcaactgtctttgataatacgactcttgagactttagtcctatttcaatcgcttcatcctttttcgtatccggatccttttcttcagaataatagattgacgactttggtgtagaggattctgccagcctctgtgagaacttgttaaagaagtccatttaaggctttaaaattgaattgcgattataagattaaatggcagacacagacgatattatcgactatgaatccgatgatctcaccgaatacgaggatgatgaagaagaggaagaagatggagagtcactagaaactagtgatatagatcccaaatcttcttataagattgtagaatcagcatccactcatatagaagatgcgcattccaatcttaaacatatagggaatcatatatctgctcttaaacgacgctatactagacgtataagtctatttgaaatagcgggtataatagcagaaagctataacttgcttcaacgaggaagattacctctagtttcagaattttctgacgaaacgatgaagcaaaatatgctacatgtaattatacaagagatagaggagggttcttgtcctatagtcatcgaaaagaacggagaattgttgtcggtaaacgattttgacaaagatggtctaaaattccatctagactatattatcaaaatttggaaacttcaaaaacgatattagaatttatacgaatatcgttctctaaatgtcacaatcaagtctcgcatgttcagcaatttattgtcgtactttatatcgtgttcattaacgatatcttgcaaaatagtaatgattctatcttccttcgatagatattcttcagagattattgtcttatattctttcttgttatcagatatgaatttgataagactttgaacattattgatacccgtctgtttaattttttctacagatattttagttttggcagattctatcgtatctgtcaatagacatccaacatcgacattcgacgtcaattgtctataaatcaacgtataaattttagaaataacattagcgaattgttgtgcgttgatgtcgttattctgaaacagtatgattttaggtagcattttcttaacaaagagaacgtatttattgttactcagttgaacagatgatatatccagattactaacgcatctgattccgtataccaaactttcagaagaaatggtatacaattgtttgtattcattcaatgtctctttttcagaaattagtttagagtcgaatactgcaataattttcaagagatagttttcatcagataagattttatttagtgtagatatgataaaactattgttttgttggagaacttgatacgccgcgttctctgtagtcgacgctctcaaatgggaaacaatctccattatttttttggaatcggatactatatcttcggtatcttgacgcagtctagtatacatagagttaagagagattagagtttgtacattaagcaacatgtctctaaatgtggctacaaacttttcctttttcacatcatctagtttattatataccgatttcacaacggcaccagatttaaggaaccagaatgaaaaactctgataactacaatatttcatcatagttacgattttatcatcttctatagttggtgtaatagcgcatacctttttctccaagactggaaccaacgtcataaaaatgtttaaatcaaaatccatatcaacatctgatgcgctaagaccagtctcgcgttcaagattatctttactaatggtgacgaactcatcgtataaaactctaagtttgtccattatttatttacagatttagttgtttaatttatttgtgctcttccagagttgggatagtatttttctaacgtcggtattatattattaggatctacgttcatatgtatcataatattaatcatccacgttttgataaatctatctttagcttctgaaataacgtatttaaacaaaggagaaaaatatttagctacggcatcagacgcaataacattttttgtaaatgtaacgtatttagacgacagatcttcgttaaaaagttttccatctatgtagaatccatcggttgttaacaccattcccgcgtcagattgaataggagtttgaatagtttgttttggaaatagatccttcaataacttatagttgggtgggaaaaaatcgattttatcactagactctttcttttttactatcattacctcatgaactatttcttgaatgagtatatgtattttctttcctatatcggacgcgttcattggaaaatataccatgtcgttaactataagaatatttttatcctcgtttacaaactgaataatatcagatgtagttcgtaaacgaactatatcatcaccagcacaacatctaactatatgatatccactagtttcctttagccgtttattatcttgttccatattagcagtcattccatcatttaagaaggcgtcaaagataatagggagaaatgacattttggattctgttacgactttaccaaaattaaggatatacggacttactatctttttctcaacgtcaatttgatgaacacacgatgaaaatgtgcttctatgagattgatcatgtagaaaacaacaagggatacaatatttccgcatatcatgaaatatattaagaaatcccaccttattatatttccccaaaggatccatgcacgtaaacattatgccgttatcattaataaagacttctttctcatcggatctgtaaaagttgttactgatttttttcattccaggatctagataattaataatgatgggttttctattcttattctttgtattttggcatatcctagaccagtaaacagtttccactttggtaaaatcagcagacttttgaacgctattaaacatggcattaatggcaataactaaaaatgtaaaatatttttctatgttaggaatatggtttttcactttaatagatatatggtttttggccaaaatgatagatatttttttatccgaggatagtaaaatattattagtcgccgtctctataaaaatgaagctagtctcgatatccaattttattctagaattgataggagtcgccaaatgtaccttatacgttatatctcccttgatgcgttccatttgtgtatctatatcggacacaagatctgtaaatagttttacgttattaatcatcacggtatcgccgtcgctagataacgctaatgtaccatccaagtcccaaatggagagatttaactgttcatcgtttagaataaaatgattaccggtcatattaataaagtgttcatcgtatctagataacaacgacttataattaatgtccaagtcttgaactcgctgaatgatcttttttaacccagttagttttagattggtacgaaatatattgttaaactttgattctacagtaatgtccaaatctagttgtggaaatacttccatcaacattgtttcaaacttgataatattattatctacatcttcgtacgatccaaattccggaatagatgtatcgcacgctctggccacccagataaccaaaaagtcacacgctccaggatatacattgtataaaaagctatcgttttttagtagggtttttttctgcgtgtatacgaagggattaaaaatagtattatcaacgtaactatattccaaattattcttatgagaatagataataatatcgtccttaatatctaacaaatttcctaaatatccctttaattgagtcattcgaagcgtcaatagaatatgtctcttaactatttccggctgttgtatatttaaatgacttcgtaaaaaataatatatgggcgacttctcatctatgtaatcatatggagtgagatatagggctcgttctacctcctgccccttacccacctgtaataccaattgcggacttactatatatcgcatatttatatcgtggggtaaagtgaaaatctactaccgatgatgtaagtcttacaatgttcgaaccagtaccagatcttaatttggaggcctccgtagaactaggggaggtaaatatagatcaaacaacacctatgataaaggagaatagcggttttatatcccgcagtagacgtctattcgcccatagatctaaggatgatgagagaaaactagcactacgattctttttacaaagactttattttttagatcatagagagattcattatttgttcagatgcgttgacgctgtaaaagacgtcactattaccaaaaaaaataacattatcgtggcgccttatatagcacttttaactatcgcatcaaaaggatgcaaacttacagaaacaatgattgaagcattctttccagaactatataatgaacatagtaagaaatttaaattcaactctcaagtatccatcatccaagaaaaactcggataccagtttggaaactatcacgtttatgattttgaaccgtattactctacagtagctctggctattcgagatgaacattcatctggcatttttaatatccgtcaagagagttatctggtaagttcattatctgaaataacatatagattttatctaattaatctaaaatctgatcttgttcaatggagtgctagtacgggcgctgtaattaatcaaatggtaaatactgtattgattacagtgtatgaaaagttacaactggtcatagaaaatgattcacaatttacatgttcattggctgtggaatcaaaacttccaataaaattacttaaagatagaaatgaattatttacaaaattcattaacgagttaaaaaagaccagttcattcaagataagcaaacgcgataaggatacgctactaaaatattttacttaggactggagttagaatttatagacgactcatttcgtttatcattgttactattattactattactatcattattagtgttggcattattagtattcttcttgtcatcttgttcagaaatatacagcaatgctatacctaatactaaatacattatcatgctcgcaatggctctaacaacaacgaaccaaaatgaatttggtcgtagcttttgttcacaaaaatacataaagaaatgtctacataaatctatggcgccattggctacttgaaatagcgccagtcctcctacagattttaatatagctgtataacatgacatttattcatcatcaaaagagacagagtcaccatctgtcatatttagattttttttcatgtgttcaaagtatcctctactcatttcattataatagtttatcatacttagaattttaggacggatcaatgagtaagacttgactagatcgtcagtagtaatttgtgcatcgtctattctgcatccgcttcgtcgaataatgtatagcatcgctttgagattctccatagctatcaagtctttatacaatgacatggaaatatctgtgaatactttatacttctccaacatcgatgccttaacatcatcgcctactttagcattgaaaatacgttctattgtgtagatggatgtagcaagatttttaaacaacaatgccatcttacacgatgattgcctcaagtctccaatcgtttgtttagaacgattagctacagagtccaatgcttggctgactagcatattattatctttagaaattgtattcttcaatgaggcgtttatcatatctgtgatttcgttagtcatattacagtctgactgggttgtaatgttatccaacatatcacctatggatacggtacacgtaccagcatttgtaataatcctatctaagatgttgtatggcattgcgcagaaaatatcttctcctgtaatatctccactctcgataaatctactcagattattcttaaatgccttattctctggagaaaagatatcagtgtccatcatttcattaatagtatacgcagaaaagataccacgagtatcaattctatccaagatacttatcggttccgagtcacagataatggtttcctctccttcgggagatcctgcatagaaatatctaggacaatagtttctatactgtctgtaactctgataatctctaaagtcactaactgataccatgaaattgagaagatcaaacgctgaagtaattaatttttctgcctcgtttttactacaactagttttcatcaatgtagtgacgatgtattgtttagttacttttggtctaatactgatgatagagatattattgcttcccataatggatcttctagtagtcaccttaaagcccattgatgcgaatagcagatagataaagtcttggtatgactcctttctaatatagtacggactacctttgtcacccaactttatacccacataagccataacaacctctttaatagccgtttcatgaggtttatcagccatgagcctgagtagttggaagaatctcatgaatcccgtctcagaaagtcctatatgcatgatagatttatctttcctgggaaactctcgtatagtcatagatgaaatactcttcaaagtttctgaaataagattagtaacagtcttacctccgactactctaggtaacaaacaaactctaataggtgttttctctgcggagataatatcagaaaggatagagcaataagtagtattattgtgattataaagaccgaatacataacaggtagaatttataaacatcatgtcctgaaggtttttagacttgtattcctcgtaatccataccgtcccaaaacatggatttggtaactttgatagccgtagatctttgttccttcgccaacaggttaaagaaattaataaagaatttgttgtttctatttatgtccacaaattgcacgtttggaagcgccacggttacattcactgcagcattttgaggatcgcgagtatgaagtacgatgttattgtttactggtatatctggaaagaaatctaccagtctaggaataagagattgatatcgcatagaaatagtaaagtttataatctcatcatcgaagagcattttgttaccattgtaataaatatccactctgtcatatgtataaatgaagtactgttcaaacatgatgagatgtttatatgttggcatagtagtgagatcgacgtttggtaatggcaatgtattaagattaactccataatgtctagcagcatctgcgatgttataagcgtcgtcaaagcggggtcgatcttgtattgttatatattgtctaacacctataagattatcaaaatcttgtctgcttaatacaccgttaacaatttttgccttgaattcttttattggtgcattaataacatccttatagaggatgttaaacaaataagtgttatcaaagttaagatctggatatttcttttctgctagaacatccattgagtcggagccatctggtttaatataaccaccgataaatctagctctgtattctgtatccgtcaatctaatattaagaaggtgttgagtgaaaggtggaagatcgtaaaagctgtgagtattaatgataggattagtttccgaactaatgttaattggggtattaataatatctatatttccagcgttaagtgtaacattaaacagttttaattcacgtgacgtggtatcaattaaataattaatgcccaatttggatatagcagcctgaagctcatcttgtttagttacggatcctaatgagttattaagcaatatatcgaacggatgaacgaaggttgttttaagttggtcacatactttgtaatctagacatagatgcggaagaacggtagaaactatacgaaataaatattcagagtcctctaattgatcaagagtaactattgacttaataggcatcatttatttagtattaaatgacgaccgtaccagtgacggatatacaaaacgatttaattacagagttttcagaagataattatccatctaacaaaaattatgaaataactcttcgtcaaatgtctattctaactcacgttaacaacgtggtagatagagaacataatgccgccgtagtgtcatctccagaggaaatatcctcacaacttaatgaagatctatttccagatgatgattcaccggccactattatcgaacgagtacaacctcatactactattattgacgatactccacctcctacgtttcgtagagagttattaatatcggaacaacgtcaacaacgagaaaaaagatttaatattacagtatcgaaaaatgctgaagcaataatggaatctagatctatgataacttctatgccaacacaaacaccatccttgggagtagtttatgataaagataaaagaattcagatgttagaggatgaagtggttaatcttagaaatcaacgatctaatacaaaatcatctgataatttagataattttaccaaaatactatttggtaagactccgtacaaatcaacagaagttaataagcgtatagccatcgttaattatgcaaatttgaacgggtcccccttatcagtcgaggacttggatgtttgttcggaggatgaaatagatagaatctataaaacgattaaacaatatcacgaaagtagaaaacgaaaaattatcgtcactaacgtgattattattgtcataaacattatcgagcaggcattgctaaaactcggatttgaagaaatcaaaggactgagtaccgatatcacttcagaaattatcgatgtggagatcggagatgactgcgatgctgtagcatctaaactaggaatcggtaacagtccggttcttaatattgtattgtttatactcaagatattcgttaaacgaattaaaattatttaatttaatacattcccatatccagacaacaatcgtctggattaatctgttcctgtcgtctcataccggacgacatattaatctttttattagtgggcatctttttagatggtttctttttcccagcattaactgagtcgatacctagaagatcgtgattgatctctccgaccattccacgaacttctaattggccgtctctgacggtaccataaactattttaccagcattagtaacagcttggacaatctgaccatccatcgcattgtacgatgtagtagtaactgttgttctacgtctaggagcaccagaagtatttttggagcccttggatgttgatgtagaagaagacgaggattttgattttggtttacatgtaatacattttgaactctttgattttgtatcacatgcgccggcagtcacatctgtttgagaattaagattattgttgcctcctttgacggctgcatctccaccgatttgcgctagtagatttttaagctgtggtgtaatcttattaactgtttcgatataatcatcgtaactgcttctaacggctaaattttttttatccgccatttagaagctaaaaatatttttatttatgcagaagatttaactagattatacaatgaactaatatgatccttttccagattatttacaaacttggtattttttggttctggaggaggcgaatttaaattcggacttggattcggattttgtaagttcttgatcttattatacatcgagtataggatggcgacagtaactgctacacaaataccgatcaaaagaagaataccaatcatttattgacaataacttcactattgatcaagtatgcaatatatcatcttttcactaaataagtagtaataatgattcaacaatgtcgagatatatggacgataataatttagttcatggaaatatcgctatgattggtgtgaatgactccgctaactctgtggggtgcgcagtgctttccccacatagaataaattagcattccgactgtgataataataccaagtataaacgccataatactcaatactttccatgtacgagtgggactggtagacttactaaagtcaataaaggcgaagatacacgaaagaatcaaaagaatgattccagcgattagcacgccggaaaaataatttccaatcataagcatcatgtccatttaactaataaaaattttaaatcgccgaatgaacaaagtggaatataaaccatataaaaacaatagtttgtactgcaaaaataatatctatttttgttttcgaagatatggtaaaattaaatagtagtacacagcatgttataactaacagcagcaacggctcgtaattacttatcatttactagacgaaaaggtggtgggatattttcttgctcaaataatacgaatatatcacccatccattttatgcgatgtttatatactctaatctttaatagatctatagacgacgggtttaccaacaatatagattttatcgattcatctaatttaaacccttccttaaacgtgaatgatctattatctggcataacgatgaccctacctgatgaatcggacaatgtactgggccatgtagaataaattatcaacgaattatcgtctacgaacatttatatcatttgttttaattttaggacgcgaataaatggatataaaatagaaaataacagatattacaaccagtgttatggccgcgcccaaccaggtaggcagttttattttatcttttactacaggttctcctggatgtacgtcaccaacggcggacgtagttctagtacaattagacgtaagttccgcttgggaattttttaacgctaaagagttaacgttaatcgtgcacccaacgtatttacatctagttcgttgaacatcttgattataatataaccattttctatctctagattcgtcagtgcactcatgtaaccaacataccctaggtcctaaatatttatctccggaattagattttggataattcgcgcaccaacaatttctatttcctttatgatcgttacaaaagacgtataatgccgtatccccaaaagtaaaataatcaggacgaataattctaataaactcagaacaatatctcgcatccatatgtttggagcaaatatcggaataagtagacatagccggtttccgttttgcacgtaaccattctaaacaattggggtttccaggatcgtttttacaaaatccagtcatgaaatcatcacaatgttctgtcttgtaattattattaaatatttttggacagtgtttggtatttgtcttagaacaacattttgctacgctatcactatcgcccaggagataatccttttttataaaatgacatcgttgcccggatgctatataatcagtggcgtgttttaaatccttaatatattcaggagttacctcgttctgataatagattaatgatccaggacgaaatttgaaagaactacatggttctccatgaattaatacatattgtttagcaaattcaggaactataaaactactacaatgatctatcgacataccatctatcaaacaaaacttgggtttaatttctcccggagatgtttcataatagtacgtataactttcttctgcaaacttaacagctctattatattcaggataattaaaacctaattccatatatttgtctcgtatatctgctattcctggtgctattttgattctattaagagtaacagctgcccccattcttaataatcgtcagtatttaaactgttaaatgttggtatatcaacatctaccttatttcccgcagtataaggtttgttgcaggtatactgttcaggaatggttacatttatacttcttctatagtcctgtctttcgatgttcatcacatatgcaaagaacagaataaacaaaataatgtaagaaataatattaaatatctgtgaattcgtaaatacattgattgccataataattacagcagctacaatacacacaatagacattcccacagtgttgccattacctccacgatacatttgagttactaagcaataggtaataactaagctagtaagaggcaatagaaaagatgagataaatatcatcaatatagagattagaggagggctatatagagccaagacgaacaaaatcaaaccgagtaacgttctaacatcattatttttgaagattcccaaataatcattcattcctccataatcgttttgcatcatacctccatctttaggcataaacgattgctgctgttcctctgtaaataaatctttatcaagcactccagcacccgcagagaagtcgtcaagcatattgtaatatcttaaataactcatttatatattaaaaaatgtcactattaaagatggagtataatctttatgccgaactaaaaaaaatgacttgtggtcaacccctaagtctttttaacgaagacggggatttcgtagaagttgaaccgggatcatcctttaagtttctgatacctaagggattttacgcctctccttccgtaaagacgagtctagtattcgagacattaacaacgaccgataataaaatcactagtatcaatccaacaaatgcgccaaagttatatcctcttcaacgcaaagtcgtatctgaagtagtttctaatatgaggaaaatgatcgaatcaaaacgtcctctatacattactcttcacttggcgtgtggatttggtaagactattaccacgtgttatcttatggctacacacggtagaaaaaccgtcatttgcgtacccaataaaatgttaatacatcaatggaagacacaggtagaggcagtcggattggaacataagatatccatagatggagtaagtagtctattaaaggaactaaagactcaaagtccggatgtattaatagtagtcagtagacatctgacaaacgatgccttttgtaaatatatcaataagcattatgatttgttcatcttggatgaatcacatacgtataatctgatgaacaatacagcagttacaagatttttagcgtattatcctccgatgatgtgttattttttaactgctacacctagaccatctaaccgaatttattgtaacagtattattaatattgccaagttatccaatctaaaaaaaactatctatgcagtagatagtttttttgagccatattccacagataatattagacatatggtaaaacgactagatggaccatctaataaatatcatatatataccgagaagttattatctgtagacgagcctagaaatcaacttattcttgataccctggtagaagaattcaagtcaggaactattaatcgcattttagttattactaaactacgtgaacatatggtattattctacaaacgattattagattttttcggaccagaggttgtatttataggagacgcccaaaatagacgtactccagatatggtcaaatcaatcaaggaactaaatagatttatattcgtatccaccttattttattccggtactggtttagatattcctagtttggattcgttgttcatttgctcggcagtaatcaacaatatgcaaatagagcaattactagggagggtatgtcgagaaacagaactattagataggacggtatatgtatttcctaacacatccatcaaagaaataaagtacatgataggaaatttcatgcaacgaattattagtctgtctgtagataaactaggatttaaacaaaaaagttatcggaaacatcaagaatccgatcccacttctgcatgtacaacatcatccagagaagaacgtgtattaaatagaatatttaactcgcaaaatcgttaagaagtttaagcgacgatccgcatgctgcgcaggccagtgtattacccctcatagtattaatataatccaatgatacttttgtgatgtcggaaatcttaaccaatttagactgacaggcagaacacgtcatgcaatcatcatcgtcatcgataactgtagtcttgggcttctttttgcgactcttcattccggaacgcacattggtgctatccatttaggtagtaaaaaataagtcagaatatgccctataacacgatcgtgcaaaacctggtatatcgtctctatctttatcacaatatagtgtatcgacatttttattattattgacctcgtttatcttggaacatggaatgggaacatttttgttatcaacggccatctttgccttaattccagatgttgtaaaattataactaaacagtctatcatcgacacaaatgaaattcttgtttagacgtttgtagtttacgtatgcggctcgttcgcgtctcattttttcagatattgcaggtactataatattaaaaataagaatgaaataacataggattaaaaataaagttatcatgacttctagcgctgatttaactaacttaaaagaattacttagtctgtacaaaagtttgagattttcagattctgcggctatagaaaagtataattctttggtagaatggggaacatctacttactggaaaataggcgtgcaaaaggtagctaatgtcgagacgtcaatatctgattattatgatgaggtaaaaaataaaccgtttaatattgatccgggctattacattttcttaccggtatattttgggagcgtctttatttattcgaagggtaaaaatatggtagaacttggatctggaaactcttttcaaataccagatgatatgcgaagtgcgtgtaacaaagtattagacagcgataacggaatagactttctgagatttgttttgttaaacaatagatggataatggaagatgctatatcaaaatatcagtctccagttaatatatttaaactagctagtgagtacggattaaacatacccaaatatttagaaattgaaatagaggaagacacattatttgacgacgagttatactctattatagaacgctctttcgatgataaatttccaaaaatatccatatcgtatattaagttgggagaacttagacggcaagttgtagactttttcaaattctcattcatgtatattgagtccatcaaggtagatcgtataggagataatatttttattcctagcgttataacaaaatcaggaaaaaagatattagtaaaagatgtagaccatttaatacgatccaaggttagagaacatacatttgtaaaagtaaaaaagaaaaacacattttccattttatacgactatgatggaaacggaacagaaactagaggagaagtaataaaacgaattatagacactataggacgagactattatgttaacggaaagtatttctctaaggttggtagtgcaggcttaaagcaattgactaataaattagatattaatgagtgcgcaactgtcgatgagttagttgatgagattaataaatccggaactgtaaaacgaaaaataaaaaaccaatcagcatttgatttaagcagagaatgtttgggatatccagaagcggattttataacgttagttaataacatgcggttcaaaatagaaaattgtaaggttgtaaatttcaatattgaaaatactaattgtttaaataacccgagtattgaaactatatatggaaactttaaccagttcgtctcaatctttaatgtcgtcaccgatgtcaaaaaaagattattcgagtgaaataatatgcgcctttgatataggtgcaaaaaatcctgccagaactgttttagaagtcaaggataactccgttagggtattggatatatcaaaattagactggagttctgattgggaaaggcgcatagctaaagatttgtcacaatatgaatacactacagttcttctagaacgtcagcctagaaggtcgccgtatgttaaatttatctattttattaaaggctttttatatcatacatcggctgccaaagttatttgcgtctcgcctgtcatgtctggtaattcatatagagatcgaaaaaagagatcggtcgaagcatttcttgattggatggacacattcggattgcgagactccgttccggatagacgcaaattagacgatgtagcggatagtttcaatttggctatgagatacgtattagataaatggaatactaattatacaccttataataggtgtaaatctagaaattacataaaaaaaatgtaataacgttagtaacgccattatggataatctatttacctttctacatgaaatagaagatagatatgccagaactatttttaactttcatctaataagttgcgatgaaataggagatatatatggtcttatgaaagaacgcatttcctcagaggatatgtttgataatatagtgtataataaagatatacatcctgccattaagaaactagtgtattgcgacatccaacttactaaacacattattaatcagaatacgtatccggtatttaacgattcttcacaagtgaaatgttgtcattatttcgacataaactcagataatagcaatattagctctcgtacagtagagatatttgagagggaaaagtcatctcttgtatcatatattaaaactaccaataagaagagaaaggtcaattacggcgaaataaagaaaactgttcatggaggcactaatgcaaattacttttccggtaaaaagtctgacgagtatctgagtactacagttagatccaacattaatcaaccttggatcaaaaccatttctaagagaatgagagtagatatcattaatcactctatagtaacgcgtggaaaaagctctatattacaaactatagaaattatttttactaatagaacatgtgtgaaaatattcaaggattctactatgcacattattctatccaaggacaaggatgaaaaggggtgtatacacatgattgacaaattattctatgtctattataatttatttctgttgttcgaagatatcatccaaaacgagtactttaaagaagtagctaatgttgtaaaccacgtactcacggctacggcattagatgagaaattattcctaattaagaaaatggctgaacacgatgtttatggagttagcaatttcaaaatagggatgtttaacctgacatttattaagtcgttggatcataccgttttcccctctctgttagatgaggatagcaaaataaagttttttaaggggaaaaagctcaatattgtagcattacgatctctggaggattgtataaattacgtgactaaatccgagaatatgatagaaatgatgaaggaaagatcgactattttaaatagcatagatatagaaacggaatcggtagatcgtctaaaagaattgcttctaaaatgaaaaaaaacactgattcagaaatggatcaacgactcggatataagtttttggtgcctgatcctaaagccggagttttttatagaccgttacatttccaatatgtatcgtattctaattttatattgcatcgattgcatgaaatcttgaccgtcaagcggccactcttatcgtttaagaataatacagaacgaattatgatagaaattagcaatgttaaagtgactcctccagattactcacctataatcgcgagtattaaaggtaagagttatgacgcattagccacgttcactgtaaatatctttaaagaggtaatgaccaaagagggtatatccatcactaaaataagtagttatgagggaaaagattctcatttgataaaaattccgctactaataggatacgggaataaaaatccacttgatacagccaagtatcttgttcctaatgtcataggtggagtctttatcaataaacaatctgtcgaaaaagtaggaattaatctagtagaaaagattacaacatggccaaaatttagggttgttaagccaaactcattcactttctcgttttcctccgtatcccctcctaatgtattaccgacaagatatcgccattacaagatatctctggatatatcacaattggaagcgttgaatatatcatcgacaaagacatttataacggtcaatattgttttgctgtctcaatatttatctagagtgagtctagaattcattagacgtagtttatcatacgatatgcctccagaagttgtctatctagtaaacgcgataatagatagtgctaaacgaattactgaatctattactgactttaatattgatacatacattaatgacctggtggaagctgaacacattaaacaaaaatctcagttaacgattaacgagttcaaatatgaaatgctgcataactttttacctcatatgaactatacacccgatcaactaaagggattttatatgatatctttactaagaaagtttctctactgtatcttccacacttctagatatccagatagagattcgatggtttgtcatcgcatcctaacgtacggcaaatattttgagacgttggcacatgatgaattagagaattacataggcaacatccgaaacgatatcatgaacaatcacaagaacagaggcacttacgcggtaaacattcatgtactaacaactcccggacttaatcacgcgttttctagcttattgagtggaaagttcaaaaagtcagacggtagttatcgaacacatcctcactattcatggatgcagaatatttctattcctaggagtgttggattttatccggatcaagtaaagatttcaaagatgttttctgtcagaaaataccatccaagtcaatatctttacttttgttcatcagacgttccggaaagaggtcctcaggtaggtttagtatctcaattgtctgtcttgagttccattacaaatatactaacgtctgagtatttggatttggaaaagaaaatttgtgagtatatcagatcatattataaagatgatataagttactttgaaacaggatttccaatcactatagaaaatgctctagtcgcatctcttaatccaaatatgatatgtgattttgtaactgactttagacgtagaaaacggatgggattcttcggtaacttggaggtaggtattactttagttagggatcacatgaatgaaattcgcattaatattggagcgggaagattagtcagaccattcttggttgtggataacggagagctcatgatggatgtgtgtccggagttagaaagcagattagacgacatgacattctctgacattcagaaagagtttccgcatgtcatcgaaatggtagatatagaacaatttacttttagtaacgtatgtgaatcggttcaaaaatttagaatgatgtcaaaggatgaaagaaagcaatacgatttatgtgactttcctgccgaatttagagatggatatgtagcatcttcactagtgggaatcaatcacaattctggacccagagctattcttggatgtgctcaagctaaacaagctatctcttgtctgagttcggatatacgaaataaaatagacaatggaattcatttgatgtatccagagaggccaattgtcattagtaaggctttagaaacttcaaagattgcggctaattgcttcggacaacatgttactatagcattaatgtcgtacaaaggtatcaatcaagaggatggaattatcatcaaaaaacaatttattcagagaggcggtctcgatatagttaccgcaaagaaacatcaagtagaaattccgttggaaaactttaataacaaagaaagagataggtctaacgcctattcaaaattagaaagtaatggattagttagactgaatgctttcttggaatccggagacgctatggcacgaaatatctcatcaagaactcttgaagatgattttgctagagataatcagattagcttcgatgtttccgagaaatataccgatatgtacaaatctcgcgttgaacgagtacaagtagaacttactgacaaagttaaggtacgagtattaaccatgaaagaaagaagacccattctaggagacaaatttaccactagaacgagtcaaaagggaacagtcgcgtatgtcgcggatgaaacggaacttccatacgacgaaaatggtatcacaccagatgtcattattaattctacatccatcttctctagaaaaactatatctatgttgatagaggttattttaacagccgcatattctgctaagccgtacaacaataagggagaaaaccgacctgtctgttttcctagtagtaacgaaacatccatcgatacatatatgcaattcgctaaacaatgttatgagcattcaaatccgaaattgtctgatgaagaattatcggataaaatcttttgtgaaaagattctctatgatcctgaaacggataagccttatgcatccaaagtattttttggaccaatttattacttgcgtctgagacatttaactcaggacaaggcaaccgttagatgtagaggtaaaaagacgaagctcattagacaggcgaatgagggacgaaaacgtggaggaggtatcaagttcggagaaatggagagagactgtttaatagcgcatggtgcagccaatactattacagaagttttgaaagattcggaagaagattatcaagatgtgtatgtttgtgaaaattgtggagacatagcagcacaaatcaagggtattaatacatgtcttagatgttcaaaacttaatctctctcctctcttaacaaaaattgataccacgcacgtatctaaagtatttcttactcaaatgaacgccagaggcgtaaaagtcaaattagatttcgaacgaagacctccttcgttttataaaccattagataaagttgatctcaagccgtcttttctggtgtaatattctagtttggtagtagatacatatcaatatcatcaaattcgagatccgaattataaaatgggcgtggattgttaactatagaatcggacgtctgatattcgaaaatctgtggagtttcaggttttggtggaggtgtaactgctacttgggatactgaagtctgatattcagaaagctgggggatgttctggttcgacatccaccgatggtgttacaccactactaatcggttcggtaacgtctgtggacgatggaggcaccacttctacagaacctgtagcctcagttgtcaacggagatacatttttaatgcgagaaaatgtataatttggtaatggtttctcatgtggatctgaagaagaggtaagatatctactagaaagataccgatcacgttctagttctcttttgtagaacttaactttttctttctcagcatctagttgatattccaacctcttcacgttactacgttcagattccaattcacgttcgcatgggttacctccgcagtttttacgagcgatttcacgttcagccttcatgcgtctctccctctctttatcgagtttatcagagcagtctttctgaaggcgatcgaactccataaatttctccaacgctttgattgtttccatagatttccgaagttcagcttttaggactgtgattctttttctttcgaattcacagctggatgtacaaccgtttccattaccgccatctctaagtttcttttctagatcggcaacatttcatccccatgccttttacattcctcgagtctactgtcgtcgaaatatcgttccagctccttttcgacatcaataactttagcacgttgtctctcaagctctcttttgtagttatctgattccctggcacgtttaagatcttcatgcaattgagtcagctcttaacttcctctcttgcttcttcgtcatagtacgcgcaatcactgtgagatccattgttaccacgtctacactcggcgagctcgcgtttaagagattcaatttcccgtttgtattggtccatgtttccattgctaccaccattagatttacaggctgctagttgtcgttcgagatcagaaatacgggttttcttggaattgatttcgtcgatgtacttggcatcgaaacacttattaagttctttttccaattctacgattttatttctttcgcgagtcaattccctcctgtagtaactatctgttttgtcagattcacgctctctacgtagactttcttgcaagttactaatttgttccctagcacgtccgagtttagttttatatgctgaatagagttctgattcatcctttgagcagatctctagcgatcgtttaagattcctaattctagtctttagcctatttacctcctcagaagatgttccgttaccgttgcgtttacactcgttaagctgtctatcaagatccatgattctatctctaagacgttgcatctctctttccatatcagcattgctttcattattacgtctgcagtcactcaactgtctttcaatatctgagattctatctctaagacgtcgcatctctctctgtttcggcattggtttcattattacgtttacagtcgttcaactgtctttcaagatctgatattctagattggagtctgctaatctctgtagcattttcacggcattcactcagttgtctttcaagatctgaaattttagattggagtctgctaatctctgtaagatttcctcctccgctctcgatgcagtcggtcaacttattctctagttctctaatacgcgaacgcagtgcatcaacttcttgcgtgtcttcctggttgcgtgtacattcatcgagtctagattcgagatctctaacgcgtcgtcgttcttcctcaagttctctgcgtactacagaaagcgtgtccttatcttgttgatatttagcaatttctgattctagagtactgattttgcttacgtagttactaatatttgtcttggccttatcaagatcctccttgtatttgtcgcattccttgatatccctacgaagtctggacagttcccattcgacattacgacgtttatcgatttcagctcggagatcgtcatcgcgttgttttagccacatacgactgagttcaagttctcgttgacaagatccatctacttttccattcctaatagtatccagttccttttctagttctgaacgcatttctcgttccctatcaagcgattctctcaattctcggatagtcttcttatcaatttctaataaatctgaaccatcatctgtcccattttgaatatccctgtgttctttgatctcttttgtaagtcggtcgattctttcggttttataaacagaatccctttccaaagtcctaatcttactgagtttatcactaagttctgcattcaattcggtgagttttctcttggcttcttccaactctgttttaaactctccactatttccgcattcttcctcgcatttatctaaccattcaattagtttattaataactagttggtaatcagcgattcctatagccgttcttgtaattgtgggaacataattaggatcttctaatggattgtatggcttgatagcatcatctttatcattattagggggatggacaaccttaattggttggtcctcatctcctccagtagcgtgtggttcttcaataccagtgttagtaataggcttaggcaaatgcttgtcgtacgcgggcacttcctcatccatcaagtatttataatcgggttctacttcagaatattcttttctaagagacgcgacttcgggagttagtagaagaactctgtttctgtatctatcaacgctggaatcaatactcaagttaaggatagcgaatacctcatcgtcatcatccgtatcttctgaaacaccatcatatgacatttcatgaagtctaacgtattgataaatagaatcagatttagtattaaacagatccttaacctttttagtaaacgcatatgtatattttagatctccagatttcataatatgatcacatgccttaaatgtcagtgcttccatgatataatctggaacactaatgggtgacgaaaaagatacagcaccatatgctacgttgataaataaatctgaaccactaagtagataatgattaatgttaagaaagaggaaatattcagtgtataggtatgtcttggcgtcatatcttgtactaaacacgctaaacagtttgttaatgtgatcaatttccaatagattaattagagcagcgggaataccaacaaacatattaccacatccgtattttctatgaatatcacatatcatgttaaaaaatcttgatagaagagcgaatatctcgtctgacttaatgagtcgtagttcagcagcaacataagtcataactgtaaatagaacatactttcctgtagtgttgattctagactccacatcaacaccattattaaaaatagttttatatacatctttaatctgctctccgttaatcgtcgaacgttctagtatacggaaacactttgatttcttatctgtagttaatgacttagtgatatcacgaagaatattacgaattacatttcttgtttttcttgagagacctgattcagaactcaactcatcgttccatagtttttctacctcagtggcgaaatctttggagtgcttggtacatttttcaataaggttcgtgacctccatttattataaaaaatttattcaaaacttaactacaatcgggtaattataaaatcgtagatctcccatgtggcggaatactaccatctatcgcatgtggatggacagtaggtaatggccatgggaacagtaatgtttgcatatttatctttcttgccagtattactgcatattgtcccaatgtttcgatgtgatgttctaacctatcaactgccgctgtatcacaacaatagtgtccgatgaaattaagattatgatccaatgtgtttaatatatgattatcaagtcttatacgatccgcgtcttttttgacaggatcaggttcttctacaggaagaagtttcggcctcttatgatattcatgtctgggaaacggtggtctagggtgaggctccggtatcggagtgggttttggattataatcatcatcgtctatgacatcatcttcgacttcgatatttattttgctatcttgatgatgtcctgtatcagttgcattttcagcactcgactgaatattagcgcattcattgtctattattaccatatttctaaacccaaaatgtatgtgttgaacatcagtactatcgttgatgagtcttatagcatgaattcgcttatcgttatcgggtttatcttctgtcaccttagcaattccttttttattaaactctacataatcatatccatttctattgtttgttctaatataaacgagtatagcatcattgctaaatttttcaatagtatcaaaaacagaatatcctaaaccatataatatatattcaggaacactcaaactaaatgtccaggattctcctaaatacgtaaactttaatagtgcgaaatcattcaaaaatctaccacttatagatagatagtacataaatgcgtatagtagtctacctatctctttattatgaaaaccggcattacgatcatatatgtcgtgatatacctgtgatccgtttacgttaaaccataaatacatgggtgatcctataaacatgaatttatttctaattctcagagctatagttaattgaccgtgtaatatttgcttacatgcatacttgatacgcttattaataagatttttatcattgctcgttatttcagaatcgtatatataaggagtaccatcgtgattcttaccagatattatacaaaatactatatataaaatatattgacccacgttagtaatcatataaatgtttaacgttttaaattttgtattcaatgatccattatcatacgctatcatggtcttgtaatattcattctttaaaatataatattgtgttagccattgcattggagctcctaatggagattttctattctcatccattttaggataggctttcataaagtccctaataacttcgtgaataatgtttctatgttttctactgatgcatgtatttgcttcgatttttttatcccatgtttcatctatcatagatttaaacgcagtaatgctcgcaacattaacatcttgaaccgttggtacaattccgttccataaatttataatgttcgccatttatataactcattttttgaatatacttttaattaacaaaagagttaagttactcatatggacgccgtccagtctgaacatcaatctttttagccagagatatcatagccgctcttagagtttcagcgtgattttccaacctaaatagaacttcatcgttgcgtttacaacacttttctatttgttcaaactttgttgttacattagtaatctttttttccaaattagttagccgttgtttgagagtttcctcattgtcgtcttcatcggctttaacaattgcttcgcgtttagcctctggctttttagcagcctttgtagaaaaaaattcagttgctggaattgcaagatcgtcatctccggggaaaagagttccgtccatttaaagtacagattttagaaactgacactctgcgttatttatatttggtacaacacatggattataaatattgatgttaataacatcagaaaatgtaaagtctatacattgttgcatcgtgttaaattttctaatggatctagtattattgggtccaacttctgcctgaaatccaaatatggaagcggatacaaaaccgtttcctggataaaccacacatctccacttttgctttacatcagaaattgtgtcgttgacatcttgaactctcctatctaatgccggtgttccacctatagattttgaatattcgaatgctgcatgagtagcattaaattccttaatattgccataattttcatatattgagtaaccctggataaaaagtaaacacaccgcagccgtcgctaccacaataaaaaaaattgatagagagttcatttataatctattagaagctgacaaaatttttttacacgcatcagacaatgctttaataaatagttcaacatctacttttgtcatatcgaaccgatggtatgattctaacctagaattacatccgaaaaagttgactatgttcatagtcattaagtcattaacaaacaacattccagactctggattataagacgatactgtttcgtcacaattacctaccttaatcatgtgattatgaatattggctattagagcaccttctaagaaatctataatatctttgaaacacgatttaaaatcaaaccacgaatatacttctacgaagaaagttagtttacccataggagaaataactataaatggagatctaaatacaaaatccggatctatgatagttttaacattattatattctctattaaatacctccacatctaaaaatgttaattttgaaactatgtcttcgtttattaccgtacctgaactaaacgctataagctctattgtttgagaactctttaaacgatattcttgaaatacatgtaacaaagtttcctttaactcggtcggtttatctaccatagttacagaatttgtatccttatctataatataataatcaaaatcgtataaagttatataattatcgcgttcagattgggatcttttcaaatagactaaaaaccccatttctctagtaagtatcttatgtatatgtttgtaaaatatcttcatggtgggaatatgctctaccgcagttagccattcctcattgacagcggtagatgtattagacaaaactattccaatgtttaacaagggccattttacgagattattaaatccttgtttgataaatgtagccaatgagggttcgagttcaacgacgattgaattctcttcccgcggatgctgcatgatgaacgacgggatgttgttcgattgatttggaattctttttcgactttttgtttatattaaatattttaaaatttatagcggatagcaattcatgtaccacggataatgtagacgcgtattgcgcatcgatatctttattattagataaatttatcaataaatgtgagaagtttgcctcgttaaggtcttccatttaaatattatataaacatttgtgtttgtaacttattcgtcttttatggaatagttttttactagtaaagctgcaattacacactttgtccgtaaaacataaatataaacaccagcttttatcaatcgttccaaaaagtcgacggcggacatttttaacatggcatctattttaaatacacttaggtttttggaaaaaacatcattttataattgtaacgattcaataactaaagaaaagattaagattaaacataagggaatgtcatttgtattttataagccaaagcattctaccgttgttaaatacttgtctggaggaggtatatatcatgatgatttggttgtattggggaaggtaacaattaataatctaaagatgatgctattttacatggatttatcatatcatggagtgacaagtagtggagcaatttacaaattgggatcgtctatcgatagactttctctaaataggactattgttacaaaagttaataattatgatgatacattttttgacgacgatgattgatcgctattgcacaattttgtttttgtactttctaatatagtgtttaggttctttttcatatgagaatattgatttactaaaatatctatgtttaacttttgttctatgacgtccttatcggcggtatcggtacatatacgtaattcaccttcacaaaatacggagtcttcgataataatagccaatcgattattggatctagctgtctgtatcatattcaacatgtttaatatatcctttcgtttcccctttacaggcatcgatcgtagcatattttccgcgtctgatatggaaatgttaaaactacaaaaatgcgtaatgttagcccgtcctaatattggtacgtgtctataagtttggcatagtagaataatagacgtgtttaaatgccttccaaagtttaagaattctattagagtattgcattttgatagtttatcgcctacatcatcaaaaataagtaaaaagtgtgctgattttttatgattttgtgcgacagcaatacatttttctatgttacttttagttcgtatcagattatattctagagattcctgactactaacgaaattaatatgatttggccaaatgtatccatcataatctgggttataaacgggtgtaaacaagaatatatgtttatattttttaactagtgtagaaaacagagatagtaaatagatagtttttccagatccagatcctcctgttaaaaccattctaaacggcatttttaataaattttctcttgaaaattgtttttcttggaaacaattcataattatatttacagttactaaattaatttgataataaatcaaaatatggaaaactaaggttgttagtagggaggagaacaaagaaggcacatcgtgatataaataacatttattatcatgatgacaccagaaaacgacgaagagcagacatctgtgttctccgctactgtttacggagacaaaattcagggaaagaataaacgcaaacgcgtgattggtctatgtattagaatatctatggttatttcactactatctatgattaccatgtccgcgtttctcatagtgcgcctaaatcaatgcatgtctgctaacgaggctgctattactgacgccgctgttgccgttgctgctgcatcatctactcatagaaaggttgcgtctagcactacacaatatgatcacaaagaaagctgtaatggtttatattaccagggttcttgttatatattacattcagactaccagttattctcggatgctaaagcaaattgcactgcggaatcatcaacactacccaataaatccgatgtcttgactacctggctcattgattatgttgaggatacatggggatctgatggtaatccaattacaaaaactacatccgattatcaagattctgatgtatcacaagaagttagaaagtatttttgtgttaaaacaatgaactaatatttatttttgtacattaataaatgaaatcgcttaatagacaaactgtaagtaggtttaagaagttgtcggtgccggccgctataatgatgatactctcaaccattattagtggcataggaacatttctgcattacaaagaagaactgatgcctagtgcttgcgccaatggatggatacaatacgataaacattgttatttagatactaacattaaaatgtctacagataatgcggtttatcagtgtcgtaaattacgagctagattgcctagacctgatactagacatctgagagtattgtttagtattttttataaagattattgggtaagtttaaaaaagaccaatgataaatggttagatattaataatgataaagatatagatattagtaaattaacaaattttaaacaactaaacagtacgacggatgctgaagcgtgttatatatacaagtctggaaaactggttaaaacagtatgtaaaagtactcaatctgtactatgtgttaaaaaattctacaagtgacaacaaaaaatgaattaataataagtcgttaacgtacgccgccatggacgccgcgtttgttattactccaatgggtgtgttgactataacagatacattgtatgatgatctcgatatctcaatcatggactttataggaccatacattataggtaacataaaaactgtccaaatagatgtacgggatataaaatattccgacatgcaaaaatgctactttagctataagggtaaaatagttcctcaggattctaatgatttggctagattcaacatttatagcatttgtgccgcatacagatcaaaaaataccatcatcatagcatgcgactatgatatcatgttagatatagaagataaacatcagccattttatctattcccatctattgatgtttttaacgctacaatcatagaagcgtataacctgtatacagctggagattatcatctaatcatcaatccttcagataatctgaaaatgaaattgtcgtttaattcttcattctgcatatcagacggcaatggatggatcataattgatgggaaatgcaatagtaattttttatcataaaagttgtaaagtaaataataaaacaataaatattgaactagtagtacgtatattgagcaatcagaaatgatgctggtacctcttatcacggtgaccgtagttgcgggaacaatattagtatgttatatattatatatttgtaggaaaaagatacgtactgtctataatgacaataaaattatcatgacaaaattaaaaaagataaagagttctaattccagcaaatctagtaaatcaactgatagcgaatcagactgggaggatcactgtagtgctatggaacaaaacaatgacgtagataatatttctaggaatgagatattggacgatgatagcttcgctggtagtttaatatgggataacgaatccaatgttatggcgcctagcacagaacacatttacgatagtgttgctggaagcacgctgctaataaataatgatcgtaatgaacagactatttatcagaacactacagtagtaattaatgaaacggagactgttgaagtacttaatgaagataccaaacagaatcctaactattcatccaatcctttcgtaaattataataaaaccagtatttgtagcaagtcaaatccgtttattacagaacttaacaataaatttagtgagaataatccgtttagacgagcacatagcgatgattatcttaataagcaagaacaagatcatgaacacgatgatatagaatcatcggtcgtatcattggtgtgattagtttcctttttataaaattgaagtaatatttagtattattgctgccgtcacgttgtacaaatggagatattccctgtattcggcatttctaaaattagcaattttattgctaataatgactgtagatattatatagatacagaacatcaaaaaattatatctgatgagatcaatagacagatggatgaaacggtacttcttaccaacatcttaagcgtagaagttgtaaatgacaatgagatgtaccatcttattcctcatagattatcgacgattatactctgtattagttctgtcggaggatgtgttatctctatagataatgacatcaatggcaaaaatattctaacctttcccattgatcatgctgtaatcatatccccactgagtaaatgtgtcgtagttagcaagggtcctacaaccatattggttgttaaagcggatatacctagcaaacgattggtaacatcgtttacaaacgacatactatatgtaaacaatctgtcactgattaattatttgccgttgtctgtattcattattagacgagtcaccgactatttggatagacacatatgcgatcagatatttgctaataataagtggtattcccttataaccatcgacgataagcaatatcctattccatcaaactgtataggtatgtcctctgccaagtacataaattctagcatcgagcaagatactttaatccatgtttgtaacctcgagcatccgttcgactcagtatacaaaaaaatgcagtcgtacaattctctacctatcaaggaacaaatattgtacggtagaattgataatataaatatgagcattagtatttctgtggattaatagatttctagtatggggatcattaatcatctctaatctctaaatacctcataaaacgaaaaaaaagctattatcaaatactgtacggaatggattcattctcttctctttttatgaaactctgttgtatatctactgataaaactggaagcaaaaaatctgatagaaagaataagaataagatcaaggattatatggaacacgattattataaaataacaatagttcctggttcctcttccacgtctactagctcgtggtattatacacatgcctagtaatagtctctttgcgttgacggaaagcagactagaaataacaggctaaaatgttcagacaccataatagttcccaacccagataataacagagttccatcaacacattcctttaaactcaatcccaaacccaaaaccgttaaaatgtatccggccaattgatagtagataatgaggtgtacagcgcatgataatttacacagtaaccaaaatgaaaatactttagtaattataagaaatatagacggtaatgtcatcatcaacaatccgataatatgcctgagagtaaacattgacggataaaacaaaaatgctccgcataactctatcatggcaataacacaaccaaatacttgtaagattcctaaattagtagaaaatacaacgaatatcgatgtataagtgatctcgagaaataataagaataaagtaatgcccgtaaagataaacatcaacattgtttggtaatcattaaaccaattagtatgaagttgaactaatttcacagtagattttattccagtgttatcctcgcatgtataagtacctggtaagatatctttatattccataatcaatgagacatcactatctgataacgaatgaagtctagcactagtatgccatttacttaatattgtcgtcttggaagttttattataagttaaaatatcatggttatccaatttccatctaatatactttgtcggattatctatagtacacggaataatgatggtatcattacatgctgtatactctatggtctttgtagttgttataacaaccaacgtatagaggtatatcaacgatattctaactcttgacattttttatttatttaaaatgatacctttgttatttattttattctattttgctaacggtattgaatggcataagtttgaaacgagtgaagaaataatttctacttacttattagacgacgtattatacacgggtgttaatggggcggtatacacattttcaaataataaactaaacaaaactggtttaactaataataattatataacaacatctataaaagtagaggatgcggataaggatacattagtatgcggaaccaataacggaaatcccaaatgttggaaaatagacggttcagacgacccaaaacatagaggtagaggatacgctccttatcaaaatagcaaagtaacgataatcagtcacaacggatgtgtactatctgacataaacatatcaaaagaaggaattaaacgatggagaagatttgacggaccatgtggttatgatttattcacggcggataacgtaattccaaaagatggtttacgaggagcattcgtcgataaagacggtacttatgacaaagtttacattcttttcactgatactatcggctcaaagagaattgtcaaaattccgtatatagcacaaatgtgcctaaacgacgaaggtggtccatcatcattgtctagtcatagatggtcgacgtttctcaaagtcgaattagaatgtgatatcgacggaagaagttatagacaaattattcattctagaactataaaaacagataatgatacgatactatatgtattcttcgatagtccttattccaagtccgcattatgtacctattctatgaataccattaaacaatctttttctacgtcaaaattggaaggatatacaaagcaattgccgtctccagctcctggtatatgtttaccagctggaaaagttgttccacataccacgtttgaagtcatagaacaatataatgtactagatgatattataaagcctttatctaaccaacctatcttcgaaggaccgtctggtgttaaatggttcgatataaaggagaaggaaaatgaacatcgggaatatagaatatacttcataaaagaaaattctatatattcgttcgatacaaaatctaaacaaactcgtagctcgcaagtcgatgcgcgactattttcagtaatggtaactgcgaaaccgttatttatagcagatatagggataggagtaggaatgccacaaatgaaaaaaatacttaaaatgtaatcttaatcgagtacaccacacgacaatgaacaaacataagacagattatgctggttatgcttgctgcgtaatatgcggtctaattgtcggaattatttttacagcgacactattaaaagttgtagaacgtaaattagttcatacaccattaatagataaaacgataaaagatgcatatattagagaagattgtcctactgactggataagctataataataaatgtatccatttatctactgatcgaaaaacctgggaggaaggacgtaatgcatgcaaagctctaaattcaaattcggatctaattaagatagagactccaaacgagttaagttttttaagaagccttagacgaggctattgggtaggagaatccgaaatattaaaccagacaaccccatataattttatagctaagaatgccacgaagaatggaactaaaaaacggaaatatatttgtagcacaacgaatactcccaaactgcattcgtgttacactatataacaattacactacatttttatcataccactacttcggttagatgttttagaaaaaaataaatatcgccgtaccgttcttgtttttataaaaataacaattaacaattatcaaattttttctttaatattttacgtggttgaccattcttggtggtaaaataatctcttagtgttggaatggaatgctgtttaatgtttccacactcatcgtatattttgacgtatgtagtcacatcgtttacgcaatagtcagactgtagttctatcatgcttcctacatcagaaggaggaacagttttaaagtctcttggttttaatctattaccgttagttttcatgaaatcctttgttttatccacttcacattttaaataaatgtccactatacattcttttgttaattttactagatcgtcatgggtcatagaatttataggttccgtagtccatggatccaaactagcaaacttcgcgtatacggtatcgcgattagtgtatacaccaactgtatgaaaattaagaaaacagtttaataaatcaacagaaatatttaatcctccgtttgatacagatgcgccatatttatggatttcggattcacacgttgtttgtctgaggtgttcgtctagtgttgcttctacgtaaacttcgattcccatatattctttattgtcagaatcgcataccgatttatcatcatacactgtttgaaaactaaatggtatacacatcaaaataataaataataacgagtacattctgcaatattgttatcgtaattggaaaattagtgttcgagtgagttggattatgtgagtattggattgtatattttattttatattttgtaataagaataaaatgctaatgtcaagtcttattaaaaacatatataataaataacaatggctgaatggcataaaataataagttcgaggatgccgccatcgttgattacaagactacaaagaatgttctagctgctattcctaacagaacatttgccaagattaatccgggtgaaattattcctctcatcactaatcgtaatattctaaaacctcttattggtcagaaatattgtattgtatatactaactctctaatggatgagaacacgtatgctatggagttgcttactgggtacgcccctgtatctccgatcgttatagcgagaactcataccgcacttatatttttgatgggtaagccaacaacatccagacgtgacgtgtatagaacgtgtagagatcacgctacccgtgtacgcgcaactggtaattaaaataaaaagtaatattcatatgtagtgtcaattttaaatgatgatgaaatggataatatccatattgacgatgtcaataatgccggtattggcatacagctcatcgatttttagatttcattcagaggatgtggaattatgttatgggcatttgtattttgataggatctataatgtagtaaatataaaatataatccgcatattccatatagatataattttattaatcgcacgttaaccgtagatgaactagacgataatgtcttttttacacatggttattttttaaaacacaaatatggttcacttaatcctagtttgattgtctcattatcaggaaacttaaaatataatgatatacaatgctcagtaaatgtatcgtgtctcattaaaaatttggcaacgagtacatctactatattaacatctaaacataagacttattctctacatcggtccacgtgtattactataataggatacgattctattatatggtataaagatataaatgacaagtataatgacatctatgattttactgcaatatgtatgctaatagcgtctacattgatagtgaccatatacgtgtttaaaaaaataaaaatgaactcttaattatgctatgctattagaaatggataaaatcaaaattacggttgattcaaaaattggtaatgttgttaccatatcgtataacttggaaaagataactattgatgtcacacctaaaaagaaaaaagaaaaggatgtattattagcgcaatcagttgctgtcgaagaggcaaaagatgtcaaggtagaagaaaaaaatattatcgatattgaagatgacgatgatatggatgtagaaagcgcataatactatctataaaaataagtatataataaatactttttatttacggtactcttgtagtggtgataccctactcgattatttttttaaaaaaaaaatacttattctgattcttctaaccatttccgtgttcgtttgaatgccacatcgacgtcaaagataggggagtagttgaaatctagttctgcattgttggtacgcacctcaaatgtagtgttggatatcttcaacgtatagttgttgagtagtgatggttttctaaatagaattctcttcatatcattcttgcacgcgtacatttttagcatccatcttggaatcctagatccttgttctattcccaatggtttcatcaatagaagattaaacatatcgtacgaacacgatggagagtaatcgtagcaaaagtaagcatttcctttaatcttagatcccggatactggatatattttgcagccaacacgtgcatccatgcaacatttcctacatatacccggctatgcaccgcgtcatcatcgactgtacgatacataatgttaccgtgttgcttacattgctcgtaaaagactttcgtcaatttgtctccttctccgtaaattctagtgggtcttaggcaacaagtatacaattttgctccattcatgattacggaattattggctttcataaccagttgctcggccatacgtttactttttgcgtatacatgtcctggtgatatatcataaagggtatgctcatggccgatgaatggatcaccgtgtttattgggtcctattgcttccatgctactagtatagatcaaatacttgattcctaggtccacacaagctgccaaaatagtctgtgttccataatagtttactttcatgatttcattatcggtgtattttccaaatacatccactagagcagccgtatgaataatcagatttaccccatctagcgcttctctcaccttatcaaagtcgtttatatcacattgtatatagtttataaccttaactttcgaggttattggttgtggatcttctacaatatctatgactctgatttcttgaacatcatctgcactaattaacagttttactatatacctgcctagaaatccggcaccaccagtaaccgcgtacacggccattgctgccactcataatatcagactacttattctattttactaaataatggctgtttgtataatagaccacgataatatcagaggagttatttactttgaaccagtccatggaaaagataaagttttaggatcagttattggattaaaatccggaacgtatagtttaataattcatcgttacggagatattagtcaaggatgtgattccataggcagtccagaaatatttatcggtaacatctttgtaaacagatatggtgtagcatatgtttatttagatacagatgtaaatatatctacaattattggaaaggcgttatctatttcaaaaaatgatcagagattagcgtgtggagttattggtatttcttacataaatgaaaagataatacattttcttacaattaacgagaatggcgtttgatatatcagttaatgcgtctaaaacaataaatgcattagtttacttttctactcagcaaaataaattagtcatacgtaatgaagttaatgatacacactacactgtcgaatttgatagggacaaagtagttgacacgtttatttcatataatagacataatgacaccatagagataagaggggtgcttccagaggaaactaatattggttgcgcggttaatacgccggttagtatgacttacttgtataataagtatagttttaaactgattttagcagaatatataagacacagaaatactatatccggcaatatttattcggcattgatgacactagatgatttggctattaaacagtatggagacattgatctattatttaatgagaaacttaaagtagactccgattcgggactatttgactttgtcaactttgtaaaggatatgatatgttgtgattctagaatagtagtagctctatctagtctagtatctaaacattgggaattgacaaataaaaaatataggtgtatggcattagccgaacatatatctgatagtattccaatatctgagctatctagactacgatacaatctatgtaagtatctacgcggacacactgagagcatagaggataaatttgattattttgaagacgatgattcgtctacatgttctgccgtaaccgacagggaaacggatgtataattttttttatagcgtgaaggatatgataaaaaatataattgttgtatttatcccattccaatcaccttatatgattctgtaacacaataaaggagtcttatagatgtatagaggtcagatactggtttgataaactgtttattccacataagtatgtttgactttatggttagacccgcatactttaacaaatcactgaaaattggagttaggtattgacctctcagaatcagttgccgttctggaacattaaatgtattttttatgatatactccaacgcatttatgtgggcatacaacaagtcattactaatggaatattccaagagttttagttgtctagtatttaacaagagaagagatttcaacagactgtttatgaactcgaatgccgcctcattgtcgcttatattgatgatgtcgaattctcccaatatcatcaccgatgagtagctcatcttgttatcgggatccaagttttctaaagatgtcattaaaccctcgatcatgaatggatttatcatcatcgtttttatgttggacatgagcttagtccgtttgtccacatctatagaagatgatttctgaattatttcatatatctctctctttaactccaggaacttgtcaggatggtctactttaatatgttctcgtctaagagatgaaaatctttggatggttgcacgcgacttttctctaaaggatgacgttgcccaagatcctctcttaaatgaatccatcttatccttggacaagatggacagtctattttccttagatggtttaatatttttgttacccatgatctataaaggtagacctaatcgtctcggatgaccatatatttattttcagttttattatacgcataaattgtaaaaaatatgttaggtttacaaaaatgtctcgtggggcattaatcgtttttgaaggattggacaaatctggaaaaacaacacaatgtatgaacatcatggaatctataccggcaaacacgataaaatatcttaactttcctcagagatccactgtcactggaaaaatgatagatgactatctaactcgtaaaaaaacctataatgatcatatagttaatctattattttgtgcaaatagatgggagtttgcatcttttatacaagaacaactagaacagggaattactttaatagttgatagatacgcattttctggagtagcgtatgccgccgctaaaggcgcgtcaatgactctcagtaagagttatgaatctggattgcctaaacccgacttagttatattcttggaatctggtagcaaagaaattaatagaaacgtcggtgaggaaatttatgaagatgttacattccaacaaaaggtattacaagaatataaaaaaatgattgaagaaggagatattcattggcaaattatttcttctgaattcgaggaagatgtaaagaaggagttgattaagaatatagttatagaggctatacacacggttactggaccagtggggcaactgtggatgtaatagtgaaattacattttttataaatagatgttagtacagtgttataaatggatgaagcatattactctggcaacttggaatcagtactcggatacgtgtccgatatgcataccgaactcgtatcaatatctcaattagttattgccaagatagaaactatagataatgatatattaaacaaggacattgtaaattttatcatgtgtagatcaaacttggataatccatttatctctttcctagatactgtatatactattatagatcaagagaactatcagactgagttgattaattcattagacgacaatgaaattatcgattgtatagttaataagtttatgagcttttataaggataacctagaaaatatagtagatgctatcatcactctaaaatatataatgaataatccagattttaaaactacgtatgcagaagtactcggttccagaatagcggatatagatattaaacaagtgatacgtgagaatatactacaattgtctaataatatccgcgaacgatatttgtgaaaatattaaaaaaaaatactttttttattaaatgacgtcttttcgtgaatttagaaaattatgctgtgctatatatcacgcatcaggatataaagaaaaatctaaattaattagagactttataacagatagggatgataaatatttgatcattaagctattgcttcccggattagacgatagaatttataacatgaacgataaacaaattataaaattatatagtataatatttaaacaatctcaggaagatatgctacaagatttaggatacggatatataggagacactattaggactttcttcaaagagaacacagaaatccgtccacgagataaaagcattttaactttagaagaagtggatagtttcttaactacgttatcatccgtaactaaagaatcgcatcaaataaaattattgactgatatcgcatccgtttgtacatgtaatgatttaaaatgtgtagtcatgcttattgataaagatctaaaaattaaagcgggtcctcggtacgtacttaacgctattagtcctcatgcctatgatgtgtttagaaaatctaataacttgaaagagataatagaaaatgcatctaaacaaaatctagactctatatctatttctgttatgactccaattaatcccatgttagcggaatcgtgtgattctgtcaataaggcgtttaaaaaatttccatcaggaatgtttgcggaagtcaaatacgatggtgaaagagtacaagttcataaaaataataacgagtttgccttctttagtagaaacatgaaaccagtactctctcataaagtggattatctcaaagaatacataccgaaagcatttaaaaaagctacgtctatcgtattggattctgaaattgttcttgtagacgaacataatgtaccgctcccgtttggaagtttaggaatacacaaaaagaaagaatataaaaactctaacatgtgtttgttcgtgtttgactgtttgtactttgatggattcgatatgacggacattccattgtacgaacgaagatcttttctcaaagatgttatggttgaaatacccaatagaatagtattctcagagttgacgaatattagtaacgagtctcagttaactgacgtattggatgatgcactaacgagaaaattagaaggattggtcttaaaagatattaatggagtatacgaaccgggaaagagaagatggttaaaaataaagcgagactatttgaacgagggttccatggcagattctgccgatttagtagtactaggtgcttactatggtaaaggagcaaagggtggtatcatggcagtctttctaatgggttgttacgacgatgaatccggtaaatggaagacggttaccaagtgttcaggacacgatgataatacgttaagggagttgcaagaccaattaaagatgattaaaattaacaaggatcccaaaaaaattccagagtggttagtagttaataaaatctatattcccgattttgtagtagaggatccgaaacaatctcagatatgggaaatttcaggagcagagtttacatcttccaagtcccataccgcaaatggaatatccattagatttcctagatttactaggataagagaggataaaacgtggaaagaatctactcatctaaacgatttagtaaacttgactaaatcttaatagttacatacaaactgaaaattaaaataacactatttagttggtggtcgccatggatggtgttattgtatactgtctaaacgcgctagtaaaacatggcgaggaaataaatcatataaaaaatgatttcatgattaaaccatgttgtgaaagagtttgtgaaaaagtcaagaacgttcacatcggcggacaatctaaaaacaatacagtgattgcagatttgccatatctggataatgctgtatcggatgtatgcaattcactgtataaaaagaatgtatcaagaatatccagatttgctaatttgataaagatagatgacgatgacaagactcctactggtgtatataattattttaaacctaaagatgccattcctgttattatatctataggaaaggatagagatgtctgtgaactattaatctcatcagacatatcgtgtgcatgcgtggagttaaattcatatcacgtagccattcttcccatggatgtttccttttttaccaaaggaaatgcatcattgattattctcctgtttgatttctctatcgatgcggcacctctcttaagaagtgtaaccgataataatgttattatatctagacaccagcgtctacatgacgagcttccgagttccaattggttcaagttttacataagtataaagtccgactattgttctatattatatatggttgttgatggatctgtgatgcatgcgatagctgataatagaactcacgcaattattagcaaaaatatattagacaatactacgattaacgatgagtgtagatgctgttattttgaaccacagattaggattcttgatagagatgagatgctcaatggatcatcgtgtgatatgaacagacattgtattatgatgaatttacctgatgtaggcgaatttggatctagtatgttggggaaatatgaacctgacatgattaagattgctctttcggtggctggtaatttaataagaaatcgagactacattcccgggagacgaggctatagctactacgtttacggtatagcctctagataatttttttaagcacgaaataaaaaacataattttaaaccaatctatttcatactattttgtgtgatcaccatggacataaagatagatattagtatttctggtgataaatttacggtgactactaggagggaaaatgaagaaagaaaaaaatatctacctctccaaaaagaaaaaactactgatgttatcaaacctgattatcttgagtacgatgacttgttagatagagatgagatgtttactattctagaggaatattttatgtacagaggtctattaggcctcagaataaaatatggacgactctttaacgaaattaaaaaattcgacaatgatgcggaagaacaattcggtactatagaagaactcaagcagaaacttagattaaattctgaagagggagcagataactttatagattatataaaggtacaaaaacaggatatcgtcaaacttactgtatacgattgcatatctatgataggattgtgtgcatgcgtggtagatgtttggagaaatgagaaactgttttctagatggaaatattgtttacgagcgattaaactgtttattgatgatcacatgcttgataagataaaatctatactgcagaatagactagtatatgtggaaatgtcatagaaagttaaaagttaatgagagcaaaaatatataaggttgtattccatatttgttattttttctgtaatagttaaaaaaatacattcgatggtctatctatcagattattatgtgttataaggtactttttctcataataaactagagtatgagtaagatagtgtttttcaaaacatataaatctaaaattgatggatgagatatacagctattaatttcgaaaatatattttaatctgataactttaaacatggatttttgatggtggtttaacgttttaaaaaaagattttgttattgtagtatatgataatattaaaagatggatataaagaatttgctgactgcatgtactattttttacattactacattggctacggcagatatacctacttcgtcaccaacggggcatgtgacgagggagaatatcttgataagaggcataatcaatgttgtaatcagtgtccacctggagaatttgccaaggttagatgtaatggtaacgataacacaaaatgtgaacgctgcccacctcatacatataccgcaatccccaattactctaatggatgtcatcaatgtagaaaatgcccaacaggatcatttgataaggtaaagtgtaccggaacacagaacagtaaatgttcgtgtcttcctggttggtattgcgctactgattcttcacagactgaagattgtcgagattgtataccaaaaaggagatgtccatgcggatactttggtggaatagatgaacaaggaaatcctatttgtaaatcgtgttgtgttggtgaatattgcgactacctacgtaattatagacttgatccatttcctccatgcaaactatctaaatgtaattaattatgattttgatgataatgttaccatacattatatcgctacttggttagtgtattattcagtatgaagacctattaataattacttatcttttgacgatcttgttataattataatataaaaacttatggcatagtaacttataattgctgacgcgataaattcgtaataatctgttttgttcaaaggaatctacaggcataaaaataaaaatataatttataatatactcttacaacgccatcatgaataacagcagtgaattgattgctgttattaatggatttagaaatagtggacgattttgtgatattagtatagttattaatgatgaaaggataaacgctcataaactcatcctatctggagcctccgaatatttttccattctgttttccaataattttatcgattctaatgaatacgaagttaatctaagtcatttagattatcaaagtgttaacgatttgatcgattatatttatgggatacctttgagcctaactaacgataacgtgaaatatattctttcaaccgctgattttttacaaattggatctgccattactgagtgtgaaaattacatacttaaaaatctttgttctagaaactgtatcgatttctacatatacgctgataaatataataacaagaaaatagaatcagcgtcgtttaacacaatattacaaaatattttgagactcatcaacgatgaaaactttaaatacttaacagaggaatcaatgataaaaattttaagcgatgatatgttaaatataaaaaatgaggatttcgccccactaattctcattaaatggttagagagtactcaacaaccatgcaccgtcgagttacttaaatgcctcagaatatcattgctttccccacaagttataaaatcactttatagtcatcgactggttagttcaatctacgaatgtataacattcttaaacaatatagcattcttggatgaatcatttcctagataccatagcatcgagttgatatctatcggtataagtaattcgcatgataagatttccataaactgctacaatcataaaaaaaatacatgggaaatgatatcttcacgtagatataggtgtagtttcgcagtggccgtcctggataatattatctatatgatgggtggatatgatcagtccccgtatagaagttcaaaggttatagcgtacaatacatgtacaaattcttggatatatgatataccagagctaaaatatcctcgttctaattgtgggggactggctgatgacgaatacatttattgtataggcggcatacgcgatcaggattcatcgttgacatctagtattgatagatggaagccatcaaaaccatattggcagaagtatgctaaaatgcgcgaaccaaaatgtgatatgggggttgcgatgttaaacggattaatatatgttataggtggaatcgttaaaggtgacacgtgtaccgacgcactagagagtttatcagaagatggatggatgaagcatcaacgtcttccaataaaaatgtccaatatgtcgacgattgttcatgatggcaagatttatatatctggaggttacaacaatagtagtgtagttaatgtaatatcgaatctagtccttagctataattcgatatatgatgaatggaccaaattatcatcattaaacattcctagaattaatcccgctctatggtcagcgcataataaattatatgtaggaggaggaatatctgatgatgttcgaactaatacatctgagacatacgacaaagaaaaagattgttggacattggataatggtcacgtgttaccacgcaattatataatgtataaatgcgaaccgattaaacataaatatccattggaaaaaacacagtacacgaatgattttctaaagtatttggaaagttttataggtagttgatagaacaaaatacataattttgtaaaaataaatcactttttatactaatatgacacgattaccaatacttttgttactaatatcattagtatactctacaccttctcctcagacatctaaaaaaataggtgatgatgcaactctatcatgtaatcgaaataatacaaatgactacgttgttatgagtgcttggtataaggagcccaattccattattcttttagctgctaaaagcgacgtcttgtattttgataattataccaaggataaaatatcttacgactctccatacgatgatctagttacaactatcacaattaaatcattgactgctagagatgccggtacttatgtatgtgcattctttatgacatcgcctacaaatgacactgataaagtagattatgaagaatactccacagagttgattgtaaatacagatagtgaatcgactatagacataatactatctggatctacacattcaccggaaactagttctgagaaacctgattatatagataattctaattgctcgtcggtattcgaaatcgcgactccggaaccaattactgataatgtagaagatcatacagacaccgtcacatacactagtgatagcattaatacagtaagtgcatcatctggagaatccacaacagacgagactccggaaccaattactgataaagaagaagatcatacagtcacagacactgtctcatacactacagtaagtacatcatctggaattgtcactactaaatcaaccaccgatgatgcggatctttatgatacgtacaatgatacagtaccaccaactactgtaggcggtagtacaacctctattagcaattataaaaccaaggactttgtagaaatatttggtattaccgcattaattatattgtcggccgtggcaatattctgtattacatattatatatataataaacgttcacgtaaatacaaaacagagaacaaagtctagatttttgacttacataaatgtctgggatagtaaaatctatcatattgagcgggccatctggtttaggaaagacagccatagccaaaagactatgggaatatatttggatttgtggtgtcccataccactagatttcctcgtcctatggaacgagaaggtgtcgattaccattacgttaacagagaggccatctggaagggaatagccgccggaaactttctagaacatactgagtttttaggaaatatttacggaacttctaaaacagctgtgaatacagcggctattaataatcgtatttgtgtgatggatctaaacatcgatggcgttagaagtcttaaaaatacgtacctaatgccttactcggtgtatataagacctacctctcttaaaatggttgagaccaagcttcgtcgtagaaacactgaagcggatgatgagattcatcgtcgtgtgatgttggcaaaaactgacatggatgaggcaggtgaagccggtctattcgacactattatcattgaagatgatgtgaatttagcatatagtaagttaattcagatactacaggaccgtattagaatgtattttaacactaattagagacttaagacttaaaacttgataattaataatataactcgtttttatatgtggctatttcaacgtctaatgtattagttaaatattaaaacttaccacgtaaaacttaaaatttaaaatgatatttcattgacagatagatcacacattatgaactttcaaggacttgtgttaactgacaattgcaaaaatcaatgggtcgttggaccattaataggaaaaggtggattcggtagtatttatactactaatgacaataattatgtagtaaaaatagagcccaaagctaacggatcattatttaccgaacaggcattttatactagagtacttaaaccatccgttatcgaagaatggaaaaaatctcacaatataaagcacgtaggtcttatcacgtgcaaggcatttggtctatacaaatccattaatgtggaatatcgattcttggtaattaatagattaggtgtagatctagatgcggtgatcagagccaataataatagattaccaaaaaggtcggtgatgttgatcggaatcgaaatcttaaataccatacaatttatgcacgagcaaggatattctcacggagatattaaagcgagtaatatagtcttagatcaaatagataagaataaattatatctagtggattacggattggtttctaaattcatgtctaatggcgaacatgttccatttataagaaatccaaataaaatggataacggtactctagaatttacacctatagattcgcataaaggatacgttgtatctagacgtggagatctagaaacacttggatattgtatgattagatggttgggaggtatcttaccatggactaagatatctgaaacaaagaattgtgcattagtaagtgccacaaaacagaaatatgttaacaatactgcgactttgttaatgaccagtttgcaatatgcacctagagaattgctgcaatatattaccatggtaaactctttgacatattttgaggaacccaattacgacaagtttcggcacatattaatgcagggtgtatattattaagtgtggtgtttggtcgataaaaattaaaaaataacttaatttattattgatctcgtgtgtacaaccgaaatcatggcgatgttttacgcacacgctctcggtgggtacgacgagaatcttcatgcctttcctggaatatcatcgactgttgccaatgatgtcaggaaatattctgttgtgtcagtttataataacaagtatgacattgtaaaagacaaatatatgtggtgttacagtcaggtgaacaagagatatattggagcactgctgcctatgtttgagtgcaatgaatatctacaaattggaaatccgatccatgatcaagaaggaaatcaaatctctatcatcacatatcgccacaaaaactactatgctctaagcggaatcgggtacgagagtctagacttgtgtttggaaggagtagggattcatcatcacgtacttgaaacaggaaacgctgtatatggaaaagttcaacatgattattctactatcaaagagaaggccaaagaaatgagtgcacttagtccaggacctatcatcgattaccacgtctggataggagattgtatctgtcaagttactgctgtggacgtacatggaaaggaaattatgaaaatgagattcaaaaagggtgcggtgcttccgatcccaaatctggtaaaagttaaacttggggagaatgatacagaaaatctttcttctactatatcggcgacaccatcgaggtaaccacctctctggaagacagcgtgaataatgtactcatgaaacgtttggaaactatacgccatatgtggtctgttgtatatgatcattttgatattgtgaatggtaaagaatgctgttatgtgcatacgcatttgtctaatcaaaatcttataccgagtactgtaaaaacaaatttgtacatgaagactatgggatcatgcattcaaatggattccatggaagctctagagtatcttagcgaactgaaggaatcaggtggatggagtcccagaccagaaatgcaggaatttgaatatccagatggagtggaagacactgaatcaattgagagattggtagaggagttcttcaatagatcagaacttcaggctggtgaatcagtcaaatttggtaattctattaatgttaaacatacatctgtttcagctaagcaactaagaacacgtatacggcagcagcttccttctatactctcatcttttaccaacacaaagggtggatatttgttcattggagttgataataatacacacaaagtatttggattcacggtgggttacgactacctcagactgatagagaatgatatagaaaagcatatcaaaagactttgtgttgtgtatttctgtgagaagaaagaggacatcaagtacgcgtgtcgattcatcaaggtatataaacctggggatgaggctacctcgacatacgtgtgcgctatcaaagtggaaagatgctgttgtgctgtgtttgcagattggccagaatcatggtatatggatactaatggtatcaagaagtattctccagatgaatgggtgtcacatataaaattttaattaatgtaactatagagaacaaataataaggttgtaatatcatatagacaataactaacaattaattagtaactgttatctcttttttaattaaccaactaactatatacctattaatacatcgtaattatagttcttaacatctattaatcattaattcgcttctttaattttttataaactaacattgttaattgaaaagggataacatgttacagaatataaattatatatggatttttttaaaaaggaaatacttgactggagtatatatttatctcttcattatatagcacgcgtgttttccaatttttccacatcccatataatacaggattataatctcgttcgaacatacgagaaagtggataaaacaatagttgattttttatctaggttgccaaatttattccatattttagaatatggggaaaatattctacatatttattctatggatgatgctaatacgaatattataattttttttctagatagagtattaaatattaataagaacgggtcatttatacacaatctcgggttatcatcatccattaatataaaagaatatgtatatcaattagttaataatgatcatccagataataggataagactaatgcttgaaaatggacgtagaacaagacattttttgtcctatatatcagatacagttaatatctatatatgtattttaataaatcatggattttatatagatgccgaagacagttacggttgtacattattacatagatgtatatatcactataagaaatcagaatcagaatcatacaatgaattaattaagatattgttaaataatggatcagatgtagataaaaaagatacgtacggaaacacaccttttatcctattatgtaaacacgatatcaacaacgtggaattgtttgagatatgtttagagaatgctaatatagactctgtagactttaatagatatacacctcttcattatgtctcatgtcgtaataaatatgattttgtaaagttattaatttctaaaggagcaaatgttaatgcgcgtaataaattcggaactactccattttattgtggaattatacacggtatctcgcttataaaactatatttggaatcagacacagagttagaaatagataatgaacatatagttcgtcatttaataatttttgatgctgttgaatctttagattatctattatccagaggagttattgatattaactatcgtactatatacaacgaaacatctatttacgacgctgtcagttataatgcgtataatacgttggtctatctattaaacaaaaatggtgattttgagacgattactactagtggatgtacatgtatttcggaagcagtcgcaaacaacaacaaaataataatggaagtactattgtctaaacgaccatctttgaaaattatgatacagtctatgatagcaattactaaacataaacagcataatgcagatttattgaaaatgtgtataaaatatactgcgtgtatgaccgattatgatactcttatagatgtacagtcgctacagcaatataaatggtatattttaagatgtttcgatgaaatagatatcatgaagagatgttatataaaaaataaaactgtattccaattagttttttgtatcaaagacattaatactttaatgagatacggtaaacatccttctttcgtgaaatgcactagtctcgacgtatacggaagtcgtgtacgtaatatcatagcatctattagatatcgtcagagattaattagtctattatccaagaagctggatcctggagataaatggtcgtgttttcctaacgaaataaaatataaaatattggaaaactttaacgataacgaactatccacatatctaaaaatcttataaacattattaaaatataaaatctaagtaggataaaatcacactacatcattgtttccttttagtgctcgacagtgtatactatttttaacgctcataaataaaaatgaaaacgatttccgttgttacgttgttatgcgtactacctgctgttgtttattcaacatgtactgtacccactatgaataacgctaaattaacgtctaccgaaacatcgtttaatgataaccagaaagttacgtttacatgtgatcagggatatcattctttggatccaaatgctgtctgtgaaacagataaatggaaatacgaaaatccatgcaaaaaaatgtgcacagtttctgattatgtctctgaactatataataaaccgctatacgaagtgaattccaccatgacactaagttgcaacggcgaaacaaaatattttcgttgcgaagaaaaaaatggaaatacttcttggaatgatactgttacgtgtcctaatgcggaatgtcaacctcttcaattagaacacggatcgtgtcaaccagttaaagaaaaatactcatttggggaatatatgactatcaactgtgatgttggatatgaggttattggtgcttcgtacataagttgtacagctaattcttggaatgttattccatcatgtcaacaaaaatgtgatatgccgtctctatctaacggattaatttccggatctacattttctatcggtggcgttatacatcttagttgtaaaagtggttttacactaacggggtctccatcatccacatgtatcgacggtaaatggaatcccgtactcccaacatgtgtacgatctaacgaaaaatttgatccagtggatgatggtcccgacgatgagacagatttgagcaaactctcgaaagacgttgtacaatatgaacaagaaatagaatcgttagaagcaacttatcatataatcatagtggcgttgacaattatgggcgtcatatttttaatctccgttatagtattagtttgttcctgtgacaaaaataatgaccaatataagttccataaattgctaccgtgaatataaatccgttaaaataattaataatttaataacgaacaagtatcaaaagattaaagacttatagctagaatcaattgagatgtcttcttcagtggatgttgatatctacgatgccgttagagcatttttactcaggcactattataacaagagatttattgtgtatggaagaagtaacgccatattacataatatatacaggctatttacaagatgcgccgttataccgttcgatgatatagtacgtactatgccaaatgaatcacgtgttaaacaatgggtgatggatacacttaatggtataatgatgaatgaacgcgatgtttctgtaagcgttggcaccggaatactattcatggaaatgtttttcgattacaataaaaatagtatcaacaatcaactaatgtatgatataattaatagcgtatctataattctagctaatgagagatatagaagcgcttttaacgacgatggtatatacatccgtagaaatatgattaacaagttgtacggatacgcatctctaactactattggcacgatcgctggaggtgtttgttattatctgttgatgcatctagttagtttgtataaataattatttcaatatactagttaaaattttaagattttaaatgtataaaaaactaataacgtttttatttgtaataggtgcattagcatcctattcgaataatgagtacactccgtttaataaactgagtgtaaaactctatatagatggagtagataatatagaaaattcatatactgatgataataatgaattggtgttaaattttaaagagtacacaatttctattattacagagtcatgcgacgtcggatttgattccatagatatagatgttataaacgactataaaattattgatatgtataccattgactcgtctactattcaacgcagaggtcacacgtgtagaatatctaccaaattatcatgccattatgataagtacccttatattcacaaatatgatggtgatgagcgacaatattctattactgcagagggaaaatgctataaaggaataaaatatgaaataagtatgatcaacgatgatactctattgagaaaacatactcttaaaattggatctacttatatatttgatcgtcatggacatagtaatacatattattcaaaatatgatttttaaaaatttaaaatatattatcacttcagtgacagtagtcaaataacaaacaacaccatgagatatattataattctcgcagttttgttcattaatagtatacacgctaaaataactagttataagtttgaatccgtcaattttgattccaaaattgaatggactggggatggtctatacaatatatcccttaaaaattatggcatcaagacgtggcaaacaatgtatacaaatgtaccagaaggaacatacgacatatccgcatttccaaagaatgatttcgtatctttctgggttaaatttgaacaaggcgattataaagtggaagagtattgtacgggactatgcgtcgaagtaaaaattggaccaccgactgtaacattgactgaatacgacgaccatatcaatttgtacatcgagcatccgtatgctactagaggtagcaaaaagattcctatttacaaacgcggtgacatgtgtgatatctacttgttgtatacggctaacttcacattcggagattctaaagaaccagtaccatatgatatcgatgactacgattgcacgtctacaggttgcagcatagactttgtcacaacagaaaaagtgtgcgtgacagcacagggagccacagaagggtttctcgaaaaaattactccatggagttcgaaagtatgtctgacacctaaaaagagtgtatatacatgcgcaattagatccaaagaagatgttcccaatttcaaggacaaaatggccagagttatcaagagaaaatttaatacacagtctcaatcttatttaactaaatttctcggtagcacatcaaatgatgttaccacttttcttagcatgcttaacttgactaaatattcataactaatttttattaatgatacaaaaacgaaataaaactgcatattatacactggttaacgcccttataggctctaaccattttcaagatgaggtccctgattatagtccttctgttcccctctatcatctactccatgtctattagacgatgtgagaagactgaagaggaaacatggggattgaaaatagggttgtgtataattgccaaagatttctatcccgaaagaactgattgcagtgttcatctcccaactgcaagtgaaggattgataactgaaggcaatggattcagggatatacgaaacaccgataaattataaaaaaagcaatgtgtccgctgtttccgttaataatactattttcgtaactggcggattattcataaataactctaatagcacgatcgtggttaacaatatggaaaaacttgacatttataaagacaaacaatggtcgattatagaaatgcctatggctagggtatatcacggcatcgactcgacatttggaatgttatattttgccggaggtctatccgttaccgaacaatatggtaatttagagaaaaacaacgagatatcttgttacaatcctagaacgaataagtggtttgatatttcatatactatttataagatatccatatcatcattgtgtaaactaaataacgtcttctatgtatttagtaaggacattggatatgtggaaaagtatgatggtgcatggaagttagtacatgatcgtctccccgctataaaggcattatcaacttctccttattgattgaaaatgaaaatataaatagtttttatgtatagcagtattaccctatagttttattgcttactactaacatggatacagatgttacaaatgtagaagatatcataaatgaaatagatagagagaaagaagaaatactaaaaaatgtagaaattgaaaataataaaaacattaacaagaatcatcccaatgaatatattagagaagcactcgttattaataccagtagtaatagtgattccattgataaagaagttatagaatgtatcagtcacgatgtaggaatatagatcatatctactaatttttataatcgatacaaaacataaaaaacaactcgttattacatagcaggcatggaatccttcaagtattgttttgataacgatggcaagaaatggattatcggaaatactttatattctggtaattcaatactctataaggtcagaaaaaatttcactagttcgttctacaattacgtaatgaagatagatcacaaatcacacaagccattgttgtctgaaatacgattctatatatctgtattggatcctttgactatcgacaactggacacgggaacgtggtataaagtatttggctattccagatctgtatggaattggagaaaccgatgattatatgttcttcgttataaagaattcgggaagagtattcgccccaaaggatactgaatcagtcttcgaagcatgcgtcactatgataaacacgttagagtttatacactctcgaggatttacccatggaaaaatagaaccgaggaatatactgattagaaataaacgtctttcactaattgactattctagaactaacaaactatacaagagtggaaactcacatatagattacaacgaggacatgataacttcaggaaatatcaattatatgtgtgtagacaatcatcttggagcaacagtttcaagacgaggagatttagaaatgttgggatattgcatgatagaatggttcggtggcaaacttccatggaaaaacgaaagtagtataaaagtaataaaacaaaaaaaagaatataaaaaatttatagctactttctttgaggactgttttcctgaaggaaatgaacctctggaattagttagatatatagaattagtatacacgttagattattctcaaactcctaattatgacagactacgtaaactgtttatacaagattgaaattatattcttttttttatagagtgtggtagtgttacggatatctaatattaatattagactatctctatcgcgctacacgaccaatatcgattactatggatatcttctatgaaaggagagaatgtatttatttctccagcgtcaatctcgtcagtattgacaatactgtattatggagctaatggatccactgctgaacagctatcaaaatatgtagaaacggaggagaacacggataaggttagcgctcagaatatctcattcaaatccatgaataaagtatatgggcgatattctgccgtgtttaaagattcctttttgagaaaaattggcgataagtttcaaactgttgacttcactgattgtcgcactatagatgcaatcaacaagtgtgtagatatctttactgaggggaaaatcaatccactattggatgaaccattgtctcctagcaattagtgccgtatactttaaagcaaaatggttgacgccattcgaaaaggaatttaccagtgattatcccttttacgtatctccgacggaaatggtagacgtaagtatgatgtctatgtacggcaaggcatttaatcacgcatctgtaaaagaatcattcggcaacttttcaatcatagaactgccatatgttggagatactagtatgatggtcattcttccagacaagattgatggattagaatccatagaacaaaatctaacagatacaaattttaagaaatggtgtgactttatggatgctatgtttatagatgttcacattcccaagtttaaggtaacaggctcgtataatctggtggatactctagtaaagtcaggactgacagaggtgttcggttcaactggagattatagcaatatgtgtaatttagatgtgagtgtcgacgctatgatccacaaaacgtatatagatgtcaatgaagagtatacagaagcagctgcagcaacttctgtactagtggcagactgtgcatcaacaattacaaatgagttctgtgcagatcatccgttcatctatgtgattaggcatgttgatggaaaaattcttttcgttggtagatattgctctccgacaactaattgttaaccattttttttaaaaaaaatagaaaaaacatgtggtattagtgcaggtcgttgttcttccaattgcaattggtaagatgacggccaactttagtacccacgtcttttcaccacagcactgtggatgtgacagactgaccagtattgatgacgtcaaacaatgtttgactgaatatatttattggtcgtcctatgcataccgcaacaggcaatgcgctggacaattgtattccacactcctctcttttagagatgatgcggaattagtgttcatcgacattcgcgagctggtaaaaaatatgccgtgggatgatgtcaaagattgtacagaaatcatccgttgttatataccggatgagcaaaaaaccatcagagagatttcggccatcatcggactttgtgcatatgctgctacttactggggaggtgaagaccatcccactagtaacagtctgaacgcattgtttgtgatgcttgagatgctaaattacgtggattataacatcatattccggcgtatgaattgatgagttgtacatcttgacattttctttcttctcttctccctttcttctcttctcccttcctccctcttctccctttcccagaaacaaacttttttacccactataaaataaaatgagtatactacctgttatatttctttctatatttttttattcttcattcgttcagacttttaacgcgtctgaatgtatcgacaaagggcaatattttgcatcattcatggagttagaaaacgagccagtaatcttaccatgtcctcaaataaatacgctatcatccggatataatatattagatattttatgggaaaaacgaggagcggataatgatagaattataccgatagataatggtagcaatatgctaattctgaacccgacacaatcagactctggtatttatatatgcattaccacgaacgaaacctactgtgacatgatgtcgttaaatttgacaatcgtgtctgtctcagaatcaaatatagattttatctcgtatccacaaatagtaaatgagagatctactggcgaaatggtatgtcccaatattaatgcatttattgctagtaacgtaaacgcagatattatatggagcggacatcgacgccttagaaataagagacttaaacaacggacacctggaattattaccatagaagatgttagaaaaaatgatgctggttattatacatgtgttttagaatatatatacggtggcaaaacatataacgtaaccagaattgtaaaattagaggtacgggataaaataataccttctactatgcaattaccagatggcattgtaacttcaataggtagtaatttgactattgcatcgttgagacctcccacaacggatgcagacgtcttttggataagtaatggtatgtattacgaagaagatgatggggacggaaacggtagaataagtgtagcaaataaaatctatatgaccgataagagacgtgttattacatcccggttaaacattaatcctgtcaaggaagaagatgctacaacgtttacgtgtatggcgtttactattcctagcatcagcaaaacagttactgttagtataacgtgaatgtatgttgttacatttccatgtcaattgagtttataagaatttttatacattatcttccaacaaacaattgacgaacgtattgctatgattaactcccacgatactatgcatattattaatcattaacttgcagactatacctagtgctattttgacatactcatgttcttgtgtaattgcggtatctatattattaaagtacgtaaatctagctatagttttattatttaattttagataatataccgtctccttatttttaaaaattgccacatcctttattaaatcatgaatgggaatttctatgtcatcgttagtatattgtgaacaacaagagcagatatctataggaaagggtggaatgcgatacattgatctatgtagttttaaaacacacgcgaactttgaagaatttatataaatcattccatcgatacatccttctatgttgagatgtatatatccaggaattcgtttattaatatcgggaaatgtataaactaaaacattgcccgaaagcggtgcctctatctgcgttatatccgttcttaacttacaaaatgtaaccaatacctttgcatgacttgttttgttcggcaacgttagtttaaacttgacgaatggattaattacaatagcatgatccgcgcatctattaagtttttttactttaacgcccttgtatgtttttacagagactttatctaaatttctagtacttgtatgtgttataaatataacgggatatagaaccgaatcacctaccttagatacccaattacattttatcagatccagataataaacaaattttgtcgccctaactaattctatattgttatatattttacaattggttatgatatcatgtaataacttggagtctaacgcgcatcgtcgtacgtttatacaattgtgatttagtgtagtatatctacacatgtatttttccgcactatagtattctggactagtgataaaactatcgttatatctgtcttcaatgaactcatcgagatattgctctctgtcatattcatacacctgcataaactttctagacatcttacaatccgtgttattttaggatcatatttacatatttacgggtatatcaaagatgttagattagttaatgggaatcgtctataataatgaatattaaacaattatatgaggacttttaccacaaagcatcataaaaatgagtcgtcgtctgatttatgttttaaatatcaaccgcgaatcaactcataaaatacaagagaatgaaatatatacatattttagtcattgcaatatagaccatacttctacagaacttgattttgtagttaaaaactatgatctaaacagacgacaacctgtaactgggtatactgcactacactgctatttgtataataattactttacaaacgatgtactgaagatattattaaatcatggagtggatgtaacgatgaaaaccagtagcggacgtatgcctgtttatatattgcttactagatgttgtaatatttcacatgatgtagtgatagatatgatagacaaagataaaaaccacttatcgcatagagactattccaacctactactagagtatataaaatctcgttacatgttattaaaggaagaggatatcgatgagaacatagtatccactttattagataagggaatcgatcctaactttaaacaagacggatatacagcgttacattattatttgtgtctcgcacacgtttataaaccaggtgagtgtagaaaaccgataacgataaaaaaggccaagcgaattatttctttgtttatacaacatggagctaatctaaacgcgttagataattgtggtaatacaccattccatttgtatcttagtattgaaatgtgtaataatattcatatgactaaaatgctgttgacttttaatccgaatttcaaaatatgtaataatcatggattaacgcctatactatgttatataacttccgactacatacaacacgatattcttgttatgttaatacatcactatgaaacaaatgttggagaaatgccgatagatgagcgtcgtataatcgtattcgagtttatcaaaacatattctacacgtccggcagattcgataacttatttgatgaataggtttaaaaatataaatatttatacccgctatgaaggaaagacattattacacgtagcatgtgaatataataatacacacgtaatagattatcttatacgtatcaacggagatataaatgcgttaaccgacaataacaaacacgctatccaactcattatagataacaaagaaaattccccatataccattaattgtttactgtatatacttagatatattgtagataagaatgtgataagatcgttggtggatcaacttccatctctacctatctttcgtcgcttatcatactagtcatatcctaaatgttgatcatattccaccaaatgattgtgaaagagattgagattaaatcgtctaacaaacaattagtttttatgacattaacatataataaataaattaatcattattgacttaacgatgacgaaagttatcatcatcttaggattcttgattattaatacaaattcattgtctatgaaatgtgaacaaggtgtctcatattataattcacaagaattaaagtgttgtaaactatgtaagccaggaacatattcagatcatcgatgtgataaatacagcgataccatttgtggacattgtccgagtgacacattcacgtcaatatataatcgttctccttggtgtcatagttgtagaggtccatgtggtactaatcgagtagaggtcacaccttgtacacctaccacaaatagaatctgtcattgtgactcgaatagttattgtctccttaaagcttttgatggtaactgtgttacatgtgctcctaaaacaaaatgtggtcgtgggtatggaaagaaaggagaagatgaaatgggtaataccatttgtaagaaatgtcggaagggtacttattcagatattgtatctgactctgatcaatgtaaaccaatgacaagataagacttactcgcatctactggatagacataaaatatcctcctcgtaataatgaaatataatatacactaattattaatatcaataacaatcgagtattaatatataggtcatttttaaatcccttttgggttccgtcccaaacggcgtttcggtctgcgtcgccgccatggccatgccgagcctctccgcgtgctcctccatcgaggacgacttcaactatggcagctcggtggcgtctgccagcgtgcacatacgaatggcatttctaagaaaagtctacggtatcctttgtctacaatttcttttaacaacggcaacaactgcagtatttttatactttgactgcatgcggacatttatacaagggagtcctgttctaatattggcatcaatgttcggatctataggcttgattttcgcattgactttacacagacataaacatcccctgaatctgtacctgctttgtggatttacactgtcggaatctctaacgctggcctctgttgttactttctatgatgtgcatgtcgttatgcaagctttcatgctgactactgcagcgtttcttgctctgactacatatactctacaatcaaagagagatttcagtaaacttggagcaggattgtttgctgctttgtggattttaattttgtcaggactcttggggatatttgtgcaaaatgagacagtgaagctggtcctgtctgcttttggggcccttgtattctgtggattcattatctatgacacgcactcactaatacataagctctcgcctgaagagtatgtgttagcctctatcaatctctacttggatatcatcaatctgttcttgcatctgttgcagcttttggaagtatctaataagaaataaagtttaaaatagaattaataaaaacatataggtcattttttaaacatggattggaaaccaaggtagttagttaatacacacaagatatatttttttcacatcatccacccatgggtaacaccaaggttgttagttaataatatacaagatattttttctcactctgatccatgtaaaccaaggacgagataagacactctcattcctcatctacaaccccattaaaaaatggaaattaaagccctctattagcatagacggctacaggtctaccatcaggttaaccttcgtctaccttcacaatggcctttccttgtgcccagttcagaccctgtcattgccacgctactaaggactccctgaataccgtggccgacgtcagacattgtctgactgaatacatcctgtgggtttctcatagatggacccatagagaaagcgcagggtctctctacaggcttctcatctctttcagaactgatgcaacggagctctttggtggtgagttgaaggattcacttccgtgggacaattgcgtggagatcattaaatgtttcatcagaaatgactccatgaaaaccgccgaagaacttcgtgcaatcattggactttgtactcaatcagctatcgtctctggaagagtcttcaacgataagtatatcgacatactacttatgctgcgaaagattctgaacgagaacgactatctcaccctcttggatcatatccgcactgctaaatactaaatctccttcatgctctctcactacactttttatcatcttatgaggaatgattgccttcgtgaaataggaataattagcaccagaatagctatggattattgtggtagagagtgcactattctatgtcgtctactggatgaagatgtgacgtacaaaaaaataaaaccagagattgaaacgtgtcacaacttatcaaaacatatagatagacgaggaaacaatgcgctacattgttacgtcttcaataaatgcgatacagacattaagattgttcggctgttactctctcgcggagtcgagagactttgtagaaacaacgaaggattaactccgctaggagcatacagtaagcatagatacgtcaaatctcagattgtgcatctactgatatccagctattcgaattcctctaacgaactcaagtcgaatataaatgatttcgatctgtattcggataatatcgacttacgtctgctaaaatacctaattgtggataaacggatacgtccgtccaagaatacgaattatgcaatcaatggtctcggattggtggatatatacgtaacgacgcctaatccgagaccagaagtattgctatggcttcttaaatcagaatgttacagcaccggttacgtatttcgtacctgtatgtacgacagtgatatgtgtaagaactctcttcattactatatatcgtctcatagagaatctcaatctctatccaaggatgtaattaaatgtttgatcgataacaatgtttccatccatggcagagacgaaggaggatctttacccatccaatactactggtcttgctcaaccatagatatagagattgttaaattattaataaaggatgtggacacgtgtagagtatacgacgtcagccctatattagaggcgtattatctaaacaagcgatttagagtaaccccatataatgtagacatggaaatcgttaatcttcttattgagagacgtcatactcttgtcgacgtaatgcgtagtattacttcgtacgattccagagaatataaccactacatcatcgataacattctaaagagatttagacaacaggatgtacaagccatgttgataaactacttacattacggcgatatggtaagtatacctatcattcaatgcatgttggataacggagcaaccatggataagacgacggacaacaactatcctctacacgactactttgttaataataatctcgtcgatgtaaacgtcgtaaggtttatcgtggaaaatatggacacgcggctgtaaatcacatatctaacaatggccgtctatgtatgtacggtctgatattatcgagatttaataattgcgggtatcactgttatgaaaccatactgatagatgtatttgatatactaagcaagtacatggatgatatagatatgatcgataactctactatattacgcggtcgatgtcaataatatacaatttgcaaagcggttattggaatatggagcgagtgtcacgctcgataatcaatacggccatccagaaaagcagttaccaaagagaaaacaaaacgaggatagttgatttattacttagctaccatcccactctagagactatgattgacgcatttaatagagatatacgctatctatatcctgaaccattattcgcctgtatcagatacgccttaatcctagatgatgattttccttctaaagtaaagtatgatatctccggtcgtcataaggaactaaagcgctatagagtagacattaatagaatgaagaatgtctacatatcaggcgtctccatgtttgatatattctttaaacgaagcaaacgccacaaattgagatacgcaaagaatccgacatcaaatggtacaaaaaagaactaacgtccatcattacagaaactgtaaagaacaatgagaggatcgactccatagtggacaacattaatacagacgataacttgatttcgaaattacccatggagatactttattactccattaaataatttatcatggagcgataatgtcctgtttcatttgtttccatgacatattacaaaatcgattccgtccaagatgataaaaacatttaccggcatcataaacacggagtttattttatatgtctcgcataaacattactaaaaaaatatattgttctgtttttctttcacatctttaattatgaaaaagtaaatcattatgagatggacgagattgtacgcatcgttcgcgacagtatgtggtacatacctaacgtatttatggacgacggtaagaatgaaggtcacgtttctgtcaacaatgtctgtcatatgtattttacgttctttgatgtggatacatcgtctcatctgtttaagctagttattaaacactgcgatctgaataaacgaggtaactctccattacattgctatacgatgaatacacgatttaatccatctgtattaaagatattgttacaccacggcatgcgtaactttgatagcaaggatgaccactatcaatcgataacaagatctttgatatactaacggacaccattgatgactttagtaaatcatccgatctattgctgtgttatcttagatataaattcaatgggagcttaaactattacgttctgtacaaaggatccgaccctaattgcgccgacgaggatgaactcacttctcttcattactactgtaaacacatatccacgttctacgaaagcaattattacaagttaagtcacactaagatgcgagccgagaagcgattcatctacgcgataatagattatggagcaaacattaacgcggttacacacttaccttcaacagtataccaaacatagtcctcgtgtggtgtatgctcttttatctcgaggagccgatacgaggatacgtaataatcttgattgtacacccatcatggaacgattgtgcaacaggtcatattctcataatgttactcaattggcacgaacaaaaggaagaaggacaacatctactttatctattcataaaacataatcaaggatacactctcaatatactacggtatctattagataggttcgacattcagaaagacgaatactataataccgcctttcaaaattgtaacaacaatgttgcctcatacatcggatacgacatcaaccttccgactaaagacggtattcgacttggtgtttgaaaacagaaacatcatatacaaggcggatgttgtgaatgacatcatccaccacagactgaaagtatctctacctatgattaaatcgttgttctacaagatgtctctccctacgacgattactacgtaaaaaagatactagcctactgcctattaagggacgagtcattcgcggaactacatagtaaattctgtttaaacgaggactataaaagtgtatttatgaaaaatatatcattcgataagatagattccatcatcgtgacataagtcgcctcaaagagattcgaatctccgacaccgacctgtatacggtatcacagctatcttaaagccatacattcagacagtcacatttcatttcccatgtacgacgatctcatagaacagtgccatctatcgatggagcgtaaaagtaaactcgtcgacaaagcactcaataaattagagtctaccatcggtcaatctagactatcgtatttgcctccggaaattatgcgcaatatcatctaaacagtatgttgtacggaaagaaccattacaaatattatccatgatagaaagaaaatatctatatgattggagaagtaggaaacaggaacaagacaacgattactacattattaaatcatgaagtccgtattatactcgtatatattgtttctctcatgtataataataaacggaagagatatagcaccgcatgcaccatccgatggaaagtgtaaagacaacgaatacaaacgccataatttgtgtccgggaacatacgcttccagattatgcgatagcaagactaacacacgatgtacgccgtgtggttcgggtaccttcacatctcgcaataatcatttacccgcttgtctaagttgtaacggaagacgcgatcgtgtaacacgactcacaatagaatctgtgaatgctctcccggatattattgtcttctcaaaggatcatccggatgcaaggcatgtgtttcccaaacaaaatgtggaataggatacggagtatccggagacgtcatctgttctccgtgtggtctcggaacatattctcacaccgtctcttccgcagataaatgcgaacccgtacccagaaatacgtttaactatatcgatgtggaaattaacctgtatccagttaacgacacgtcgtgtactcggacgaccactaccggtctcagcgaatccatctcaacgtcggaactaactattactatgaatcataaagactgtaatcccgtctttcgtgatggatacttctccgttcttaataaggtagcaacttcaggattctttacaggagaaaggtgtgcactctgaatttcgagattaaatgcaataacaaagattcttcctccaaacagttaacgaaagcaaagaatgatactatcatgccgcattcggagacagtaactctagtgggcgacatctatatactatatagtaataccaatactcaagactacgaaactgatacaatctcttatcatgtgggtaatgttctcgatgtcgatagccatatgcccggtagttgcgatatacataaactgatcactaattccaaacccacccactttttatagtaagtttttcacccataaataataaatacaataattaatttctcgtaaaagtagaaaatatattctaatttattgcacggtaaggaagtagaatcataaagaacagtactcaatcaatagcaattatgaaacaatatatcgtcctggcatgcatgtgcctggcggcagctgctatgcctgccagtcttcagcaatcatcctcatcctcctcctcgtgtacggaagaagaaaacaaacatcatatgggaatcgatgttattatcaaagtcacaaagcaagaccaaacaccgaccaatgataagatttgccaatccgtaacggaaattacagagtccgagtcagatccagatcccgaggtggaatcagaagatgattccacatcagtcgaggatgtagatcctcctaccacttattactccatcatcggtggaggtctgagaatgaactttggattcaccaaatgtcctcagattaaatccatctcagaatccgctgatggaaacacagtgaatgctagattgtccagcgtgtccccaggacaaggtaaggactctcccgcgatcactcatgaagaagctcttgctatgatcaaagactgtgaagtgtctatcgacatcagatgtagcgaagaagagaaagacagcgacatcaagacccatccagtactcgggtctaacatctctcataagaaagtgagttacgaagatatcatcggttcaacgatcgtcgatacaaaatgcgtcaagaatctagagtttagcgttcgtatcggagacatgtgcaaggaatcatctgaacttgaggtcaaggatggattcaagtatgtcgacggatcggcatctgaaggtgcaaccgatgatacttcactcatcgattcaacaaaactcaaagcgtgtgtctgaatcgataactctattcatctgaaattggatgagtagggttaatcgaacgattcaggcacaccacgaattaaaaaagtgtaccggacactatattccggtttgcaaaacaaaaatgttcttaactacattcacaaaaagttacctctcgcgacttcttctttttctgtctcaatagtgtgatacgattatgacactattcctattcctattcctatttcctttcagagtatcacaaaaatattaaacctctttctgatggtctcataaaaaaagttttacaaaaatatttttattctctttctctctttgatggtctcataaaaaaagttttacaaaaatatttttattctctttctctctttgatggtctcataaaaaaagttttacaaaaatatttttattctctttctctctttgatggtctcataaaaaaagttttacaaaaatatttttattctctttctctctttgatggtctcataaaaaaagttttacaaaaatatttttattctctttctctctttgatggtctcataaaaaaagttttacaaaaatatttttattctctttctctctttgatggtctcataaaaaaagttttacaaaaatatttttattctctttctctctttgatggtctcataaaaaaagttttacaaaaatatttttattctctttctctctttgatggtctcataaaaaaagttttacaaaaatatttttattctctttctctctttgatggtctcataaaaaaagttttacaaaaatatttttattctctttctctctttgatggtctcataaaaaaagttttacaaaaatatttttattctctttctctctttgatggtctcataaaaaaagttttacaaaaatatttttattctctttctctctttgatggtctcataaaaaaagttttacaaaaatatttttattctctttctctctttgatggtctcataaaaaaagttttacaaaaatatttttattctctttctctctttgatggtctcataaaaaaagttttacaaaaatatttttattctctttctctctttgatggtctcataaaaaaagttttacaaaaatatttttattctctttctctctttgatggtctcataaaaaaagttttacaaaaatatttttattctctttctctctttgatggtctcataaaaaaagttttacaaaaatatttttattctctttctctctttgatggtctcataaaaaaagttttaatcg

SEQ ID NO: 24 - DNA, 188082 bp, Artificial Sequence
  LIVP 6.1.1
tcaaagagagaaagagaataaaaatatttttgtaaaactttttttatgagaccatcaaagagagaaagagaataaaaatatttttgtaaaactttttttatgagaccatcaaagagagaaagagaataaaaatatttttgtaaaactttttttatgagaccatcaaagagagaaagagaataaaaatatttttgtaaaactttttttatgagaccatcaaagagagaaagagaataaaaatatttttgtaaaactttttttatgagaccatcaaagagagaaagagaataaaaatatttttgtaaaactttttttatgagaccatcaaagagagaaagagaataaaaatatttttgtaaaactttttttatgagaccatcaaagagagaaagagaataaaaatatttttgtaaaactttttttatgagaccatcaaagagagaaagagaataaaaatatttttgtaaaactttttttatgagaccatcaaagagagaaagagaataaaaatatttttgtaaaactttttttatgagaccatcaaagagagaaagagaataaaaatatttttgtaaaactttttttatgagaccatcaaagagagaaagagaataaaaatatttttgtaaaactttttttatgagaccatcagaaagaggtttaatatttttgtgatactctgaaaggaaataggaataggaataggaatagtgtcataatcgtatcacactattgagacagaaaaagaagaagtcgcgagaggtaactttttgtgaatgtagttaagaacatttttgttttgcaaaccggaatatagtgtccggtacacttttttaattcgtggtgtgcctgaatcgttcgattaaccctactcatccaatttcagatgaatagagttatcgattcagacacacgctttgagttttgttgaatcgatgagtgaagtatcatcggttgcaccttcagatgccgatccgtcgacatacttgaatccatccttgacctcaagttcagatgattccttgcacatgtctccgatacgaacgctaaactctagattcttgacgcattttgtatcgacgatcgttgaaccgatgatatcttcgtaactcactttcttatgagagatgttagacccgagtactggatgggtcttgatgtcgctgtctttctcttcttcgctacatctgatgtcgatagacacttcacagtctttgatcatagcaagagcttcttcatgagtgatcgcgggagagtccttaccttgtcctggggacacgctggacaatctagcattcactgtgtttccatcagcggattctgagatggatttaatctgaggacatttggtgaatccaaagttcattctcagacctccaccgatgatggagtaataagtggtaggaggatctacatcctcgactgatgtggaatcatcttctgattccacctcgggatctggatctgactcggactctgtaatttccgttacggattggcaaatcttatcattggtcggtgtttggtcttgctttgtgactttgataataacatcgattcccatatgatgtttgttttcttcttccgtacacgaggaggaggatgaggatgattgctgaagactggcaggcatagcagctgccgccaggcacatgcatgccaggacgatatattgtttcataattgctattgattgagtactgttctttatgattctacttccttaccgtgcaataaattagaatatattttctacttttacgagaaattaattattgtatttattatttatgggtgaaaaacttactataaaaagtgggtgggtttggaattagtgatcagtttatgtatatcgcaactaccgggcatatggctatcgacatcgagaacattacccacatgataagagattgtatcagtttcgtagtcttgagtattggtattactatatagtatatagatgtcgcccactagagttactgtctccgaatgcggcatgatagtatcattctttgctttcgttaactgtttggaggaagaatctttgttattgcatttaatctcgaaattcagagtgcacacctttctcctgtaaagaaacctgaagtcgctaccttattaagaacggagaagtatccatcacgaaagacgggattacagtctttatgattcatagtaatagttagttccgacgttgagatggattcgctgagaccggtagtggtcgtccgagtacacgacgtgtcgttaactggatacaggttaatttccacatcgatatagttaaacgtatttctgggtacgggttcgcatttatctgcggaagagacggtgtgagaatatgttccgagaccacacggagaacagatgacgtctccggatactccgtatcctattccacattttgtttgggaaacacatgccttgcatccggatgatcctttgagaagacaataatatccgggagagcattcacagattctattgtgagtcgtgttacacgatcgcgtcttccgttacaacttagacaagcgggtaaatgattattgcgagatgtgaaggtacccgaaccacacggcgtacattgtgtgttagtcttgctatcgcataatctggaagcgtatgttcccggacacaaattatggcgtttgtattcgttgtctttacactttccatcggatggtgcatgcggtgctatatctcttccgtttattattatacatgagagaaacaatatatacgagtataatacggacttcatgatttaataatgtagtaatcgttgtcttgttcctgtttcctacttctccaatcatatagatattttctttctatcatggataatatttgtaatggttctttccgtacaacatactgtttagatgatattgcgcataatttccggaggcaaatacgatagtctagattgaccgatggtagactctaatttattgagtgctttgtcgacgagtttacttttacgctccatcgatagatggcactgttctatgagatcgtcgtacatgggaaatgaaatgtgactgtctgaatgtatggctttaagatagctgtgataccgtatacaggtcggtgtcggagattcgaatctctttgaggcgacttatgtcacgatgatggaatctatcttatcgaatgatatatttttcataaatacacttttatagtcctcgtttaaacagaatttactatgtagttccgcgaatgactcgtcccttaataggcagtaggctagtatcttttttacgtagtaatcgtcgtagggagagacatcttgtagaacaacgatttaatcataggtagagatactttcagtctgtggtggatgatgtcattcacaacatccgccttgtatatgatgtttctgttttcaaacaccaagtcgaataccgtctttagtcggaaggttgatgtcgtatccgatgtatgaggcaacattgttgttacaattttgaaaggcggtattatagtattcgtctttctgaatgtcgaacctatctaatagataccgtagtatattgagagtgtatccttgattatgttttatgaatagataaagtagatgttgtccttcttccttttgttcgtgccaattgagtaacattatgagaatatgacctgttgcacaatcgttccatgatgggtgtacaatcaagattattacgtatcctcgtatcggctcctcgagataaaagagcatacaccacacgaggactatgtttggtatactgttgaaggtaagtgtgtaaccgcgttaatgtttgctccataatctattatcgcgtagatgaatcgcttctcggctcgcatcttagtgtgacttgacttgtaataattgctttcgtagaacgtggatatgtgtttacagtagtaatgaagagaagtgagttcatcctcgtcggcgcaattagggtcggatcctttgtacagaacgtaatagtttaagctcccattgaatttatatctaagataacacagcaatagatcggatgatttactaaagtcatcaatggtgtccgttagtatatcaaagatcttgttatcgattgatagtggtcatccttgctatcaaagttacgcatgccgtggtgtaacaatatctttaatacagatggattaaatcgtgtattcatcgtatagcaatgtaatggagagttacctcgtttattcagatcgcagtgtttaataactagcttaaacagatgagacgatgtatctacatcaaagaacgtaaaatacatatgacagacattgttgacagaaacgtgaccttcattcttaccgtcgtccataaatacgttaggtatgtaccacatactgtcgcgaacgatgcgtacaatctcgtccatctcataatgatttactttttcataattaaagatgtgaaagaaaaaccgaacaatatatttttttagtaatgtttatgcgagacatataaaataaactccgtgtttatgatgccggtaaatgtttttatcatcttggacggaatcgattttgtaatatgtcatggaaacaaatgaaacaggacattatcgctccatgataaattatttaatggagtaataaagtatctccatgggtaatttcgaaatcaagttatcgtctgtattaatgttgtccactatggagtcgatcctctcattgttctttacagtttctgtaatgatggacgttagttcttttttgtaccatttgatgtcggattctttgcgtatctcaatctgtggcgtttgcttcgtttaaataatatatcaaacatggaaacgcctgatatgtagacattcttcattctattaatgtctactctatagcgctttagttccttatgacgaccggcgatatcatactttactttagaaggaaaatcatcatctaggattaaggcgtatctgatacaggcgaataatggttcaggatatagatagcgtatatctctattaaatgcgtcaatcatagtctctagagtgggatggtaactcagtaataaatcaactagcttcgttttgttttctctttggtaactgcttttctggatggccgtattgattatcgagcgtgacactcgctccatattccaataaccgctttgcaaattgtatattattgacatcgaccgcgtaatatagtagagttatcgatcatatctatatcatccatgtacttgcttagtatatcaaatacatctatcagtatggtttcataacagtgatacccgcaattattaaatctcgataatatcagaccgtacatacatagacggccattgttcgatacgtgatttacagccgcgtgtccatattttccacgataaaccttacgacgtttacatcgacgagattattattaacaaagtagtcgtgtagaggatagttgttgtccgtcgtcttatccatggttgctccgttatccaacatgcatcgaacgaccatatcgccgtaatgtaagtagtttatcagtatggcttgtacatcctgttgtctaaatctctttagaatgttatcgatgatgtagtggttatattctctggaatcgtacgaagtaatactacgcattacgtcgacaagagtatgacgtctctcaataagaagattaacgatttccatgtctacattatatggggttactctaaatcgcttgtttagataatacgcctctaatatagggctgacgtcgtatactctacacgtgtccacatcctttattaataataatttaacaatctctatatctatggttgagaaagaccagtagtattggatgggtaaagatcctccttcgtctctgccatggatggaaacattgttatcgatcaaacatttaattacatccttggatagagattgagattctctatgagacgatatatagtaatgaagagagttcttacacatatcactgtcgtacatacaggtacgaaatacgtaaccggtgctgtaacattctgatttaagaagccatagcaatacttctggtctcggattaggcgtcgttacgtatatatccaccaatccgagaccattgattgcataattcgtattcttggacggacgtatccgtttatccacaattaggtattttagcagacgtaagtcgatattatccgaatacagatcgaaatcatttatattcgacttgagttcgttagaggaattcgaatagctggatatcagtagatgcacaatttgagatttgacgtatctatgcttactgtatactcctagcggagttaatccttcgttgtttctacaaagtctctcgactccgcgagagaacaatcttaatgtctgtatcgcatttattggagacgtaacaatgtagcgcattgtttcctcgtctatctatatgttttgataagttgtgacacgtttcaatttctagttttatttttttgtacgtcacatcttcatccagtagacgacatagaatagtgcactctctaccacaataatccatagctattctggtgctaattattcctatttcacgaaggcaatcattcctcataagatgataaaaagtgtagtgagagagcatgaaggagatttagtatttagcagtgcggatatgatccaagagggtgagatagtcgttctcgttcagaatctttcgcagcataagtagtatgtcgatatacttatcgttgaagactctttataaaagtctatttgtttatatttattgcggatagcagtatttccctataaaaagtatacgtcctgtggtgtctttaatcatgtacatgaatggatggtttatgtagaccttcgtacgatataccatcgaaaagttaatcgtaaatactcctgtaacggccgatgcttctgtatactcctcattaacatctataaacgtcgtatgtagaaatttttctacagtgatagtttcattacacatcttgctaaaatctgcataatatccgaatatattagtaagtcctaaattttctaaaatcggtaccagattatacggttctgtcatttccactttaaactttggcatatacaagtctatacttttagtagataacataccacaccattttttaaatttttcatctgttatatttttttctatgttatatataccttctatgtcgtccggtagtataattaccatactagagtttccctcgtatggaatatcgataatagagaatcctccgaataattcattaatatgtacatattgcaagttattctcggtacccaccatcatatcaacgctggtaactatattcttagaaatataaaacttgtctgtatatgtaagatgtttagaaaatggatatttccacattgctttaaaatggacggcgctaacaactgtcatacgagtattaatggatagcggactagtcaataaggaattaattttaccatttgtcattgtcttaacccattcgttgattagttcctttgtttggttagcattattaaagtttacagtttgaaaatcgtcttttattttttgtaggaaggaggcgtggaactcgatactatcgctaccgtatattttatttgcggtagctagtgtcgcacaatacggaatatctacctccatgtcatcattattgtcatcgggtgtattctcattcatattctctatatattttgatagttgttcagctgtagaaccagctgctccatgatttagaatagataaagtagataaaatggaaactggagaaatcaaaacattttcatcagggtgttttacgattagttctttaaagatatccatggtatagacctaacgataacgatatatatcataaataaataatgttaaatttcagtttatgtttgtaccccgtattcatacttaacaaattggtattgcgtacacaatcaatcatattacataccattaataatgcaagcataaaaaatcgttagtagatgtttctaaatataggttccgtaagcaaagaatataagaatgaagcggtaatgataaaatcaatcgttatctaaaatgatcatactcatttattttattctattatattaacacatacatttttaacagcaacacattcaatattgtattgttatttttatattatttacacaattaacaatatattattagtttatattactgaattaataatataaaattcccaatcttgtcataaacacacactgagaaacagcataaacacagaatccatcaaaaatgttgataaattatctgatgttgttgttcgctgctatgataatcagatcattcgccgatagtggtaacgctatcgaaacgacattgccagaaattacaaacgctacaacagatattccagctatcagattatgcggtccagagggagatggatattgtttacacggtgactgtatccacgctagagatattgacggtatgtattgtagatgctctcatggttatacaggcattagatgtcagcatgtagtattagtagactatcaacgttcagaaaacccaaacactacaacgtcatatatcccatctcccggtattatgcttgtattagtaggcattattatgtgttgtctattatctgtttataggttcactcgacgaactaaactacctatacaagatatggttgtgccataatttttataaatttttttatgagtatttttacaaaaatgtataaagtgtatgtcttatgtatatttataaaaatgctaagtatgcgatgtatctatgttatttgtatttatctaaacaatacctctacctctagatattatacaaaaattttttatttcggcatattaaagtaaaatctagttaccttgaaaatgaatacagtgggtggttccgtatcaccagtaagaacataatagtcaaatacagtatccgattgagattttgcatacaatactagtctagaaagaaatttgtaatcatcttctgtgacgggagtccatatatctgtatcatcgtctagtttatcagtgtcccatgctatattcctgttatcatcattagttaatgaaaataactctcgtgcttcagaaaagtcaaatattgtatccatacatacatctccaaaactatcgcttatacgtttatctttaacgatacctatacctagatggttatttactaacagacattttccagatctattgactataactcctatagtttccacatcaaccaagtaatgatcatctattgttatataacaataacataactcttttccatttttatcagtatgtatatctatatcaacgtcgtcgttgtagtgaatagtagtcattgatctattatatgaaacggatatgtctagaacggcaattgttttacgtccagttaacactttctttgatttaaagtctagagtctttgcaaacataatatccttatccgactttatatttcctgtagggtggtataattttattttgcctccacatatcggtgtttccaaatatattactagacaatattccatatagttattagttaagggtacccaattagaacacgtacgcttattatcatcatttggatcgtatttcataaaagttattgtgttatcgatgtcaacacattctacattttttaatcgtctatatagtatttttctgatattttctataatatcagaattgtcttccatcggaagttgtatactatcggaatcagttacatgtttaaataattctctgatgtcattccttatacaatcaaattcattattaaacagtttaatagtctgtagacctttatcgtcgtaaatatccattgtcttattagttacgcttatttttatgtgtttttacgttgctttattatattttataagaatgattgtttgacgaatcacgagaactattaagacacattattaggtatatattataaaaaagtttttgattacgatgttataagaggaaagaggacacattaacatcatacatcaattaactacattcttataacatcgtaatcaaaagaattgcaattttgatgtataacaactgtcaatgggttatggaattgtatattacatattatacggtatgttggtaacgacaaataccggtcggtaattgtctgccggtgtaatagaattatatatatctatctattacaccggccttgtatacataataataagttgtggtagtatgatctccatatttataatttaggactttgtattcagtatttttggaatcataaaaaataaaaaaaagttttactaatttaaaatttaaaaagtatttacatttttttcactgtttagtcgcggatatggaattcgatcctgccaaaatcaatacatcatctatagatcatgtaacaatattacaatacatagatgaaccaaatgatataagactaacagtatgcattatccgaaatattatatcaatatcacaaaaataaatacacatttggctaatcaatttcgggcttggaaaaaacgtatcgccggaagggactatatgactaacttatctagagatacaggaatacaacaatcaaaacttactgaaactatacgtaactgtcaaaaaaatagaaacatatatggtctatatatacactacaatttagttattaattggataaccgatgtgattatcaatcaatattaagagggttggtaaattggtacatagctaataatacctatacacccaataatacaacaaccatttctgagttggatatcatcaaaatactaaataaatacgaggacgtgtatagagtaagtaaagaaaaagaatgtggaatttgctatgaagttgtttactcaaaacgatagatactttggtttattggattcgtgtactcatatattttgcataacatgcatcaatatatggcataaaacacgaagagaaaccggtgcgtcggataattgtcctatatgccgtacccgttttagaaacataacaatgagcaagttctataagctagttaactaataaataaaaagtttaatttgttgacgacgtatgtcgttattttttctcgtataaaagattaatttgattctaatataatctttagtattggataaatatcaattcaaattaattccattagattatatcataaataaaaatagtagcacacaactacttcagcaaacattctttttataaatgccatctagcgtagcgaggacacaagtgaacctataattatcaaatttattagtatcagtcacatgaaggactttacgtagagtgacgattccactatctgtggtacgaacggtttcatcttctttgatgccatcacccagatgttctataaacttggtatcctcgtccgatctcatatcctttgccaaccaatacatgtagctaaaattaggcataaatttcacacatcctgaacaatgaaattctccagaagatgttacaatgtctagatttggacatttggtttcaaccgcgttaacatatgagtgaacacacccatacatgaaagcgatgagaaataggattctcatcttgccaaaatatcactagaaaaaatttatttatcagttttaaaggtataaaaaatacttattgttgctcgaatattttgtatttgatggtatacggaagattagaaatgtaggtattatcatcaactgattctatggttttatgtattctatcatgtttcactattgcgttggaaataatatcatatgcttccacatatattttattttgttttaactcataatactcacgtaattctggattattggcatatctatgaataattttagctccatgatcagtaaatattaatgagaacatagtattaccacctaccattatttttttcatctcattcaattcttaattgcaaagatctatataatcattatagcgttgacttatggactctggaatcttagacgatgtacagtcatctataatcatggcatatttaatacattgttttatagcatagtcgttatctacgatgttagatatttctctcaatgaatcaatcacacaatctaatgtaggtttatgacataatagcattttcagcagttcaatgtttttagattcgttgatggcaatggctatacatgtatatccgttatttgatctaatgttgacatctgaaccggattctagcagtaaagatactagagattgtttattatatctaacagccttgtgaagaagtgtttctcctcgtttgtcaatcatgttaatgtctttaagataaggtaggcaaatgtttatagtactaagaattgggcaagcataagacatgtcacaaagacccttttttgtatgtataagtgtaaaaattataacatccatagttggatttacataggtgtccaatcgggatctctccatcatcgagataattgatggcatctcccttccttttttagtagatatttcatcgtgtaagaatcaatattaatatttctaaagtatccgtgtatagcctctttatttaccacagctccatattccactagagggatatcgccgaatgtcatatactcaattagtatatgttggaggacatccgagttcattgttttcaatatcaaagagatggtttccttatcatttctccatagtggtacaatactacacattattccgtgcggctttccattttccaaaaacaatttgaccaaatctaaatctacatctttattgtatctataatcactatttagataatcagccataattcctcgagtgcaacatgttagatcgtctatatatgaataagcagtgttatctattcctttcattaacaatttaacgatgtctatatctatatgagatgacttaatataatattgaagagctgtacaatagtttttatctataaaagacggcttgattccgtgattaattagacatttaacaacttccggacgcacatatgctctcgtatccgactctgaatacagatgagagatgatatacagatgcaatacggtaccgcaatttcgtagttgataatcatcatacgcgtatcagtactcgtcctcataaagaacactgcagccattttctatgaacaaatcaataattttagaaacaggatcattgtcattacataattttctataactgaacgatggttttcacatttaacactcaagtcaaatccatgttctaccaacacctttatcaagtcaacgtctacatttttggatttcatatagctgaatatattaaagttatttatgttgctaaatccagtggcttctagtagagccatcgctatatccttattaactttaacatgtctactatttgtgtattcttctaatggggtaagctgtctccaatttttgcgtaatggattagtgccactgtctagtagtagtttgacgacctcgacattattacaatgctcattaaaaaggtatgcgtgtaaagcattattcttgaattggttcctggtatcattaggatctctgtctttcaacatctgtttaagttcatcaagagccacctcctcattttccaaatagtcaaacattttgactgaatgagctactgtgaactctatacacccacacaactaatgtcattaaatatcatgtcaaaaacttgtacaattattaataaaaataatttagtgtttaaattttaccagttccagattttacacctccgttaatacctccattaaccccactggacgatcctcctccccacattccaccgccaccagatgtataagttttagatcctttattactaccatcatgtccatggataaagacactccacatgccgccactaccccctttagaagacatattaataagacttaaggacaagtttaacaataaaattaatcacgagtaccctactaccaacctacactattatatgattatagtttctatttttacagtaccttgactaaagtttctagtcacaagagcaatactaccaacctacactattatatgattatagtttctatttttataggaacgcgtacgagaaaatcaaatgtctaatttctaacggtagtgttgataaacgattgttatccgcggatacctcctctatcatgtcgtctattttcttactttgttctattaacttattagcattatatattatttgattataaaacttatattgcttattagcccaatctgtaaatatcggattattaacatatcgtttctttgtaggtttatttaacatgtacatcactgtaagcatgtccttaccatttattttaatttgacgcatatccgcaatttctttttcgcagtcggttataaattctatatatgatggatacatgctacatgtgtacttataatcgactaatatgaagtacttgatacatattttcagtaacgatttattattaccacctatgaataagtacctgtgatcgtctaggtaatcaactgttttcttaatacattcgatggttggtaatttactcagaataatttccaatatcttaatatataattctgctatttctgggatatatttatctgccagtataacacaaatagtaatacatgtaaacccatattttgttattatattaatgtctgcgccattatctattaaccattctactaggctgacactatgcgactcaatacaatgataaagtatactacatccatgtttatctattttgtttatatcatcaatatacggcttacaaagttttagtatcgataacacatccaactcacgcatagagaaggtagggaataatggcataatatttattaggttatcatcattgtcattatctacaactaagtttccattttttaaaatatactcgacaactttaggatctctattgccaaatttttgaaaatatttatttatatgcttaaatctatataatgtagctccttcatcaatcatacatttaataacattgatgtatactgtatgataagatacatattctaacaatagatcttgtatagaatctgtatatcttttaagaattgtggatattaggatattattacataaactattacacaattctaaaatataaaacgtatcacggtcgaataatagttgatcaactatataattatcgattttgtgatttttcttcctaaactgtttacgtaaatagttagatagaatattcattagttcatgaccactatagttactatcgaataacgcgtcaaatatttcccgtttaatatcgcatttgtcaagataataatagagtgtggtatgttcacgataagtataataacgcatctctttttcgtgtgaaattaaatagtttattacgtccaaagatgtagcataaccatcttgtgacctagtaataatataataatagagaactgttttacccattctatcatcataatcagtggtgtagtcgtaatcgtaatcgtctaattcatcatcccaattataatattcaccagcacgtctaatctgttctattttgatcttgtatccatactgtatgttgctacatgtaggtattcctttatccaataatagtttaaacacatctacattgggatttgatgttgtagcgtatttttctacaatattaataccatttttgatactatttatttctatacctttcgaaattagtaatttcaataagtctatattgatgttatcagaacatagatattcgaatatatcaaaatcattgatatttttatagtcgactgacgacaataacaaaatcacaacatcgtttttgatattattatttttcttggtaacgtatgcctttaatggagtttcaccatcatactcatataatggatttgcaccactttctatcaatgattgtgcactgctggcatcgatgttaaatgttttacaactatcatagagtatcttatcgttaaccatgattggttgttgatgctatcgcattttttggtttctttcatttcagttatgtatggatttagcacgtttgggaagcatgagctcatatgatttcagtactgtagtgtcagtactattagtttcaataagatcaatctctagatctatagaatcaaaacacgataggtcagaagataatgaatatctgtaggcttcttgttgtactgtaacttctggttttgttagatggttgcatcgtgctttaacgtcaatggtacaaattttatcctcgctttgtgtatcatattcgtccctactataaaattgtatattcagattatcatgcgatgtgtatacgctaacggtatcaataaacggagcacaccatttagtcataaccgtaatccaaaaatttttaaagtatatcttaacgaaagaagttgtgtcattgtctacggtgtatggtactagatcctcataagtgtatatatctagagtaatgtttaatttattaaatggttgataatatggatcctcgtgacaatttccgaagatggaaataagacataaacacgcaataaatctaattgcggacatggttactccttaaaaaaatacgaataatcaccttggctatttagtaagtgtcatttaacactatactcatattaatccatggactcataatctctatacgggattaacggatgttctatatacggggatgagtagttctcttctttaactttatactttttactaatcatatttagactgatgtatgggtaatagtgtttgaagagctcgttctcatcatcagaataaatcaatatctctgtttttttgttatacagatgtattacagcctcatatattacgtaatagaacgtgtcatctaccttattaactttcaccgcatagttgtttgcaaatacggttaatcctttgacctcgtcgatttccgaccaatctgggcgtataatgaatctaaactttaattgcttgtaatcattcgaaataatttttagtttgcatccgtagttatcccctttatgtaactgtaaatttctcaacgcgatatctccattaataatgatgtcgaattcgtgctgtatacccatactgaatggatgaacgaataccgacggcgttaatagtaatttactttttcatctttacatattgggtactagttttactatcataagtttataaattccacaagctactatggaataagccaaccatcttagtataccacacatgtcttaaagtttattaattaattacatgttgttttatatatatcgctacgaatttaaagagaaattagtttaggaagaaaaattatctatctacatcatcacgtctctgtattctacgatagagtgctactttaagatgcgacagatccgtgtcatcaaatatatactccattaaaatgattattccggcagcgaacttgatattggatatatcacaacctttgttaatatctacgacaatagacagcagtcccatggttccataaacagtgagtttatctttctttgaagagatattttgtagagatcttataaaactgtcgaatgacatcgcatttatatctttagctaaatcgtatatgttaccatcgtaatatctaaccgcgtctatcttaaacgtttccatcgctttaaagacgtttccgatagatggtctcatttcatcagtcatactgagccaacaaatataatcgtgtataacatctttgatagaatcagactctaaagaaaacgaatcggctttattatacgcattcatgataaacttaatgaaaaatgtttttcgttgtttaagttggatgaatagtatgtcttaataattgttattatttcattaattaatatttagtaacgagtacactctataaaaacgagaatgacataactaatcataactagttatcaaagtgtctaggacgcgtaattttcatatggtatagatcctgtaagcattgtctgtattctggagctattttctctatcgcattagtgagttcagaatatgttataaatttaaatcgaataacgaacataactttagtaaagtcgtctatattaactcttttattttctagccatcgtaataccatgtttaagatagtatattctctagttactacgatctcatcgttgtctagaatatcacatactgaatctacatccaattttagaaattggtctgtgttacatatctcttctatattattgttgatgtattgtcgtagaaaactattacgtagaccattttctttataaaacgaatatatagtactccaattatctttaccgatatatttgcacacataatccattctctcaatcactacatctttaagattttcgttgttaagatatttggctaaactatataattctattagatcatcaacagaatcagtatatatttttctagatccaaagacgaactctttggcgtcctctataatattcccagaaaagatattttcgtgttttagtttatcgagatctgatctgttcatatacgccatgattgtacggtacgttatgataaccgcataaaataaaaatccattttcatttttaaccaatactattcataattgagattgatgtaatactttgttactttgaacgtaaagacagtacacggatccgtatctccaacaagcacgtagtaatcaaatttggtgttgttaaacttcgcaatattcatcaatttagatagaaacttatactcatcatctgttttaggaatccatgtattattaccactttccaacttatcattatcccaggctatgtttcgtccatcatcgttgcgcagagtgaataattcttttgtattcggtagttcaaatatatgatccatgcatagatcggcaaagctattgtagatgtgatttttcctaaatctaatataaaactcgtttactagcaaacactttcctgatttatcgaccaagacacatatggtttctaaatctatcaagtggtggggatccatagttatgacgcagtaacatatattattacattcttgactgtcgctaatatctaaatatttattgttatcgtattggattctgcatatagatggcttgtatgtcaaagatatagaacacataaccaatttatagtcgcgctttacattctcgaatctaaagttaagagatttagaaaacattatatcctcggatgatgttatcactgtttctggagtaggatatattaaagtctttacagatttcgtccgattcaaataaatcactaaataatatcccacattatcatctgttagagtagtatcattaaatctattatattttatgaaagatatatcactgctcacctctatatttcgtacatttttaaactgtttgtataatatctctctgatacaatcagatatatctattgtgtcggtagacgataccgttacatttgaattaatggtgttccattttacaacttttaacaagttgaccaattcatttctaatagtatcaaactctccatgattaaatattttaatagtatccattttatatcactacggacacaaagtagctgacataaaccattgtataatttttatgttttatgtttattagcgtacacattttggaagttccggcttccatgtatttcctggagagcaagtagatgatgaggaaccagatagtttatatccgtacttgcacttaaagtctacattgtcgttgtatgagtatgatcttttaaacccgctagacaagtatccgtttgatattgtaggatgtggacatttaacaatctgacacgtgggtggatcggaccattctcctcctgaacacaggacactagagttaccaatcaacgaatatccactattgcaactataagttacaacgctcccatcggtataaaaatcctcgtatccgttatgtcttccgttggatatagatggaggggattggcatttaacagattcacaaataggtgcctcgggattccataccatagatccagtagatcctaattcacaatacgatttagattcaccgatcaactgatatccgctattacaagagtacgttatactagagccaaagtctactccaccaatatcaagttggccattatcgatatctcgaggcgatgggcatctccgtttaatacattgattaaagagtgtccatccagtacctgtacatttagcatatataggtcccattttttgctttctgtatccaggtagacatagatattctatagtgtctcctatgttgtaattagcattagcatcagtctccacactattcttaaatttcatattaatgggtcgtgacggaatagtacagcatgatagaacgcatcctattcccaacaatgtcaggaacgtcacgctctccaccttcatatttatttatccgtaaaaatgttatcctggacatcgtacaaataataaaaagcccatatatgttcgctattgtagaaattgtttttcacagttgctcaaaaacgatggcagtgacttatgagttacgttacactttggagtctcatctttagtaaacatatcataatattcgatattacgagttgacatatcgaacaaattccaagtatttgattttggataatattcgtattttgcatctgctataattaagatataatcaccgcaagaacacacgaacatctttcctacatggttaaagtacatgtacaattctatccatttgtcttccttaactatatatttgtatagataattacgagtctcgtgagtaattccagtaattacatagatgtcgccgtcgtactctacagcataaactatactatgatgtctaggcatgggagacttttttatccaacgatttttagtgaaacattccacatcgtttaatactacatatttttcatacgtggtataaactccacccattacatatatatcatcgtttacgaataccgacgcgcctgaatatctaggagtaattaagtttggaagtcttatccatttcgaagtgccgtgtttcaaatattctgccacacccgttgaaatagaaaattctaatcctcctattacatataactttccatcgttaacacaagtactaacttctgattttaacgacgacatattagtaaccgttttccattttttcgttttaagatctacccgcgatacggaataaacatgtctattgttaatcatgccgccaataatgtatagacaattatgtaaaacatttgcattatagaattgtctatctgtattaccgactatcgtccaatattctgttctaggagagtaatgggttattgtggatatataatcagagtttttaatgactactatattatgttttataccatttcgtgtcactggctttgtagatttggatatagttaatcccaacaatgatatagcattgcgcatagtattagtcataaacttgggatgtaaaatgttgatgatatctacatcgtttggatttttatgtatccactttaataatatcatagctgtaacatcctcatgatttacgttaacgtcttcgtgggataagatagttgtcagttcatcctttgataattttccaaattctggatcggatgtcaccgcagtaatattgttgattatttctgacatcgacgcattatatagttttttaattccatatcttttagaaaagttaaacatccttatacaatttgtgaaattaatattatgaatcatagtttttacacatagatctactacaggcggaacatcaattattatggcagcaactagtatcatttctacattgtttatggtgatgtttatcttcttccagcgcatatagtctaatagcgattcaaacgcgtgatagtttataccattcaatataatcgcttcatcctttagatggtgatcctgaatgcgtttaaaaaaattatacggagacgccgtaataatttccttattcacttgtataatttccccattgatagaaaatatcacgctttccattcttaaagtactataagtaattatagtataatgtaaacgtttatatattcaatatttttataaaaatcattttgacattaattcctttttaaatttccgtctatcatctatagaaacgtattctatgaatttataaaatgcttttacgtgtcctatcgtaggcgatagaaccgctaaaaagcctatcgaatttctacaaaagaatctgttatatggtatagggagagtataaaacattaaatgtccgtacttattaaagtattcagtagccaatcctaactctttcgaatacttattaatggctcttgttctgtacgaatctatttttttgaacaacggacctagtggtatatcttgttctatgtatctaaaataatgtctgactagatccgttagtttaatatccgcagtcatcttgtctagaatggcaaatctaactgcgggtttaggctttagtttagtttctatatctacatctatgtctttatctaacaccaaaaatataatagctaatattttattacaatcatccggatattcttctacgatctcactaactaatgtttctttggttatactagtatagtcactatcggacaaataaagaaaatcagatgatcgatgaataatacatttaaattcatcatctgtaagatttttgagatgtctcattagaatattattagggttagtactcattatcattcggcagctattacttattttattatttttcaccatatagatcaatcattagatcatcaaaatatgtttcaatcatcctaaagagtatggtaaatgactcttcccatctaatttctgaacgttcaccaatgtctctagccactttggcactaatagcgatcattcgcttagcgtcttctatattattaactggttgattcaatctatctagcaatggaccgtcggacagcgtcattctcatgttcttaatcaatgtacatacatcgccgtcatctaccaattcatccaacaacataagctttttaaaatcatcattataataggtttgatcgttgtcatttctccaaagaatatatctaataagtagagtcctcatgcttagttaacaactattttttatgttaaatcaattagtacaccgctatgtttaatacttattcatattttagtttttaggattgagaatcaatacaaaaattaatgcatcattaattttagaaatacttagtttccacgtagtcaatgaaacatttgaactcatcgtacaggacgttctcgtacaggacgtaactataaaccggtttatatttgttcaagatagatacaaatccgataactttttttacgaattctacgggatccactttaaaagtgtcataccgggttctttttatttttttaaacagatcaatggtgtgatgttgattaggtcttttacgaatttgatatagaatagcgtttacatatcctccataatggtcaatcgccatttgttcgtatgtcataaattctttaattatatgacactgtgtattatttagttcatccttgttcattgttaggaatctatccaaaatggcaattatactagaactataggtgcgttgtatacacatattgatgtgtctgtttatacaatcaatgctactaccttcgggtaaaattgtagcatcatataccatttctagtactttaggttcattattatccattgcagaggacgtcatgatcgaatcataaaaaaatatattatttttatgttattttgttaaaaataatcatcgaatacttcgtaagatactccttcatgaacataatcagttacaaaacgtttatatgaagtaaagtatctacgatttttacaaaagtccggatgcataagtacaaagtacgcgataaacggaataataatagatttatctagtctatctttttctatagctttcatagttagatacatggtctcagaagtaggattatgtaacatcagcttcgataaaatgactgggttatttagtcttacacattcgctcatacatgtatgaccgttaactacagagtctacactaaaatgattgaacaatagatagtctaccattgtttcgtattcagatagtacagcgtagtacatggcatcttcacaaattatatcattgtctaatagatatttgacgcatcttatggatcccacttcaacagccatcttaaaatcggtagaatcatattgctttcctttatcattaataatttctagaacatcatctctatcataaaagatacaaatattaactgtttgatccgtaataacattgctagtcgatagcaatttgttaataagatgcgctgggctcaatgtcttaataagaagtgtaagaggactatctccgaatttgttttgtttattaacatccgttgatggaagtaaaagatctataatgtctacattcttgactgttttagagcatacaatatggagaggtgtatttccatcatgatctggttttgagggactaattcctagtttcatcatccatgagattgtagaagcttttggattgtctgacataagatgtctatgaatatgatttttgccaaatttatccactatcctggcttcgaatccgatggacattatttttttaaacactctttctgaaggatctgtacacgccaacaacggaccacatccttcttcatcaaccgagttgttaatcttggctccatactgtaccaataaatttattctctctatgacttcatcatctgttcccgagagataatatagaggcgttttatgctgtttatcacacgcgtttggatctgcgccgtgcgtcagcagcatcgcgactattctattattattaattttagaagctatatgcaatggataatttccatcatcatccgtctcatttggagagtatcctctatgaagaagttcttcgacaaatcgttcatctagtcctttaattccacaatacgcatgtagaatgtgataattatttccagaaggttcgatagcttgtagcatattcctaaatacatctaaatttttactattatatttggcataaagagatagataatactcggccgacataatgttgtccattgtagtataaaaattaatatttctatttctgtatatttgcaacaatttactctctataacaaatatcataacttagttcttttatgtcaagaaggcactggtttagttcatctataaatgtcacgccataactaccacgcatgccatactcagaattatgataaagatatttatccttggggtgtaggtaatggggattaatctttgttggatcagtctctaagttaacacatgtcacacatgatccatttatagttatatcacacgatgatgatttatgaattgattccggaagatcgctatcgtattttgtggttccacaattcatttccatacatgttattgtcacactaatattatgatgaactttatctagccgctgagtggtaaacaacagaacagatagtttattatctttaccaacaccctcagccgctgccacaaatctctgatccgtatccatgatggtcatgtttatttctagtccgtatccagtcaacactatgttagcatttctgtcgatatagctttcactcatatgacactcaccaataatagtagaattaatgtcgtaatttacaccaatagtgagttcggcggcaaagtaccaataccggtaatcttgtcgaggaggacatatagtattcttgtattctaccgaatacccgagagatgcgatacaaaagagcaagactaatttgtaaaccatcttactcaaaatatgtaacaatagtacgatgcaatgagtaagacaataggaaatctatcttatatacacataattattctatcaattttaccaattagttagtgtaatgttaacaaaaatgtgggagaatctaattagtttttctttacacaattgacgtacatgagtctgagttccttgtttttgctaattatttcatccaatttattattcttgacgatatcgagatcttttgtataggagtcaaacttgtattcaacatgcttttctataatcattttagctatttcggcatcatccaatagtacattttccagattagcagaatagatattaatgtcgtatttgaacagagcctgtaacatctcaatgtctttattatctatagccaatttaatgtccggaatgaagagaagggaattattggtgtttgtcgacgtcatatagtcgagcaagagaatcatcatatccacgtgtccattttttatagtgatgtgaatacaactaaggagaatagccagatcaaaagtagatggtatctctgaaagaaagtaggaaacaatacttacatcattaagcatgacggcatgataaaatgaagttttccatccagttttcccatagaacatcagtctccaatttttcttaacaaacagttttaccgtttgcatgttaccactatcaaccgcataatacaatgcggtgtttcccttgtcatcaaattgtgaatcatccagtccactgaatagcaaaatctttactattttggtatcttccaatgtggctgcctgatgtaatggaaattcattctctagaagatttttcaatgctccagcgttcaacaacgtacatactagacgcacgttattatcagctattgcataatacaaggcactatgtccatggacatccgccttaaatgtatctttactagagagaaagcttttcagctgcttagacttccaagtattaattcgtgacagatccatgtctgaaacgagacgctaattagtgtatattttttcattttttataattttgtcatattgcaccagaattaataatatctttaatagatctgattagtagatacatggctatcgcaaaacaacatatacacatttaataaaaataatatttattaagaaaattcagatttcacgtacccatcaatataaataaaataatgattccttacaccgtacccatattaaggagattccaccttacccataaacaatataaatccagtaatatcatgtctgatgatgaacacaaatggtgtattaaattccagtttttcaggagatgatctcgccgtagctaccataatagtagatgcctctgctacagttccttgttcgtcgacatctatctttgcattctgaaacattttataaatatataatgggtccctagtcatatgtttaaacgacgcattatctggattaaacatactaggagccatcatttcggctatcgacttaatatccctcttattttcgatagaaaatttagggagtttaagattgtacactttattccctaattgagacgaccaatagtctaattttgcagccgtgatagaatctgtgaaatgggtcatattatcacctattgccaggtacatactaatattagcatccttatacggaaggcgtaccatgtcatattctttgtcatcgattgtgattgtatttccttgcaatttagtaactacgttcatcatgggaaccgttttcgtaccgtacttattagtaaaactagcattgcgtgttttagtgatatcaaacggatattgccatatacctttaaaatatatagtattaatgattgcccatagagtattattgtcgagcatattagaatctactacattagacataccggatctacgttctactatagaattaattttattaaccgcatctcgtctaaagtttaatctatataggccgaatctatgatattgttgataatacgacggtttaatgcacacagtattatctacgaaactttgataagttagatcagtgtacgtatatttagatgttttcagcttagctaatcctgatattaattctgtaaatgctggacccagatctctttttctcaaatccatagtcttcaataattctattctagtattacctgatgcaggcaatagcgacataaacatagaaaacgaataaccaaacggtgagaagacaatattatcatcttgaatatttttatacgctactataccggcattggtaaatccttgtagacgataggcggacgctgaacacgctaacgatagtatcaataacgcaatcatgattttatggtattaataattaaccttatttttatgttcggtataaaaaaattattgatgtctacacatccttttgtaattgacatctatatatccttttgtataatcaactctaatcactttaacttttacagttttccctaccagtttatccctatattcaacatatctatccatatgcatcttaacactctctgccaagatagcttcagagtgaggatagtcaaaaagataaatatatagagcataatcattctcgtatactctgccctttattacatcacccgcattgggcaacgaataacaaaatgcaagcatcttgttaacgggctcgtaaattgggataaaaattatgtttttattgtcttatatctattttattcaagagaatattcaggaatttctttttccggttgtatctcgtcgcagtatatatcatttgtacattgtttcatattttttaatagtttacaccttttagtaggactagtatcgtacaattcatagctgtattttgaattccaatcacgcataaaaatatcttccaattgttgacgaagacctaatccatcatccggtgtaatattaatagatgctccacatgtatccgtaaagtaatttcctgtccaatttgaggtacctatataggccgttttatcggttaccatatatttggcatggtttaccctagaatacggaatgggaggatcagcatctggtacaataaatagctttacttctatatttatgtttttagattttagcatagcgatagatcttaaaaagtttctcatgataaacgaagatcgttgccagcaactaatcaatagcttaacggatacttgtctgtctatagcggatcttcttaattcatcttctatataaggccaaaacaaaattttacccgccttcgaataaataatagggataaagttcataacagatacataaacgaatttactcgcatttctaatacatgacaataaagcggttaaatcattggttctttccatagtacatagttgttgcggtgcagaagcaataaatacagagtgtggaacgccgcttacgttaatactaagaggatgatctgtattataatacgacggataaaagtttttccaattatatggtagattgttaactccaagataccagtatacctcaaaaatttgagtgagatccgctgccaagttcctattattgaagatcgcaatacccaattccttgacctgagttagtgatctccaatccatgttagcgcttcctaaataaatatgtgtattatcagatatccaaaattttgtatgaagaactcctcctaggatatttgtaatatctatgtatcgtacttcaactccggccatttgtagtctttcaacatcctttaatggtttgttagatttattaacggctactctaactcgtactcctcttttgggtaattgtacaatctcgtttaatattatcgtgccgaaattcgtacccacttcatccgataaactccaataaaaagatgatatatctagtgtttttgtggtattggatagaatttccctccacatgttaaatgtagacaaatatactttatcaaattgcatacctataggaatagtttctgtaatcactgcgattgtattatccggattcattttatttgttaaaagaataatcctatatcacttcactctattaaaaatccaagtttctatttctttcatgactgattttttaacttcatccgtttccttatgaagatgatgtttggcaccttcataaatttttatttctctattacaatttgcatgttgcatgaaataatatgcacctaaaacatcgctaatcttattgtttgttccctggagtatgagagtcgggggggtgttaatcttggaaattatttttctaaccttgttggtagccttcaagacctgactagcaaatccagccttaattttttcatgattgactaatgggtcgtattggtatttataaactttatccatatctctagatactgattctggacatagctttccgactggcgcatttggtgtgatggttcccataagtttggcagctagcagattcagtcttgaaacagcatctgcattaactagaggagacattagaatcattgctgtaaacaagtttggattatcgtaagaggctagctcccatggaatgacccaataagtagatttaatagttaccacgtgctgtaccaaagtcatcaatcatcattttttcaccattacttcttccatgtccaatatgatcatgtgagaatactaaaattcctaacgatgatatgttttcagctagttcgtcataacgtccagaatgtttaccagctccatgacttatgaatactaatgccttaggatatgtaataggtttccaatatttacaatatatgtaatcattgtccagattgaacatacagtttgcactcatgattcacgttatataactatcaatattaacagttcgtttgatgatcatattatttttatgttttattgataattgtaaaaacatacaattaaatcaatatagaggaaggagacggctactgtcttttgtaagatagtcatggcgactaaattagattatgaggatgctgttttttactttgtggatgatgataaaatatgtagtcgcgactccatcatcgatctaatagatgaatatattacgtggagaaatcatgttatagtgtttaacaaagatattaccagttgtggaagactgtacaaggaattgatgaagttcgatgatgtcgctatacggtactatggtattgataaaattaatgagattgtcgaagctatgagcgaaggagaccactacatcaattttacaaaagtccatgatcaggaaagtttattcgctaccataggaatatgtgctaaaatcactgaacattggggatacaaaaagatttcagaatctagattccaatcattgggaaacattacagatttgatgaccgacgataatataaacatcttgatactttttctagaaaaaaaattgaattgatgatataggggtcttcataacgcataattattacgttagcattctatatccgtgttaaaaaaaattatcctatcatgtatttgagagttttatatgtagcaaacatgatagctgtgatgccaataagctttagatattcacgcgtgctagtgttagggatggtattatctggtggtgaaatgtccgttatataatctacaaaacaatcatcgcatatagtatgcgatagtagagtaaacatttttatagtttttactggattcatacatcgtctacccaattcggttataaatgaaattgtcgccaatcttacacccaaccccttgttatccattagcatagtattaacttcgttatttatgtcataaactgtaaatgattttgtagatgccatatcatacatgatattcatgtccctattataatcattactaactttatcacaatatatgttgataatatctatatatgatctagtctttgtgggcaactgtctatacaagtcgtctaaacgttgtttactcatatagtatcgaacagccatcattacatggtcccgttccgttgatagataatcgagtatgttagtggacttgtcaaatctatataccatattttctggaagtggatatacatagtcgtgatcaacattattgctagcctcatcttctatatcctgtactataccattatctatatcatctacataatctatgatattattacacataaacatcgacaacatactattgtttattatctaagtcctgttgatccaaacccttgatctcctctatttgtactatctagagattgtacttcttccagttctggataatatatacgttgatagattagctgagctattctatctccagtatttacattaaacgtacattttccattattaataagaatgactcctatgtttcccctataatcttcgtctattacaccacctcctatatcaatgccttttagtgacagaccagacctaggagctattctaccatagcagaacttaggcatggacatactaatatctgtcttaattaactgtctttctcctggagggatagtataatcgtaagcgctatacaaatcatatccggcagcacccggcgattgcctagtaggagatttagctctgttagtttccttaacaaatctaactggtgagttaatattcatgttgaacataaaactaatattttatttcaaaattatttaccatcccatatattccatgaataagtgtgatgattgtacacttctatagtatctatatacgatccacgataaaatcctcctatcaatagcagtttattatccactatgatcaattctggattatccctcggataaataggatcatctatcagagtccatgtattgctggattcacaataaaattccgcatttctaccaaccaagaataaccttctaccgaacactaacgcgcatgatttataatgaggataataagtggatggtccaaactgccactgatcatgattgggtagcaaatattctgtagttgtatcagtttcagaatgtcctcccattacgtatataacattgtttatggatgccactgctggattacatctaggtttcagaagactcggcatattaacccaagcagcatccccgtggaaccaacgctcaacagatgtgggatttggtagacctcctactacgtataatttattgttagcgggtatcccgctagcatacagtctggggctattcatcggaggaattggaatccaattgtttgatatataatttaccgctatagcattgttatgtatttcattgttcatccatccaccgatgagatatactacttctccaacatgagtacttgtacacatatggaatatatctataatttgatccatgttcataggatactctatgaatggatacttgtatgatttgcgtggttgtttatcacaatgaaatattttggtacagtctagtatccattttacattatttatacctctgggagaaagataatttgacctgattacatttttgataaggagtagcagatttcctaatttatttcttcgctttatataccacttaatgacaaaatcaactacataatcctcatctggaacatttagttcatcgctttctagaataagtttcatagatagataatcaaaattgtctatgatgtcatcttccagttccaaaaagtgtttggcaataaagtttttagtatgacataagagattggatagtccgtattctatacccatcatgtaacactcgacacaatattcctttctaaaatctcgtaagataaagtttatacaagtgtagatgataaattctacagaggttaatatagaagcacgtaataaattgacgacgttatgactatctatatatacctttccagtatacgagtaaataactatagaagttaaactgtgaatgtcaaggtctagacaaaccctcgtaactggatctttatttttcgtgtatttttgacgtaaatgtgtgcgaaagtaaggagataactttttcaatatcgtagaattgactattatattgcctcctatggcatcaataattgttttgaatttcttagtcatagacaatgctaatatattcttacagtacacagtattgacaaatatcggcatttatgtttctttaaaagtcaacatctagagaaaaatgattatctttttgagacataactcccattttttggtattcacccacacgtttttcgaaaaaattagtttttccttccaatgatatattttccatgaaatcaaacggattggtaacattataaatttttttaaatcccaattcagaaatcaatctatccgcgacgaattctatatatgttttcatcatttcacaattcattcctataagtttaactggaagagccgcagtaagaaattcttgttcaatggatactgcatctgttataatagatctaacggtttcttcactcggtggatgcaataaatgtttaaacatcaaacatgcgaaatcgcagtgcagaccctcgtctctactaattagttcgttggaaaacgtgagtccgggcattaggccacgctttttaagccaaaatatggaagcgaatgatccggaaaagaagattccttctactgcagcaaaggcaataagtctctctccataaccggcgctgtcatgtatccacttttgagcccaatcggccttcttttttacacaaggcatcgtttctatggcattaaagagatagtttttttcattactatctttaacataagtatcgatcaaaagactatacatttccgaatgaatgttttcaatggccatctgaaatccgtagaaacatctagcctcggtaatctgtacttctgtacaaaatcgttccgccaaattttcattcactattccgtcactggctgcaaaaaacgccaatacatgttttataaaatatttttcgtctggtgttagtttattccaatcattgatatctttagatatatctacttcttccactgtccaaaatgatgcctctgcctttttatacatgttccagatgtcatgatattggattgggaaaataacaaatctatttggatttggtgcaaggatgggttccataactaaattaacaataacaataaattttttttcagttatctatatgcctgtacttggattttttgtacatcgatatcgccgcaatcactacaataattacaagtattattgatagcattgttattagtactatcataattaaattatctacattcatgggtgctgaataatcgttattatcatcattatcattttgtaattgtgacatcatactagataaatcgtttgcgagattgttgtgggaagcgggcatggaggatgcattatcattattatttaacgccttccatttggattcacaaatgttacgcacattcaacattttatggaaactataattttgtgaaaacaaataacaagaaaactcgtcatcgttcaaatttttaacgatagtaaaccgattaaacgtcgagctaatttctaacgctagcgactctgttggatatgggtttccagatatatatcttttcagttcccctacgtatctataatcatctgtaggaaatggaagatatttccatttatctactgttcctaatatcatatgtggtggtgtagtagaaccattaagcgcgaaagatgttatttcgcatcgtattttaacttcgcaataatttctggttagataacgcactctaccagtcaagtcaatgatattagcctttacagatatattcatagtagtcgtaacgatgactccatcttttagatgcgatactcctttgtatgtaccagaatcttcgtacctcaaactcgatatatttaaacaagttaatgagatattaacgcgttttatgaatgatgatatataaccagaagttttatcctcggtggctagcgctataaccttatcattataataccaactagtgtgattaatatgtgacacgtcagtgtgggtacaaatatgtacattatcgtctacgtcgtattcgatacatccgcatacagccaacaaatataaaatgacaaatactctaacgccgttcgtacccatcttgatgcggtttaataaatgttttgatttcaatttattgtaaaaaaagattcggttttatactgttcgatattctcattgcttatattttcatctatcatctccacacagtcaaatccgtggttagcatgcacctcatcaaccggtaaaagactatcggactcttctatcattataactctagaatatttaatttggtcattattaatcaagtcaattatcttatttttaacaaacgtgagtattttactcattttttataaaaacttttagaaatatacagactctatcgtgtgtctatatcttctttttatatccaatgtatttatgtctgatttttcttcatttatcatatataatggtccaaattctacacgtgcttcggattcatccagatcattaaggttcttataattgtaacatccttctcttccctcttctacatcttccttcttattcttattcttagcgtcacagaatctaccacagcaggatcccatgacgagcgtcatattaaactaatccattttcaattataatatatgattagtaatgaccattaaaataaaaaatattcttcataaccggcaagaaagtgaaaagttcacattgaaactatgtcagtagtatacatcatgaaatgatgatatatatatactctattttggtggaggattatatgatataattcgtggataatcatttttaagacacatttctttattcgtaaatcttttcacgttaaatgagtgtccatattttgcaatttcttcatatgatggcggtgtacgtggacgaggctgctcctgttcttgttgtggtcgccgactgtcgtgtctgcgtttagatccctccattatcgcgattgcgtagatggagtactattttataccttgtaattaaatttttttattaattaaacgtataaaaacgttccgtatctgtatttaagagccagatttcgtctaatagaacaaatagctacagtaaaaataactagaataattgctacacccactagaaaccacggatcgtaatacggcaatcggttttcgataataggtggaacgtatattttatttaaggacttaacaattgtctgtaaaccacaatttgcttccgcggatcctgtattaactatctgtaaaagcatatgttgaccgggcggagccgaacattctccgatatctaatttctgtatatctataatattattaacctccgcatacgcattacagttcttttctagcttggataccgcactaggtacatcgtctagatctattcctatttcctcagcgatagctcttctatccttttccggaagcaatgaaatcacttcaataaatgattcaaccatgagtgtgaaactaagtcgagaattactcatgcatttgttagttattcggagcgcgcaatttttaaactgtcctataacctctcctatatgaatagcacaagtgacattagtagggatagaatgttgagctaatttttgtaaataactatctataaaaagattatacaaagttttaaactctttagtttccgccatttatccagtctgagaaaatgtctctcataataaatttttccaagaaactaattgggtgaagaatggaaacctttaatctatatttatcacagtctgttttggtacacatgatgaattcttccaatgccgtactaaattcgatatctttttcgatttctggatatgtttttaataaagtatgaacaaagaaatggaaatcgtaataccagttatgtttaactttgaaattgttttttattttcttgttaatgattccagccacttgggaaaagtcaaagtcgtttaatgccgatttaatacgttcattaaaaacaaactttttatcctttagatgaattattattggttcattggaatcaaaaagtaagatattatcgggtttaagatctgcgtgtaaaaagttgtcgcaacagggtagttcgtagattttaatgtataacagagccatctgtaaaaagataaactttatgtattgtaccaaagatttaaatcctaatttgatagctaactcggtatctactttatctgccgaatacagtgctaggggaaaaattataatgtttcctctttcatattcgtagttagttctcttttcatgttcgaaaaagtgaaacatgcggttaaaatagtttataacattaatattactgttaataactgccggataaaagtgggatagtaatttcacgaatttgatactgtcctttctctcgttaaacgcctttaaaaaaactttagaagaatatctcaatgagagttcctgaccatccatagtttgtatcaataatagcaacatatgaagaacacgtttatacagagtatgtaaaaatgttaatttatagtttaatcccatggcccacgcacacacgattaattttttttcatctccctttagattgttgtatagaaatttgggtactgtgaactccgccgtagtttccatgggactatataattttgtggcctcgaatacaaattttactacatagttatctatcttaaagactataccatatcctcctgtagatatgtgataaaaatcgtcgtttataggataaaatcgtttatccttttgttggaaaaaggatgaattaatgtaatcattctcttctatctttagtagtgtttccttattaaaattcttaaaataatttaacaatctaactgacggagcccaattttggtgtaaatctaattgggacattatattgttaaaatacaaacagtctcctaatataacagtatctgataatctatggggagacatccattgatattcaggggatgaatcattggcaacacccatttattgtacaaaaagccccaatttacaaacgaaagtccaggtttgatagagacaaacaattaactattttgtctctgtttttaacacctccacagtttttaatttctttagtaatgaaattattcacaatatcagtatcttctttatctaccagagattttactaacttgataaccttggctgtctcattcaatagggtagtaatatttgtatgtgtgatattgatatctttttgaattgtttcttttagaagtgattctttgatggtgccagcatacgaattacaataatgcagaaactcggttaacatgcaggaattatagtaagccaattccaattgttgcctgtgttgtattagagtgtcaatatgagcaatggtgtccttgcgtttctctgatagaatgcgagcagcgattttggcgttatcatttgacgatatttctggaatgacgaatcctgtttctactaactttttggtaggacaaagtgaaacaatcaagaagatagcttctcctcctatttgtggaagaaattgaactcctctagatgatctactgacgatagtatctccttgacagatattggaccgaattacagaagtacctggaatgtaaagccctgaaaccccctcattttttaagcagattgttgccgtaaatcctgcactgtgaccaagatagagagctcctttggtgaatccatctctatgtttcagtttaaccaagaaacagtcagctggtctaaaatttccatctctatctaatacagcatctaacttgatgtcaggaactatgaccggtttaatgttatatgtaacattgagtaaatccttaagttcataatcatcactgtcatcagttatgtacgatccaaacaatgtttctaccggcatagtggatacgaagatgctatccatcagaatgtttccctgattagtattttctatatagctattcttctttaaacgattttccaaatcagtaactatgttcatttttttaggagtaggacgcctagccagtatggaagaggattttctagatcctctcttcaacatctttgatctcgatggaatgcaaaaccccatagtgaaacaaccaacgataaaaataatattgtttttcactttttataattttaccatctgactcatggattcattaatatctttataagagctactaacgtataattctttataactgaactgagatatatacaccggatctatggtttccataattgagtaaatgaatgctcggcaataactaatggcaaatgtatagaacaacgaaattatactagagttgttaaagttaatattttctatgagctgttccaataaattatttgttgtaactgcgttcaagtcataaatcatcttgatactatccagtaaaccgtttttaagttctggaatattatcatcccattgtaaagcccctaattcgactatcgaatatcctgctctgatagcagtttcaatatcgacggacgtcaatactgtaataaaggtggtagtattgtcatcatcgtgataaactactggaatatggtcgttagtaggtacagtaactttacacaacgcgatatataactttccttttgtaccatttttaacgtagttgggacgtcctgcagggtattgttttgaagaaatgatatcgagaacagatttgatacgatatttgttggattcctgattattcactataatataatctagacagatagatgattcgataaatagagaaggtatatcgttggtaggataatacatccccattccagtattctcggatactctattgatgacactagttaagaacatgtcttctattctagaaaacgaaaacatcctacatggactcattaaaacttctaacgctcctgattgtgtctcgaatgcctcgtacaaggatttcaaggatgccatagattctttgaccaacgatttagaattgcgtttagcatctgatttttttattaaatcgaatggtcggctctctggtttgctaccccaatgataacaatagtcttgtaaagataaaccgcaagaaaatttatacgcatccatccaaataaccctagcaccatcggatgatattaatgtattattatagattttccatccacaattattgggccagtatactgttagcaacggtatatcgaatagattactcatgtaacctactagaatgatagttcgtgtactagtcataatatctttaatccaatctaaaaaatttaaaattagattttttacactgttaaagttaacaaaagtattacccgggtacgtggatatcatatatggcattggtccattatcagtaatagctccataaactgatacggcgatggtttttatatgtgtttgatctaacgaggaagaaattcgcgcccacaattcatctctagatatgtatttaatatcaaacggtaacacatcaatttcgggacgcgtatatgtttctaaatttttaatccaaatataatgatgacctatatgccctattatcatactgtcaactatagtacacctagggaacttacgatacatctgtttcctataatcgttaaattttacaaatctataacatgctaaaccttttgacgacagccattcattaatttctgatatggaatctgtattctcgataccgtatcgttctaaagccagtgctatatctccctgttcgtgggaacgctttcgtataatatcgatcaacggataatctgaagtttttggagaataatatgactcatgatctatttcgtccataaacaatctagacataggaattggaggcgatgatcttaattttgtgcaatgagtcgtcaatcctataacttctaatcttgtaatattcatcatcgacataatactatctatgttatcatcgtatattagtataccatgaccttcttcatttcgtgccaaaatgatatacagtcttaaatagttacgcaatatctcaatagtttcataattgttagctgttttcatcaaggtttgtatcctgtttaacatgatggcgttctataacgtctctattttctatttttaattttttaaatttttaacgatttactgtggctagatacccaatctctctcaaatatttttttagcctcgcttacaagctgtttatctatactattaaaactgacgaatccgtgattttggtaatgggttccgtcgaaatttgccgaagtgatatgaacatattcgtcgtcgactatcaacaattttgtattattctgaatagtgaaaaccttcacagatagatcattttgaacacacaacgcatctagacttttggcggttgccatagaatatacgtcgttcttatcccaattaccaactagaagtctgatcttaactcctctattaatggctgcttctataatggagttgtaaatgtcgggccaatagtagctattaccgtcgacacgtgtagtgggaactatggccaaatgttcaatatctatactagtcttagctgacctgagtttatcaataactacatcggtatctagatctctagaatatcccaataggtgttccggagaatcagtaaagaacactccacctataggattcttaatatgatacgcagtgctaactggcaaacaacaagccgcagagcataaattcaaccatgaattttttgcgctattaaaggctttaaaagtatcaaatcttctacgaagatctgtggccagcgggggataatcagaatatacacctaacgttttaatcgtatgtatagatcctccagtaaatgacgcgtttcctacataacatctttcatcatctgacacccaaaaacaaccgagtagtagtcccacattattttttttatctatattaacggttataaaatttatatccgggcagtgactttgtagctctcccagatttcttttccctcgttcatctagcaaaactattattttaatccctttttcagatgcctcttttagtttatcaaaaataagcgctcccctagtcgtactcagaggattacaacaaaaagatgctatgtatatatatttcttagctagagtgataatttcgttaaaacattcaaatgttgttaaatgatcggatctaaaatccatattttctggtagtgtttctaccagcctacattttgctcccgcaggtaccgatgcaaatggccacatttagttaacataaaaacttatacatcctgttctatcaacgattctagaatatcatcggctatatcgctaaaattttcatcaaagtcgacatcacaacctaactcagtcaatatattaagaagttccatgatgtcatcttcgtctatttctatatccgtatccattgtagattgttgaccgattatcgagtttaaatcattactaatactcaatccttcagaatacaatctgtgtttcattgtaaatttataggcggtgtatttaagttggtagattttcaattatgtattaatatagcaacagtagttcttgctcctccttgattctagcatcctcttcattattttcttctacgtacataaacatgtccaatacgttagacaacacaccgacgatggcggccgctacagacacgaatatgactaaaccgatgaccatttaaaaacccctctctagctttcacttaaactgtatcgatcattcttttagcacatgtataatataaaaacattattctatttcgaatttaggcttccaaaaatttttcatccgtaaaccgataataatatatatagacttgttaatagtcggaataaatagattaatgcttaaactatcatcatctccacgattagagatacaatatttacattctttttgctgtttcgaaactttatcaatacacgttaatacaaacccaggaaggagatattgaaactgaggctgttgaaaatgaaacggtgaatacaataattcagataatgtaaaatcatgattccgtattctgatgatattagaactgctaatggatgtcgatggtatgtatctaggagtatctattttaacaaagcatcgatttgctaatatacaattatccttttgattaattgttattttattcatattcttaaaaggtttcatatttatcaattcttctacattaaaaatttccatttttaatttatgtagccccgcaatactcctcattacgtttcattttttgtctataatatccattttgttcatctcggtacatagattatccaattgagaagcgcatttagtagttttgtacattttaagtttattgacgaatcgtcgaaaactagttatagttaacattttattatttgataccctgatattaatacccctgccgttactattatttataactgatgtaatccacgtaacattagaattaattatcgatagtaatgcatcgacgcttccaaaattgtctattataaactcaccgataatttttttattacatgttttcatattcattaggattatcaaatctttaatcttattacgattgtatgcgttgatattgcaagacgtcattctaaaagacggaggatctccatcaaatgccaaacaatcacgtacaaagtacatggaaataggttttgttctattgcgcatcatagatttatatagaacacccgtagaaatactaatttgttttactctataaaatactaatgcatctatttcatcgttttgtataacgtctttccaagtgtcaaattccaaatttttttcattgatagtaccaaattcttctatctctttaactacttgcatagataggtaattacagtgatgcctacatgccgttttttgaaactgaatagatgcgtctagaagcgatgctacgctagtcacaatcaccactttcatatttagaatatatgtatgtaaaaatatagtagaatttcattttgttttttctatgctataaatgaattctcattttgcatctgctcatactccgttttatatcaataccaaagaaggaagatatctggttctaaaagccgttaaagtatgcgatgttagaactgtagaatgcgaaggaagtaaagcttcctgcgtactcaaagtagataaaccctcatcgcccgcgtgtgagagaagaccttcgtccccgtccagatgcgagagaatgaataaccctggaaaacaagttccgtttatgagaacggacatgctacaaaatatgttcgcggctaatcgcgacaacgtggcgtcgagacttttgtcctaaaatacaattatatctttttcgatattaataaatccgtgtcgtccaggttttttatctctttcagtatgtgaatagataggtattttatctctattcatcatcgaatttaagagatccgataaacattgtttgtattctccagatgtcagcatctgatacaacaatatatgtgcacataaacctctggcacttatttcatgtaccttccccttatcactaaggagaatagtatttgagaaatatgtatacatgatattatcatgaattagatatacagaatttgtaacactctcgaaatcacacgatgtgtcggcgttaagatctaatatatcactcgataacacattttcatctagatacactagacattttttaaagctaaaatagtctttagtagtaacagtaactatgcgattattttcatcgatgatacatttcatcggcatattattacgcgtaccatcaaagactataccatgtgtatatctaacgtattctagcatggttgccatacgcgcattaaacttttcaggatctttggatagatcttccaatctatctatttgagaaaacatttttatcatgttcaatagttgaaacgtcggatccactatatagatattatctataaagattttaggaactacgttcatggtatcctggcgaatattaaaactatcaatgatatgattatcgttttcatcttttatcaccatatagtttctaagatatgggattttacttaatataatattatttcccgtgataaattttattagaaaggccaaatctataagaaaagtcctagaattagtctgaagaatatctatatcgccgtatagtatatttggattaattagatatagagaatatgatccgtaacatatacaacttttattatggcgtctaagatattcttccatcaacttattaacatttttgactagggaagatacattatgacgtcccattacttttgccttgtctattactgcgacgttcatagaatttagcatatctcttgccaattcttccattgatgttacattataagaaattttagatgaaattacatttggagctttaatagtaagaactcctaatatgtccgtgtatgtggtcactaatacagattgtagttctataatcgtaaataatttacctatattatatgtttgagtctgtttagaaaagtagctaagtatacgatcttttatttctgatgcagatgtattaacatcggaaaaaaatctttttttattcttttttactaaagatacaaatatgtctttgttaaaaacagttattttctgaatatttctagcttgtaattttaacatatgatattcgttcacactaggtactctgcctaaataggtttctataatctttaatgtaatattaggaaaagtattctgatcaggattcctattcattttgaggatttaaaactctgattattgtctaatatggtctctacgcaaactttttcacagagcgatagagtttttgataactcgtttttcttaagaaatataaaactactgtttccagagctcgctctatcttttattttatctaattcgatacaaactcctgatactggttcagaaagtaattcattaattttcagtcctttatagaagatatttaatatagataatacaaaattttcagttcttgatatcgatctgattgatcctagaactagatatattaataacgtgctcattaggcagtttatggcagcttgataattagatatagtatattccagttcatatttattagataccgcattgcccagattttgatattctatgaattcctctgaaaataaatccaaaataactagacattctattttttgtggattagtgtactctcttccctctatcatgttcactactggtgtccacgatgataaatatctagagggaatataatatagtccataggatgccaatctagcaatgtcgaataactgtaatttgattcttcgttcttcattatgaattgattcttgaggtataaacctaacacaaattatattattagacttttcgtatgtaatgtctttcatgttataagtttttaatcctggaatagaatctattttaatgaggcttttaaacgcagagttctccaacgagtcaaagcataatactctgttgtttttcttatatacgatgttacgattttcttctttgaatggaataggtttttgaattagtttataattacaacataatagataaggaagtgtgcaaatagtacgcggaaaaaacataatagctcccctgttttcatccatggttttaagtaaatgatcactggcttctttagtcaatggatattcgaacattaaccgtttcatcatcattggacagaatccatatttcttaatgtaaagagtgatcaaatcattgtgtttattgtaccatcttgttgtaaatgtgtattcggttatcggatctgctcctttttctattaaagtatcgatgtcaatctcgtctaagaattcaactatatcgacatatttcatttgtatacacataaccattactaacgtagaatgtataggaagagatgtaacgggaacagggtttgttgattcgcaaactattctaatacataattcttctgttaatacgtcttgcacgtaatctattatagatgccaagatatctatataattattttgtaagatgatgttaactatgtgatctatataagtagtgtaataattcatgtattttgatatatgttccaactctgtctttgtgatgtctagtttcgtaatatctatagcatcctcaaaaaatatattcgcatatattcccaagtcttcagttctatcttctaaaaaatcttcaacgtatggaatataataatctattttacctcttctgatatcattaatgatatagtttttgacactatcttctgtcaattgattcttattcactatatctaagaaacggatagcgtccctaggacgaactactgccattaatatctctattatagcttctggacataattcatctattataccagaattaatgggaactattccgtatctatctaacatagttttaagaaagtcagaatctaagacttgatgttcatatattggttcatacatgaaatgatctctattgatgatagtgactatttcattctctgaaaattggtaactcattctatatatgctttccttgttgatgaaggatagaatatactcaatagaatttgtaccaacaaactgttctcttatgaatcgtatatcatcatctgaaataatcatgtaaggcatacatttaacaattagagacttgtctcctgttatcaatatactattcttgtgataatttatgtgtgaggcaaatttgtccacgttctttaattttgttatagtagatatcaaatccaatggagctacagttcttggcttaaacagatatagtttttctggaacaaattctacaacattattataaaggactttgggtaaataagtgggatgaaatcctattttaattaatgcgatagccttgtcctcgtgcagatatccaaacgcttttgtgatagtatggcattcattgtctagaaacgctctacgaatatctgtgacagatatcatctttagagaatatactagtcgcgttaatagtactacaatttgtattttttaatctatctcaataaaaaaattaatatgtatgattcaatgtataactaaactactaactgttattgataactagaatcagaatctaatgatgacgtacccaagaagtttatctactgccaatttagctgcattatttttagcatctcgtttagattttccatctgccttatcgaatactcttccgtcgatatctacacaggcataaaatgtaggagagttactaggcccaactgattcaatacgaaaagaccaatctctcttagttatttggcagtactcattaataacggtgacagggttagcatctttccaatcaataatttttttagccggaataacatcatcaaaagacttatgatcctctctcattgatttttcgcgggatacatcatctattatgacgtcagccataacatcagcatccggcttatccgcctccgttgtcataaaccaacgaggaggaatatcgtcggagctgtacaccatagcactacgttgaagatcgtacagagctttattaacttctcgcttctccatattaagttgtctagttagttgtgcagcagtagctccttcgattccaatggttttaatagcctcacacacaatctctgcgttagaacgttcgtcgatatagattttagacatttttagagagaactaacacaaccagcaataaaactgaacctactttatcatttttttattcatcatcctctggtggttcgtcgttcctatcaaatgtagctctgattaacccgtcatctataggtgatgctggttctggagattctggaggagatggattattatctggaagaatctctgttatttccttgttttcatgtatcgattgcgttgtaacattaagattgcgaaatgctctaaatttgggaggcttaaagtgttgtttgcaatctctacacgcgtgtctaactagtggaggttcgtcagctgctctagtttgaatcatcatcggcgtagtattcctacttttacagttaggacacggtgtattgtatttctcgtcgagaacgttaaaataatcgttgtaactcacatcctttattttatctatattgtattctactcctttcttaatgcattttataccgaataagagatagcgaaggaattctttttcggtgccgctagtacccttaatcatatcacatagtgttttatattccaaatttgtggcaatagacggtttatttctatacgatagtttgtttctggaatcctttgagtattctataccaatattattctttgattcgaatttagtttcttcgatattagattttgtattacctatattcttgatgtagtactttgatgatttttccatggcccattctattaagtcttccaagttggcatcatccacatattgtgatagtaattctcggatatcagtagcggctaccgccattgatgtttgttcattggatgagtaactactaatgtatacattttccatttataacacttatgtattaactttgttcatttatattttttcattattatgttgatattaacaaaagtgaatatatatatatgttaataattgtattgtggttatacggctacaattttataatgagtgaaagtcagtgtccgatgatcaatgacgatagctttactctgaaaagaaagtatcaaatcgatagtgcggagtcaacaataaaaatggataagaagaggataaagtttcagaatagagccaaaatggtaaaagaaataaatcagacaataagagcagcacaaactcattacgagacattgaaactaggatacataaaatttaagagaatgattaggactactactctagaagatatagcaccatctattccaaataatcagaaaacttataaactattctcggacatttcagccatcggcaaagcatcacagaatccgagtaagatggtatatgctctgctgctttacatgtttcccaatttgtttggagatgatcatagattcattcgttatagaatgcatccaatgagtaaaatcaaacacaagatcttctctcctttcaaacttaatcttattagaatattagtggaagaaagattctataataatgaatgcagatctaataaatggaaaataattggaacacaagttgataaaatgttgatagctgaatctgataaatatacaatagatgcaaggtataacctaaaacccatgtatagaatcaagggagaatctgaagaagataccctcttcatcaaacagatggtagaacaatgtgtgacatcccaggaattggtggaaaaagtgttgaagatactgtttagagatttgttcaagagtggagaatacaaagcgtacagatacgatgatgatgtagaaaatggattcattggattggatacactaaaattaaacattgttcatgatatagttgaaccatgtatgcctgttcgtaggccagtggctaagatactgtgtaaagaaatggtaaataaatactttgagaatccgctacatattattggtaagaatcttcaagagtgcattgactttgttagtgaataggcatttcatctttctccaatactaattcaaattgttaaattaataatggatagtataaatagtaaaaataattattagaataagagtgtagtatcatagataactctcttctataaaaatggattttattcgtagaaagtatcttatatacacagtagaaaataatatagattttttaaaggatgatacattaagtaaagtaaacaattttaccctcaatcatgtactagctctcaagtatctagttagcaattttcctcaacacgttattactaaggatgtattagctaataccaatttttttgttttcatacatatggtacgatgttgtaaagtgtacgaagcggttttacgacacgcatttgatgcacccacgttgtacgttaaagcattgactaagaattatttatcgtttagtaacgcaatacaatcgtacaaggaaaccgtgcataaactaacacaagatgaaaaatttttagaggttgccgaatacatggacgaattaggagaacttataggcgtaaattatgacttagttcttaatccattatttcacggaggggaacccatcaaagatatggaaatcatttttttaaaactgtttaagaaaacagacttcaaagttgttaaaaaattaagtgttataagattacttatttgggcatacctaagcaagaaagatacaggcatagagtttgcggataatgatagacaagatatatacactctatttcaacaaactggtagaatcgtccatagcaatctaacagaaacgtttagagattatatctttcccggagataagactagctattgggtgtggttaaacgaaagtatagctaatgatgcggatatcgttcttaatagacccgccattaccatgtatgataaaattcttagttatatatactctgagataaaacaaggacgcgttaataaaaacatgcttaagttagtttatatctttgagcctgaaaaagatatcagagaacttctgctagaaatcatatatgatattcctggagatatcctatctattattgatgcaaaaaacgacgattggaaaaaatattttattagtttttataaagctaattttattaacggtaatacatttattagtgatagaacgtttaacgaggacttattcagagttgttgttcaaatagatcccgaatatttcgataatgaacgaattatgtctttattctctacgagtgctgcggacattaaacgatttgatgagttagatattaataacagttatatatctaatataatttatgaggtgaacgatatcacattagatacaatggatgatatgaagaagtgtcaaatctttaacgaggatacgtcgtattatgttaaggaatacaatacatacctgtttttgcacgagtcggatcccatggtcatagagaacggaatactaaagaaactgtcatctataaaatccaagagtagacggctgaacttgtttagcaaaaacattttaaaatattatttagacggacaattggctcgtctaggtcttgtgttagatgattataaaggagacttgttagttaaaatgataaaccatcttaagtctgtggaggatgtatccgcattcgttcgattttctacagataaaaaccctagtattcttccatcgctaatcaaaactattttagctagttataatatttccatcatcgtcttatttcaaaggtttttgagagataatctatatcatgtagaagaattcttggataaaagcatccatctaaccaagacggataagaaatatatacttcaattgataagacacggtagatcatagaacagaccaaatatattattaataatttgtatatacatagatataattatcacatatttttgataaatgggaactgctgcaacaattcagactcccaccaaattaatgaataaagaaaatgcagaaatgattttggaaaaaattgttgatcatatagttatgtatattagtgacgaatcaagtgattcagaaaataatcctgaatatattgattttcgtaacagatacgaagactatagatctctcattataaaaagtgatcacgagtttgtaaagctatgtaaaaatcatgcggagaaaagttctccagaaacgcaacaaatgattatcaaacacatatacgaacaatatcttattccagtatctgaagtactattaaaacctataatgtccatgggtgacataattacatataacggatgtaaagacaatgaatggatgctagaacaactctctaccctaaactttaacaatctccgcacatggaactcatgtagcataggcaatgtaacgcgtctgttttatacattttttagttatctgatgaaagataaactaaatatataagtataatcccattctaatactttaacctgatgtattagcatcttattagaatattaacctaactaaaagacataacataaaaactcattacatagttgataaaaagcggtaggatataaatattatggctgccaccgttccgcgttttgacgacgtgtacaaaaatgcacaaagaagaattctagatcaagaaacattttttagtagaggtctaagtagaccgttaatgaaaaacacatatctatttgataattacgcgtatggatggataccagaaactgcaatttggagtagtagatacgcaaacttagatgcaagtgactattatcccatttcgttgggattacttaaaaagttcgagtttctcatgtctctatataaaggtcctattccagtatacgaagaaaaagtaaatactgaattcattgctaatggatctttctccggtagatacgtatcatatcttagaaagttttctgctcttccaacaaacgagtttattagttttttgttactgacttccattccaatctataatatcttgttctggtttaaaaatactcagtttgatattactaaacacacattattcagatacgtctatacagataatgccaaacacctggcgttggctaggtatatgtatcaaacaggagactataagcctttgtttagtcgtctcaaagagaattatatatttaccggtcccgttccaatatgtatcaaagatatagatcaccctaatcttagtagagcaagaagtccatccgattatgagacattagctaatattagtactatattgtactttaccaagtatgatccggtattaatgtttttattgttttacgtacctgggtattcaattactacaaaaattactccagccgtagaatatctaatggataaactgaatctaacaaagagcgacgtacaactgttgtaaattattttatgcttcgtaaaatgtaggttttgaaccaaacattctttcaaagaatgagatgcataaaactttattatccaatagattgactatttcggacgtcaatcgtttaaagtaaacttcgtaaaatattctttgatcactgccgagtttaaaacttctatcgataattgtttcatatgttttaatatttacaagttttttggtccatggtccattaggacaaatatatgcaaaataatatcgttctccaagttctatagtctctggattatttttattatattcagtaaccaaatacatattagggttatctgcggatttataatttgagtgatgcattcgactcaacataaataattctagaggagacgatctactatcaaattcggatcgtaaatctgtttctaaagaacggagaatatctatacatacctgattagaattcatccgtccttcagacaacatctcagacagtctggtcttgtatgtcttaatcatattcttatgaaacttggaaacatctcttctagtttcactagtacctttattaattctctcaggtacagattttgaattcgacgatgccgagtatttcatcgttgtatatttcttcttcgattgcataatcagattcttatataccgcctcaaactctattttaaaattattaaacaatactctattattaatcagtcgttctaactctttcgctatttctatagacttatctacatcttgactgtctatctctgtaaacacggagtcggtatctccatacacgctacgaaaacgaaatctgtaatctataggcaacgatgttttcacaatcggattaatatctctatcgtccatataaaatggattacttaatggattggcaaaccgtaacataccgttagataactctgctccatttagtaccgattctagatacaagatcattctacgtcctatggatgtgcaactcttagccgaagcgtatgagtatagagcactatttctaaatcccatcagaccatatactgagttggctactatcttgtacgtatattgcatggaatcatagatggccttttcagttgaactggtagcctgttttagcatctttttatatctggctctctctgccaaaaatgttcttaatagtctaggaatggttccttctatcgatctatcgaaaattgctatttcagagatgaggttcggtagtctaggttcacaatgaaccgtaatatatctaggaggtggatatttctgaagcaatagctgattatttatttcttcttccaatctattggtactaacaacgacaccgactaatgtttccggagatagatttccaaagatacacacattaggatacagactgttataatcaaagattaatacattattactaaacattttttgttttggagcaaataccttaccgccttcataaggaaacttttgttttgtttctgatctaactaagatagttttagtttccaacaatagctttaacagtggacccttgatgactgtactcgctctatattcgaataccatggattgaggaagcacatatgttgacgcacccgcgtctgtttttgtttctactccataatactcccacaaatactgacacaaacaagcatcatgaatacagtatctagccatatctaaagctatgtttagattataatccttatacatctgagctaaatcaacgtcatcctttccgaaagataatttatatgtatcattaggtaaagtaggacataatagtacgactttaaatccattttcccaaatatctttacgaattactttacatataatatcctcatcaacagtcacataattacctgtggttaaaacctttgcaaatgcagcggctttgcctttcgcgtctgtagtatcgtcaccgatgaacgtcatttctctaactcctctatttaatactttacccatgcaactgaacgcgttcttggatatagaatccaatttgtacgaatccaatttttcaaatttttgaatgaatgaatatagatcgaaaaatatagttccattattgttattaacgtgaaacgtagtattggccatgccgcctactcccttatgactagactgatttctctcataaatacagagatgtacagcttcctttttgtccggagatctaaagataatcttctctcctgttaataactctagacgattagtaatatatctcagatcaaagttatgtccgttaaaggtaacgacgtagtcgaacgttagttccaacaattgtttagctattcgtaacaaaactatttcagaacataaaactagttctcgttcgtaatccatttccattagtgactgtatcctcaaacatcctctatcgacggcttcttgtatttcctgttccgttaacatctcttcattaatgagcgtaaacaataatcgtttaccacttaaatcgatataacagtaacttgtatgcgagattgggttaataaatacagaaggaaacttcttatcgaagtgacactctatatctagaaataagtacgatcttgggatatcgaatctaggtatttttttagcgaaacagttacgtggatcgtcacaatgataacatccattgttaatctttgtcaaatattgctcgtccaacgagtaacatccgtctggagatatcccgttagaaatataaaaccaactaatattgagaaattcatccatggtggcattttgtatgctgcgtttctttggctcttctatcaaccacatatctgcgacggagcattttctatctttaatatctagattataacttattgtctcgtcaatgtctatagttctcatctttcccaacggcctcgcattaaatggaggaggagacaatgactgatatatttcgtccgtcactacgtaataaaagtaatgaggaaatcgtataaatacggtctcaccatttcgacatctggatttcagatataaaaatctgttttcaccgtgactttcaaaccaattaatgcaccgaacatccatttatagaatttagaaatatattttcatttaaatgaatcccaaacattggggaagagccgtatggaccattatttttatagtactttcgcaagcgggtttagacggcaacatagaagcgtgtaaacgaaaactatatactatagttagcactcttccatgtcctgcatgtagacggcacgcgactatcgctatagaggacaataatgtcatgtctagcgatgatctgaattatatttattattttttcatcagattatttaacaatttggcatctgatcccaaatacgcgatcgatgtgacaaaggttaaccctttataaacttaacccattataaaacttatgattagtcacgactgaaataaccgcgtgattattttttggtataattctacacggcatggtttctgtgactatgaattcaacccccgttacattagtgaaatctttaacaaacagcaagggttcgtcaaagacataaaactcattgtttacgatcgaaatagaccccctatcacacttaaaataaaaaatatccttatcctttaccaccaaataaaattctgattggtcaatgtgaatgtattcacttaacagttccacaaatttatttattaactccgaggcacatacatcgtcggtattttttatggcaaactttactcttccagcatccgtttctaaaaaaatattaacgagttccatttatatcatccaatattattgaaatgacgttgatggacagatgatacaaataagaaggtacggtacctttgtccaccatctcctccaattcatgctctattttgtcattaactttaatgtatgaaaacagtacgccacatgcttccatgacagtgtgtaacactttggatacaaaatgtttgacattagtataattgtccaagactgtcaatctataatagatagtagctataatatattctatgatggtattgaagaagatgacaaccttggcatattgatcatttaacacagacatggtatcaacagatagcttgaatgaaagagaatcagtaattggaataagcgtcttctcgatagagtgtccgtataccaacatgtctgatattttgatgtattccattaaattatttagttttttctttttattttcgttaaacagcatttctgtcaacggaccccaacatcgttgaccgattaagttttgattgatttttccgtgtaatgcgtatctagtcagatcgtatagcctatccaataatccatcgtctgtgtgtagatcacatcgtacactttttaattctctatagaagagcgacagacatctggagcaattacagacagcaatttctttattctctacagatgtaagatacttgaagacattcctatgatgatgcagaattttggataacacggtattgatggtatctgttaccataattcctttgatggctgatagtgtcagagcacaagatttccaatctttgacaatttttagcaccattatctttgttttgatatctatatcagacagcatggtgcgtctgacaacacagggattaagacggaaagatgaaatgattctctcaacatcttcaatagataccttgctattttttctggcattatctatatgtgcgagaatatcctctagagaatcagtatcctttttgatgatagtggatctcaatgacatgggacgtctaaaccttcttattctatcaccagattgcatggtgatttgtcttctttcttttatcataatgtaatctctaaattcatcggcaaattgtctatatctaaaatcataatatgagatgtttacctctacaaatatctgttcgtccaatgttagagtatttacatcagttttgtattccaaattaaacatggcaacggatttaattttatattcctctattaagtcctcgtcgataataacagaatgtagataatcatttaatccatcgtacatggttggaagatgcttgttgacaaaatctttaattgtcttgatgaaggtgggactatatctaacatcttgattaataaaatttataacattgtccataggatactttgtaactagttttatacacatctcttcatcggtaagtttagacagaatatcgtgaacaggtggtatattatattcatcagatatacgaagaacaatgtccaaatctatattgtttaatatattatatagatgtagcgtagctcctacaggaatatctttaactaagtcaatgatttcatcaaccgttagatctattttaaagttaatcatataggcattgatttttaaaaggtatgtagccttgactacattctcattaattaaccattccaagtcactgtgtgtaagaagattatattctatcataagcttgactacatttggtcccgataccattaaagaattcttatgatataaggaaacagcttttaggtactcatctactctacaagaattttggagagccttaacgatatcagtgacgtttattatttcaggaggaaaaaacctaacattgagaatatcggaattaatagcttccagatacagtgattttggcaatagtccgtgtaatccataatccagtaacacgagctggtgcttgctagacaccttttcaatgtttaatttttttgaaataagctttgataaagccttcctcgcaaattccggatacatgaacatgtcggcgacatgattaagtattgttttttcattattttctcaataccccaatagatgatagaatatcacccaatgcgtccatgttgtctatttccaacaggtcgctatatccaccaatagaagtttttccaaaaaagattctaggaacagttctaccaccagtaatttgttcaaaatagtcacgcaattcattttcgggtttaaattctttaatatcgacaatttcatacgctcctcttttgaaactaaacttatttagaatatccagtgcatttctacaaaaaggacatgtatacttgacaaaaattgtcactttgttattggccaacctttgttgtacaaattcctcggccattttaatatttaagtgatataaaactatctcgacttatttaactctttagtcgagatatatggacgcagatagctatatgatagccaactacagaaggcaaacgctataaaaaacataattacgacgagcatatttataaatatttttattcagcattacttgatatagtaatattaggcacagtcaaacattcaaccactctcgatacattaactctctcattttctttaacaaattctgcaatatcttcgtaaaaagattcttgaaactttttagaatatctatcgactctagatgaaatagcgttcgtcaacatactatgttttgtatacataaaggcgcccattttaacagtttctagtgacaaaatgctagcgatcctaggatcctttagaatcacatagattgacgattcgtctctcttagtaactctagtaaaataatcatacaatctagtacgcgaaataatattatccttgacttgaggagatctaaacaatctagttttgagaacatcgataagttcatcgggaatgacatacatactatctttaatagaactcttttcatccagttgaatggattcgtccttaaccaactgattaatgagatcttctattttatcattttccagatgatatgtatgtccattaaagttaaattgtgtagcgcttctttttagtctagcagccaatactttaacatcactaatatcgatatacaaaggagatgatttatctatggtattaagaattcgtttttcgacatctgtcaaaaccaattcctttttgcctgtatcatccagttttccatcctttgtaaagaaattattttctactagactattaataagactgataaggattcctccataattgcacaatccaaactttttcacaaaactagactttacaagatctacaggaatgcgtacttcaggttttttagcttgtgattttttcttttgcggacattttcttgtgaccaactcatctaccatttcattgattttagcagtgaaataagctttcaatgcacgggcactgatactattgaaaacgagttgatcttcaaattccgccatttaagttcaccaaacaacttttaaatacaaatatatcaatagtagtagaataagaactataaaaaaaataataattaaccaataccaaccccaacaaccggtattattagttgatgtgactgttttctcatcacttagaacagatttaacaatttctataaagtctgtcaaatcatcttccggagaccccataaatacaccaaatatagcggcgtacaacttatccatttatacattgaatattggcttttctttatcgctatcttcatcatattcatcatcaatatcaacaagtcccagattacgagccagatcttcttctacattttcagtcattgatacacgttcactatctccagagagtccgataacgttagccaccacttctctatcaatgattagtttcttgagcgcgaaagtaatttttgtttccgttccggatctatagaagacgataggtgtgataattgccttggccaattgtctttctcttttactgagtgattctagttcaccttctatagatctgagaatggatgattctccagtcgaaacatattctaccatggatccgtttaatttgttgatgaagatggattcatccttaaatgttttctctgtaatagtttccaccgaaagactatgcaaagaatttggaatgcgttccttgtgcttaatgtttccatagacggcttctagaagttgatacaacataggactagccgcggtaacttttatttttagaaagtatccatcgcttctatcttgtttagatttatttttataaagtttagtctctccttccaacataataaaagtggaagtcatttgactagataaactatcagtaagttttatagagatagacgaacaattagcgtattgagaagcatttagtgtaacgtattcgatacattttgcattagatttactaatcgattttgcatactctataacacccgcacaagtctgtagagaatcgctagatgcagtaggtcttggtgaagtttcaactctcttcttgattaccttactcatgattaaacctaaataattgtactttgtaatataatgatatatattttcactttatctcatttgagaataaaaatgtttttgtttaaccactgcatgatgtacagatttcggaatcgcaaaccaccagtggttttattttatccttgtccaatgtgaattgaatgggagcggatgcgggtttcgtacgtagatagtacattcccgtttttagaccgagactccatccgtaaaaatgcatactcgttagtttggaataactcggatctgctatatggatattcatagattgactttgatcgatgaaggctcccctgtctgcagccatttttatgatcgtcttttgtggaatttcccaaatagttttataaactcgcttaatatcttctggaaggtttgtattctgaatggatccaccatctgccataatcctattcttgatctcatcattccataattttctctcggttaaaactctaaggagatgcggattaactacttgaaattctccagacaatactctccgagtgtaaatattactggtatacggttccaccgactcattatttcccaaaatttgagcagttgatgcagtcggcataggtgccaccaataaactatttctaagaccgtatgttctgattttatcttttagaggttcccaattccaaagatccgacggtacaacattccaaagatcatattgtagaataccgttactggcgtacgatcctacatatgtatcgtatggtccttccttctcagctagttcacaactcgcctctaatgcaccgtaataaatggtttcgaagatcttcttatttagatcttgtgcttccaggctatcaaatggataatttaagagaataaacgcgtccgctaatccttgaacaccaataccgataggtctatgtctcttattagagatttcagcttctggaataggataataattaatatctataattttattgagatttctgacaattactttgaccacatccttcagtttgagaaaatcaaatcgcccatctattacaaacatgttcaaggcaacagatgccagattacaaacggctacctcattagcatccgcatattgtattatctcagtgcaaagattactacacttgatagttcctaaattttgttgattactctttttgttacacgcatccttataaagaatgaatggagtaccagtttcaatctgagattctataatcgctttccagacgactcgagcctttattatagatttgtatctcctttctctttcgtatagtgtatacaatcgttcgaactcgtctccccaaacattgtccaatccaggacattcatccggacacatcaacgaccactctccgtcatccttcactcgtttcataaagagatcaggaatccaaagagctataaatagatctctggttctatgttcctcgtttcctgtattctttttaagatcgaggaacgccataatatcagaatgccacggttccaagtatatggccataactccaggccgtttgtttcctccctgatctatgtatctagcggtgttattataaactctcaacattggaataataccgtttgatataccattggtaccggagatatagcttccactggcacgaatattactaattgatagacctattccccctgccattttagagattaatgcgcatcgttttaacgtgtcatagataccctctatgctatcatcgatcatgttaagtagaaaacagctagacatttggtgacgactagttcccgcattaaataaggtaggagaagcgtgcgtaaaccatttttcagaaagtagattgtacgtctcaatagctgagtctatatcccattgatgaattcctactgcgacacgcattaacatgtgctgaggtctttcaacgatcttgttgtttattttcaacaagtaggatttttccaaagttttaaaaccaaaatagttgtatgaaaagtctcgttcgtaaataataaccgagttgagtttatccttatatttgttaactatatccatggtgatacttgaaataatcggagaatgtttcccatttttaggattaacatagttgaataaatcctccatcacttcactaaatagtttttttgtttccttgtgtagatttgatacggctattctggcggctagaatggcataatccggatgttgtgtagtacaagtggctgctatttcggctgccagagtgtccaattctaccgttgttactccattatatattccttgaataaccttcatagctattttaataggatctatatgatccgtgtttaagccataacataattttctaatacgagacgtgattttatcaaacatgacattttccttgtatccatttcgtttaatgacaaacatttttgttggtgtaataaaaaaattatttaacttttcattaatagggatttgacgtatgtagcgtacaaaatgatcgttcctggtatatagataaagagtcctatatatttgaaaatcgttacggctcgattaaactttaatgattgcatagtgaatatatcattaggatttaactccttgactatcatggcggcgccagaaattaccatcaaaagcattaatacagttatgccgatcgcagttaaaacggttatagcatccaccatttatatctaaaaattagatcaaagaatatgtgacaaagtcctagttgtatactgagaattgacgaaacaatgtttcttacatatttttttcttattagtaactgacttaatagtaggaactggaaagctagacttgattattctataagtatagatacccttccagataatgttctctttgataaaagttccagaaaatgtagaattttttaaaaagttatcttttgctattaccaagattgtgtttagacgcttattattaatatgagtgatgaaatccacaccgcctctagatatcgcctttatttccacattagatggtaaatccaatagtgaaactatctttttaggaatgtatggactcgcgtttagaggagtgaacgtcttgggcgtcggaaaggatgattcgtcaaacgaataaacaatttcacaaatggatgttaatgtattagtaggaaatttcttgacgctattggaattgaagattctaatggatgatgttctacctatttcatccgataacatgttaatttccgacaccaacggttttaatatttcgatgatatacggtagtctctctttcggacttatatagcttattccacaatacgagtcattatatactccaaaaaacaaaataactagtataaaatctgtatcgaatgggaaaaacgaaattatcgacataggtatagaatccggaacattgaacgtattaatacttaattctttttctgtggtaagtaccgataggttattgacattgtatggttttaaatattctataacttgagacttgatagatattagtgatgaattgaaaattatttttatcaccacgtgtgtttcaggatcatcgtcgacgcctgtcaaccaaccgaatggagtaaaataaatatcattaatatatgctctagatattagtatttttattaatcctttgattatcatcttctcgtaggcgaatgattccatgatcaagagtgatttgagaacatcctccggagtattaatgggcttagtaaacagtccatcgttgcaataataaaagttatccaagttaaaggatattatgcattcgtttaaagatatcacctcatctgacggagacaattttttggtaggttttagagactttgaagctacttgtttaacaaagttattcatcgtcgtctactattctatttaattttgtagttaatttatcacatatcacattaattgactttttggtccatttttccatacgtttatattcttttaatcctgcgttatccgtttccgttatatccagggatagatcttgcaagttaaatagaatgctcttaaataatgtcattttcttatccgctaaaaatttaaagaatgtataaacctttttcagagatttgaaactcttaggtggtgtcctagtacacaatatcataaacaaactaataaacattccacattcagattccaacagctgattaacttccacattaatacagcctattttcgctccaaatgtacattcgaaaaatctgaataaaacatcgatgtcacaatttgtattatccaatacagaatgtttgtgattcgtgttaaaaccatcggagaaggaatagaaataaaaattattatagtggtggaattcagttggaatattgcctccggagtcataaaaggatactaaacattgttttttatcataaattacacatttccaatgagacaaataacaaaatccaaacattacaaatctagaggtagaacttttaattttgtctttaagtatatacgataagatatgtttattcataaacgcgtcaaatttttcatgaatcgctaaggagtttaagaatctcatgtcaaattgtcctatataatccacttcggatccataagcaaactgagagactaagttcttaatacttcgattgctcatccaggctcctctctcaggctctattttcatcttgacgacctttggattttcaccagtatgtattcctttacgtgataaatcatcgattttcaaatccatttgtgagaagtctatcgccttagatactttttcccgtagtcgaggtttaaaaaaatacgctaacggtatactagtaggtaactcaaagacatcatatatagaatggtaacgcgtctttaactcgtcggttaactctttcttttgatcgagttcgtcgctactattgggtctgctcaggtgccccgactctactagttccaacatcataccgataggaatacaagacactttgccggcggttgtagatttatcatatttttccactacatatccgttacaatttgttaaaaatttagatacatctatattgctacataatccagctagtgaatatatatgacataataaattggtaaatcctagttctggtattttactaattactaaatctgtatatctttccatttatcatggaaaagaatttaccagatatcttcttttttccaaactgcgttaatgtattctcttacaaatattcacaagatgaattcagtaatatgagtaaaacggaacgtgatagtttctcattggccgtgtttccagttataaaacatagatggcataacgcacacgttgtaaaacataaaggaatatacaaagttagtacagaagcacgtggaaaaaaagtatctcctccatcactaggaaaacccgcacacataaacctaaccgcgaagcaatatatatacagtgaacacacaataagctttgaatgttatagttttctaaaatgtataacaaatacagaaatcaattcgttcgatgagtatatattaagaggactattagaagctggtaatagtttacagatattttccaattccgtaggtaaacgaacagatactataggtgtactagggaataagtatccatttagcaaaattccattggcctcattaactcctaaagcacaacgagagatattttcagcgtggatttctcatagacctgtagttttaactggaggaactggagtgggtaagacgtcacaggtacccaagttattgctttggtttaattatttatttggtggattctctactctagataaaatcactgactttcacgaaagaccagtcattctatctcttcctaggatagctttagttagattgcatagcaataccattttaaaatcattgggatttaaggtactagatggatctcctatttctttacggtacggatctataccggaagaattaataaacaaacaaccaaaaaaatatggaattgtattttctacccataagttatctctaacaaaactatttagttatggcactcttattatagacgaagttcatgagcatgatcaaataggagatattattatagcagtagcgagaaagcatcatacgaaaatagattctatgtttttaatgactgccacgttagaggatgacagggaacggctaaaagtatttttacctaatcccgcatttatacatattcctggagatacactgtttaaaattagcgaggtatttattcataataagataaatccatcttccagaatggcatacatagaagaagaaaagagaaatttagttactgctatacagatgtatactcctcctgatggatcatccggtatagtctttgtggcatccgttgcacagtgtcacgaatataaatcatatttagaaaaaagattaccgtatgatatgtatattattcatggtaaggtcttagatatagacgaaatattagaaaaagtgtattcatcacctaatgtatcgataattatttctactccttatttggaatccagcgttactatacgcaatgttacacacatttatgatatgggtagagtttttgtccccgctccttttggaggatcgcaacaatttatttctaaatctatgagagatcaacgaaaaggaagagtaggaagagttaatcctggtacatacgtctatttctatgatctgtcttatatgaagtctatacagcgaatagattcagaatttctacataattatatattgtacgctaataagtttaatctaacactccccgaagatttgtttataatccctacaaatttggatattctatggcgtacaaaggaatatatagactcgttcgatattagtacagaaacatggaataaattattatccaattattatatgaagatgatagagtatgctaaactttatgtactaagtcctattctcgctgaggagttggataactttgagaggacgggagaattaactagtattgtacgagaagccattttatctctaaatttacaaattaagattttaaattttaaacataaagatgatgatacgtatatacacttttgtaaaatattattcggtgtctataacggaacaaacgctactatatattatcatagacctctaacgggatatatgaatatgatttcagatactatatttgttcctgtagataataactaaaaatcaaactctaatgaccacatctttttttagagatgaaaaattttccacatctccttttgtagacacgactaaacattttgcagaaaaaagtttattagtgtttagataatcgtatacttcatcagtgtagatagtaaatgtgaacagataaaaggtattcttgctcaatagattggtaaattccatagaatatattaatcctttcttcttgagatcccacatcatttcaaccagagacgttttatccaatgatttacctcgtactataccacatacaaaactagattttgcagtgacgtcgtacctggtattcctaccaaacaaaattttacttttagttcttttagaaaattctaaggtagaatctctatttgccaatatgtcatctatggaattaccactagcaaaaaatgatagaaatatatattgatacatcgcagctggttttgatctactatactttaaaaacgaatcagattccataattgcctgtatatcatcagctgaaaaactatgttttacacgtattccttcggcatttctttttaatgatatatcttgtttagacaatgataaagttatcatgtccatgagagacgcgtctccgtatcgtataaatatttcattagatgttagacgcttcattaggggtatacttctataaggtttcttaatcagtccatcattggttgcgtcaagaactactatcggatgttgttgggtatctctagtgttacacatggccttactaaagtttgggtaaataactatgatatctctattaattatagatgcatatatttcattcgtcaaggatattagtatcgacttgctatcgtcattaatacgtgtaatgtaatcatataaatcatgcgatagccaaggaaaatttaaatagatgttcatcatataatcgtcgctataattcatattaatacgttgacattgactaatttgtaatatagcctcgccacgaagaaagctctcgtattcagtttcatcgataaaggataccgttaaatataactggttgccgatagtctcatagtctattaagtggtaagtttcgtacaaatacagaatccctaaaatattatctaatgttggattaatctttaccataactgtataaaatggagacggagtcataactattttaccgtttgtacttactggaatagatgaaggaataatctccggacatgctggtaaagacccaaatgtctgtttgaagaaatccaatgttccaggtcctaatctcttaacaaaaattacgatattcgatcccgatatcctttgcattctatttaccagcatatcacgaactatattaagattatctatcatgtctattctcccaccgttatataaatcgcctccgctaagaaacgttagtatatccatacaatggaatacttcatttctaaaatagtattcgttttctaattctttaatgtgaaatcgtatactagaaagggaaaaattatctttgagttttccgttagaaaagaaccacgaaactaatgttctgattgcgtccgattccgttgctgaattaatggatttacaccaaaaactcatataacttctagatgtagaagcattcgctaaaaaattagtagaatcaaaggatataagtagatgttccaacaagtgagcaattcccaagatttcatctatatcattctcgaatccgaaattagaaattcccaagtagatatcctttttcatccgatcgttgatgaaaatacgaactttattcggtaagacaatcatttactaaggagtaaaataggaagtaatgttcgtatgtcgttatcatcgtataaattaaaggtgtgttttttaccattaagtgacattataattttaccaatattggaattataatataggtgtatttgcgcactcgcgacggttgatgcatcggtaaatatagctgtatctaatgttctagtcggtatttcatcatttcgctgtctaataatagcgttttctctatctgtttccattacagctgcctgaagtttattggtcggataatatgtaaaataataagaaatacatacgaataacaaaaataaaataagatataataaagatgccatttagagatctaattttgtttaacttgtccaaattcctacttacagaagatgaggaatcgttggagatagtgtcttccttatgtagaggatttgaaatatcttataatgacttgataacttactttccagataggaaataccataaatatatttataaagtatttgaacatgtagatttatcggaggaattaagtatggaattccatgatacaactctgagagatttagtctatcttagattgtacaagtattccaagtgtatacggccgtgttataaattaggagataatctaaaaggcatagttgttataaaggacaggaatatttatattagggaagcaaatgatgacttgatagaatatctcctcaaggaatacactcctcagatttatacatattctaatgagcgcgtccccataactggttcaaaattaattctttgtggattttctcaagttacatttatggcgtatacaacgtcgcatataacaacaaataaaaaggtagatgttctcgtttccaaaaaatgtatagatgaactagtcgatccaataaattatcaaatacttcaaaatttatttgataaaggaagcggaacaataaacaaaatactcaggaagatattttattcggtaacaggtggccaaactccataggtagctttttctatttcggattttagaatttccaaattcaccagcgatttatcggttttggtgaaatccaaggatttattaatgtccacaaatgccatttgttttgtctgtggattgtatttgaaaatggaaacgatgtagttagatagatgcgctgcgaagtttcctattagggttccgcgcttcacgtcacccagcatacttgaatcaccatcctttaaaaaaaatgataagatatcaacatggagtatatcatactcggattttaattcttctactgcatcactgacattttcacaaatactacaatacggtttaccgaaaataatcagtacgttcttcatttatgggtatcaaaaacttaaaatcgttactgctggaaaataaatcactgacgatattagatgataatttatacaaagtatacaatggaatatttgtggatacaatgagtatttatatagccgtcgccaattgtgtcagaaacttagaagagttaactacggtattcataaaatacgtaaacggatgggtaaaaaagggagggcatgtaaccctttttatcgatagaggaagtataaaaattaaacaagacgttagagacaagagacgtaaatattctaaattaaccaaggacagaaaaatgttagaattagaaaagtgtacatccgaaatacaaaatgttaccggatttatggaagaagaaataaaggcagaaatgcaattaaaaatcgataaactcacatttcaaatatatttatctgattctgataacataaaaatatcattgaatgagatactaacacatttcaacaataatgagaatgttacattattttattgtgatgaacgagacgcagaattcgttatgtgtctcgaggctaaaacacatttctctaccacaggagaatggccgttgataataagtaccgatcaggatactatgctatttgcatctgctgataatcatcctaagatgataaaaaacttaactcaactgtttaaatttgttccctcggcagaggataactatttagcaaaattaacggcgttagtgaatggatgtgatttctttcctggactctatggggcatctataacacccaccaacttaaacaaaatacaattgtttagtgattttacaatcgataatatagtcactagtttggcaattaaaaattattatagaaagactaactctaccgtagacgtgcgtaatattgttacgtttataaacgattacgctaatttagacgatgtctactcgtatattcctccttgtcaatgcactgttcaagaatttatattttccgcattagatgaaaaatggaatgaatttaaatcatcttatttagaaagcgtgccgttaccctgccaattaatgtacgcgttagaaccacgcaaggagattgatgtttcagaagttaaaactttatcatcttatatagatttcgaaaatactaaatcagatatcgatgttataaaatctatatcctcgatcttcggatattctaacgaaaactgtaacacgatagtattcggcatctataaggataatttactactgagtataaataattcattttactttaacgatagtctgttaataaccaatactaaaagtgataatataataaatataggttactagattaaaaatggtgttccaactcgtgtgctctacatgcggtaaagatatttctcacgaacgatataaattgattatacgaaaaaaatcattaaaggatgtactcgtcagtgtaaagaacgaatgttgtaggttaaaattatctacacaaatagaacctcaacgtaacttaacagtgcaacctctattggatataaactaatatggatccggttaattttatcaagacatatgcgcctagaggttctattatttttattaattataccatgtcattaacaagtcatttgaatccatcgatagaaaaacatgtgggtatttattatggtacgttattatcggaacacttggtagttgaatctacctatagaaaaggagttcgaatagtcccattggatagtttttttgaaggatatcttagtgcaaaagtatacatgttagagaatattcaagttatgaaaatagcagctgatacgtcattaactttattgggtattccgtatggatttggtcataatagaatgtattgttttaaattggtagctgactgttataaaaatgccggtattgatacatcgtctaaacgaatattgggcaaagatatttttctgagccaaaacttcacagacgataatagatggataaagatatatgattctaataatttaacattttggcaaattgattaccttaaagggtgagttaatatgcataactactcctccgttgttttttccctcgttctttttcttaacgttgtttgccatcactctcataatgtaaagatattctaaaatggtaaacttttgcatatcggacgcagaaattggtataaatgttgtaattgtattatttcccgtcaatggactagtcacagctccatcagttttatatcctttagagtatttctcactcgtgtctaacattctagagcattccatgatctgtttatcgttgatattggccggaaagatagattttttattttttattatattactattggcaattgtagatataacttctggtaaatatttttctaccttttcaatctcttctattttcaagccggctatatattctgctatattgttgctagtatcaataccttttctggctaagaagtcatatgtggtattcactatatcagttttaactggtagttccattagcctttccacttctgcagaataatcagaaattggttctttaccagaaaatccagctactataataggctcaccgatgatcattggcaaaatcctatattgtaccagattaatgagagcatatttcatttccaataattctgctagttcttgagacattgatttatttgatgaatctagttggttctctagatactctaccatttctgccgcatacaataacttgttagataaaatcagggttatcaaagtgtttagcgtggctagaatagtgggcttgcatgtattaaagaatgcggtagtatgagtaaaccgttttaacgaattatatagtctccagaaatctgtggcgttacatacatgagccgaatgacatcgaagattgtccaatatttttaatagctgctctttgtccattatttctatatttgactcgcaacaattgtagataccattaatcaccgattcctttttcgatgccggacaatagcacaattgtttagctttggactctatgtattcagaattaatagatatatctctcaatacagattgcactatacattttgaaactatgtcaaaaattgtagaacgacgctgttctgcagccatttaactttaaataatttacaaaaatttaaaatgagcatccgtataaaaatcgataaactgcgccaaattgtggcatatttttcagagttcagtgaagaagtgtctataaatgtagactcgacggatgagttaatgtatatttttgccgccttgggcggatctgtaaacatttgggcaattatacctctaagtgcatcagtgttttaccgaggagccgaaaatattgtgtttaatcttcctgtgtccaaggtaaaatcgtgtttgtgtagttttcacaatgatgccatcatagatatagaacctgatctggaaaataatctagtaaaactttctagttatcatgtagtaagtgtcgattgtaacaaggaactgatgcctattaggacagatactactatttgtctaagtatagatcaaaagaaatcttacgtgtttaattttcacaagtatgaagaaaaatgttgtggtagaaccgtcattcatctagaatggttgttgggctttatcaagtgtattagtcagcatcagcatctggctattatgtttaaagatgacaatattattatgaagactcctggtaatactgatgcattttccagggaatattctatgactgaatgttctcaagaactacaaaagttttctttcaaaatagctatctcgtctctcaacaaactacgaggattcaaaaagagagtcaatgtttttgaaactagaatcgtaatggataatgacgataacattctaggaatgttgttttcggatagagttcaatcctttaagatcaacatctttatggcgtttttagattaatactttcaatgagataaatatgggtggcggagtaagtgttgagctccctaaacgggatccgcctccgggagtacccactgatgagatgttattaaacgtggataaaatgcatgacgtgatagctcccgctaagcttttagaatatgtgcatataggaccactagcaaaagataaagaggataaagtaaagaaaagatatccagagtttagattagtcaacacaggacccggtggtctttcggcattgttaagacaatcgtataatggaaccgcacccaattgctgtcgcacttttaatcgtactcattattggaagaaggatggaaagatatcagataagtatgaagagggtgcagtattagaatcgtgttggccagacgttcacgacactggaaaatgcgatgttgatttattcgactggtgtcagggggatacgttcgatagaaacatatgccatcagtggatcggttcagcctttaataggagtgatagaactgtagagggtcaacaatcgttaataaatctgtataataagatgcaaacattatgtagtaaagatgctagtgtaccaatatgcgaatcatttttgcatcatttacgcgcacacaatacagaagatagcaaagagatgatcgattatattctaagacaacagtctgcggactttaaacagaaatatatgagatgtagttatcccactagagataagttagaagagtcattaaaatatgcggaacctcgagaatgttgggatccagagtgttcgaatgccaatgttaatttcttactaacacgtaattataataatttaggactttgcaatattgtacgatgtaataccagcgtgaacaacttacagatggataaaacttcctcattaagattgtcatgtggattaagcaatagtgatagattttctactgttcccgtcaatagagcaaaagtagttcaacataatattaaacattcgttcgacctaaaattgcatttgatcagtttattatctcttttggtaatatggatactaattgtagctatttaaatgggtgccgcggcaagcatacagacgacggtgaatacactcagcgaacgtatctcgtctaaattagaacaagaagcgaacgctagtgctcaaacaaaatgtgatatagaaatcggaaatttttatatccgacaaaaccatggatgtaacctcactgttaaaaatatgtgctctgcggacgcggatgctcagttggatgctgtgttatcagccgctacagaaacatatagtggattaacaccggaacaaaaagcatacgtgccagctatatttactgctgcgttaaacattcagacgagtgtaaacactgttgttagagattttgaaaattatgtgaaacagacttgtaattctagcgcggtcgtcgataacaaattaaagatacaaaacgtaatcatagatgaatgttacggagccccaggatctccaacaaatttggaatttattaatacaggatctagcaaaggaaattgtgccattaaagcgttgatgcaattgacgactaaggccactactcaaatagcacctagacaagttgctggtacaggagttcagttttatatgattgttatcggtgttataatattggcagcgttgtttatgtactatgccaagcgtatgttgttcacatccaccaatgataaaatcaaacttattttagccaataaggaaaacgtccattggactacttacatggacacattctttagaacttctccgatggttattgctaccacggatatgcaaaactgaaaatatattgataatattttaatagattaacatggaagttatcgctgatcgtctagacgatatagtgaaacaaaatatagcggatgaaaaatttgtagattttgttatacacggtctagagcatcaatgtcctgctatacttcgaccattaattaggttgtttattgatatactattatttgttatagtaatttatatttttacggtacgtctagtaagtagaaattatcaaatgttgttggtggtgctagtcatcacattaactattttttattactttatactataatagtactagactgacttctaacaaacatctcacctgccataaataaatgcttgatattaaagtcttctatttctaacactattccatctgtggaaaataatactctgacattatcgctaattgacacatcggtgagtgatatgcctataaagtaataatcttctttgggcacatataccagtgtaccaggttctaacaacctatttactggtgctcctgtagcatactttttctttaccttgagaatatccatcgtttgcttggtcaatagcgatatgtgattttttatcaaccactcaaaaaagtaattggagtgttcatatcctctacgggctattgtctcatggccgtgtatgaaatttaagtaacacgactgtggtagatttgttctatagagccgattgccgcaaatagatagaactaccaatatgtctgtacaaatgttaaacattaattgattaacagaaaaaacaatgttcgttctgggaatagaaaccagatcaaaacaaaattcgttagaatatatgccacgtttatacatggaatataaaataactacagtttgaaaaataacagtatcatttaaacatttaacttgcggggttaatctcacaactttactgtttttgaactgttcaaaatatagcatcgatccgtgagaaatacgtttagccgcctttaatagaggaaatcccaccgcctttctggatctcaccaacgacgatagttctgaccagcaactcatttcttcatcatccacctgttttaacatataataggcaggagatagatatccgtcattgcaatattccttctcgtaggcacacaatctaatattgataaaatctccattctcttctctgcatttattatcttgtctcggtggctgattaggctgtggtcttggtttaggccttggtctatcgttgttgaatctattttggtcattaaatctttcatttcttcctggtatatttctatcacctcgtttggttggatttttgtctatattatcgtttgtaacatcggtacgggtattcatttatcacaaaaaaaacttctctaaatgagtctactgctagaaaacctcatcgaagaagataccatattttttgcaggaagtatatctgagtatgatgatttacaaatggttattgccggcgcaaaatccaaatttccaagatctatgctttctatttttaatatagtacctagaacgatgtcaaaatatgagttggagttgattcataacgaaaatatcacaggagcaatgtttaccacaatgtataatataagaaacaatttgggtctaggagatgataaactaactattgaagccattgaaaactatttcttggatcctaacaatgaagttatgcctcttattattaataatacggatatgactgccgtcattcctaaaaaaagtggtaggagaaagaataagaacatggttatcttccgtcaaggatcatcacctatcttgtgtattttcgaaactcgtaaaaagattaatatttataaagaaaatatggaatccgcgtcgactgagtatacacctatcggagacaacaaggctttaatatctaaatatgcgggaattaatgtcctgaatgtgtattctccttccacatccataagattgaatgccatttacggattcaccaataaaaataaactagagaaacttagtactaataaggaactagaatcgtatagttctagccctcttcaagaacccattaggttaaatgattttctgggactattggaatgtgttaaaaagaatattcctctaacagatattccgacaaaggattgattactataaatggagaatgttcctaatgtatactttaatcctgtgtttatagagcccacgtttaaacattctttattaagtgtttataaacacagattaatagttttatttgaagtattcgttgtattcattctaatatatgtattttttagatctgaattaaatatgttcttcatgcctaaacgaaaaatacccgatcctattgatagattacgacgtgctaatctagcgtgtgaagacgataaattaatgatctatggattaccatggatgacaactcaaacatctgcgttatcaataaatagtaaaccgatagtgtataaagattgtgcaaagcttttgcgatcaataaatggatcacaaccagtatctcttaacgatgttcttcgcagatgatgattcattttttaagtatttggctagtcaagatgatgaatcttcattatctgatatattgcaaatcactcaatatctagactttctgttattattattgatccaatcaaaaaataaattagaagctgtgggtcattgttatgaatctctttcagaggaatacagacaattgacaaaattcacagactttcaagattttaaaaaactgtttaacaaggtccctattgttacagatggaagggtcaaacttaataaaggatatttgttcgactttgtgattagtttgatgcgattcaaaaaagaatcctctctagctaccaccgcaatagatcctgttagatacatagatcctcgtcgtgatatcgcattttctaacgtgatggatatattaaagtcgaataaagtgaacaataattaattctttattgtcatcatgaacggcggacatattcagttgataatcggccccatgttttcaggtaaaagtacagaattaattagacgagttagacgttatcaaatagctcaatataaatgcgtgactataaaatattctaacgataatagatacggaacgggactatggacgcatgataagaataattttgaagcattggaagcaactaaactatgtgatgtcttggaatcaattacagatttctccgtgataggtatcgatgaaggacagttctttccagacattgtttaattctgtgagcgtatggcaaacgaaggaaaaatagttatagtagccgcactcgatgggacatttcaacgtaaaccgtttaataatattttgaatcttattccattatctgaaatggtggtaaaactaactgctgtgtgtatgaaatgctttaaggaggcttccttttctaaacgattgggtgaggaaaccgagatagagataataggaggtaatgatatgtatcaatcggtgtgtagaaagtgttacgtcggctcataatattatattttttatctaaaaaactaaaaataaacattgattaaattttaatataatacttaaaaatggatgttgtgtcgttagataaaccgtttatgtattttgaggaaattgataatgagttagattacgaaccagaaagtgcaaatgaggtcgcaaaaaaactgccgtatcaaggacagttaaaactattactaggagaattattttttcttagtaagttacagcgacacggtatattagatggtgccaccgtagtgtatataggatcggctcctggtacacatatacgttatttgagagatcatttctataatttaggagtgatcatcaaatggatgctaattgacggccgccatcatgatcctattttaaatggattgcgtgatgtaactctagtgactcggttcgttgatgaggaatatctacgatccatcaaaaaacaactgcatccttctaagattattttaatttctgatgtaagatccaaacgaggaggaaatgaacctagtacggcggatttactaagtaattacgctctacaaaatgtcatgattagtattttaaaccccgtggcatctagtcttaaatggagatgcccgtttccagatcaatggatcaaggacttttatatcccacacggtaataaaatgttacaaccttttgctccttcatattcagctgaaatgagattattaagtatttataccggtgagaacatgagactgactcgagttaccaaattagacgctgtaaattatgaaaaaaagatgtactaccttaataagatcgtccgtaacaaagtagttgttaactttgattatcctaatcaggaatatgactattttcacatgtactttatgctgaggaccgtgtactgcaataaaacatttcctactactaaagcaaaggtactatttctacaacaatctatatttcgtttcttaaatattccaacaacatcaactgaaaaagttagtcatgaaccaatacaacgtaaaatatctagcaaaaattctatgtctaaaaacagaaatagcaagagatccgtacgcggtaataaatagaaacgtactactgagatatactaccgatatagagtataatgatttagttactttaataaccgttagacataaaattgattctatgaaaactgtgtttcaggtatttaacgaatcatccataaattatactccggttgatgatgattatggagaaccaatcattataacatcgtatcttcaaaaaggtcataacaagtttcctgtaaattttctatacatagatgtggtaatatctgacttatttcctagctttgttagactagatactacagaaactaatatagttaatagtgtactacaaacaggcgatggtaaaaagactcttcgtcttcccaaaatgttagagacggaaatagttgtcaagattctctatcgccctaatataccattaaaaattgttagatttttccgcaataacatggtaactggagtagagatagccgatagatctgttatttcagtcgctgattaatcaattagtagagatgagataagaacattataataatcaataatatatcttatatcttatatcttatatcttatatcttgtttagaaaaatgctaatattaaaatagctaacgctagtaatccaatcggaagccatttgatatctataatagggtatctaatttcctgatttaaatagcggacagctatattctcggtagctactcgtttggaatcacaaacattatttacatctaatttactatctgtaatggaaacgtttcccaatgaaatggtacaatccgatacattgcattttgttatatttttttttaaagaggctggtaacaacgcatcgcttcgtttacatggctcgtaccaacaataatagggtaatcttgtatctattcctatccgtactatgcttttatcaggataaatacatttacatcgtatatcgtctttgttagcatcacagaatgcataaatttgttcgtccgtcatgataaaaatttaaagtgtaaatataactattatttttatagttgtaataaaaagggaaatttgattgtatactttcggttctttaaaagaaactgacttgataaaaatggctgtaatctctaaggttacgtatagtctatatgatcaaaaagagattaatgctacagatattatcattagtcatgttaaaaatgacgacgatatcggtaccgttaaagatggtagactaggtgctatggatggggcattatgtaagacttgtgggaaaacggaattggaatgtttcggtcactggggtaaagtaagtatttataaaactcatatagttaagcctgaatttatttcagaaattattcgtttactgaatcatatatgtattcactgcggattattgcgttcacgagaaccgtattccgacgatattaacctaaaagagttatcgggacacgctcttaggagattaaaggataaaatattatccaagaaaaagtcatgttggaacagtgaatgtatgcaaccgtatcaaaaaattactttttcaaagaaaaaggtttgtttcgtcaacaagttggatgatattaacgttcctaattctctcatctatcaaaagttaatttctattcatgaaaagttttggccattattagaaattcatcaatatccagctaacttattttatacagactactttcccatccctccgttgattattagaccggctattagtttttggatagatagtatacccaaagagaccaatgaattaacttacttattaggtatgatcgttaagaattgtaacttgaatgctgatgaacaggttatccagaaggcggtaatagaatacgatgatattaaaattatttctaataacactaccagtatcaatttatcatatattacatccggcaaaaataatatgattagaagttatatcgtcgcccgacgaaaagatcagaccgctagatctgtaattggtcccagtacatctatcaccgttaatgaggtaggaatgcccgcatatattagaaatacacttacagaaaagatatttgttaatgcctttacagtggataaagttaaacaactattagcgtcaaaccaagttaaattttactttaataaacgattaaaccaattaacaagaatacgccaaggaaagtttattaaaaataaaatacatttattgcctggtgattgggtagaagtagctgttcaagaatatacaagtattatttttggaagacagccgtctctacatagatacaacgtcatcgcttcatctatcagagctaccgaaggagatactatcaaaatatctcccggaattgccaactctcaaaatgctgatttcgacggggatgaggaatggatgatattagaacaaaatcctaaagctgtaattgaacaaagtattcttatgtatccgacgacgttactcaaacacgatattcatggagcccccgtttatggatctattcaagatgaaatcgtagcagcgtattcattgtttaggatacaagatctttgtttagatgaagtattgaacatcttggggaaatatggaagagagttcgatcctaaaggtaaatgtaaattcagcggtaaagatatctatacttacttgataggtgaaaagattaattatccgggtctcttaaaggatggtgaaattattgcaaacgacgtagatagtaattttgttgtggctatgaggcatctgtcattggctggactcttatccgatcataagtcgaacgtggaaggtatcaactttattatcaagtcatcttatgtttttaagagatatctatctatttacggttttggggtgacattcaaagatctgagaccaaattcgacgttcactaataaattggaggccatcaacgtagaaaaaatagaacttatcaaagaagcatacgccaaatatctcaacgatgtaagagacgggaaaatagttccattatctaaagctttagaggcggactatgtggaatccatgttatccaacttgacaaatcttaatatccgagagatagaagaacatatgagacaaacgctgatagatgatccagataataacctcctgaaaatggccaaagcgggttataaagtaaatcccacagaactaatgtatattctaggtacgtatggacaacaaaggattgatggtgaaccagcagagactcgagtattgggtagagttttaccttactatcttccagactctaaggatccagaaggaagaggttatattcttaattctttaacaaaaggattaacgggttctcaatattacttttcgatgctggttgcaagatctcaatctactgatatcgtctgtgaaacatcacgtaccggaacactggctagaaaaatcattaaaaagatggaggatatggtggtcgacggatacggacaagtagttataggtaatacgctcatcaagtacgccgccaattataccaaaattctaggctcagtatgtaaacctgtagatcttatctatccagatgagtccatgacttggtatttggaaattagtgctctgtggaataaaataaaacagggattcgtttactctcagaaacagaaacttgcaaagaagacattggcgccgtttaatttcctagtattcgtcaaacccaccactgaggataatgctattaaggttaaggatctgtacgatatgattcataacgtcattgatgatgtgagagagaaatacttctttacggtatctaatatagattttatggagtatatattcttgacgcatcttaatccttctagaattagaattacaaaagaaacggctatcactatctttgaaaagttctatgaaaaactcaattatactctaggtggtggaactcctattggaattatttctgcacaggtattgtctgagaagtttacacaacaagccctgtccagttttcacactactgaaaaaagtggtgccgtcaaacaaaaacttggtttcaacgagtttaataacttgactaatttgagtaagaataagaccgaaattatcactctggtatccgatgatatctctaaacttcaatctgttaagattaatttcgaatttgtatgtttgggagaattaaatccagacatcactcttcgaaaagaaacagataggtatgtagtagatataatagtcaatagattatacatcaagagagcagaaataaccgaattagtcgtcgaatatatgattgaacgatttatctcctttagcgtcattgtaaaggaatggggtatggagacattcattgaggacgaggataatattagatttactgtctatctaaatttcgttgaaccggaagaattgaatcttagtaagtttatgatggttcttccgggggcagccaacaagggaaagattagtaaattcaagattcctatctctgattatacgggttatgacgacttcaatcaaacaaaaaagctcaataagatgactgtagaactcatgaatctaaaagaattgggttctttcgatttggaaaacgtcaacgtgtatcctggagtatggaatacatacgatatcttcggtatcgaggccgctcgtgaatacttgtgcgaagccatgttaaacacctatggagaagggttcgattatctgtatcagccttgtgatcttctcgctagtttactatgtgctagttacgaaccagaatcagtgaataaattcaagttcggcgcagctagtactcttaagagagctacgttcggagacaataaagcattgttaaacgcggctcttcataaaaagtcagaacctattaacgataatagtagctgccacttttttagcaaggtccctaatataggaactggatattacaaatactttatcgacttgggtcttctcatgagaatggaaaggaaactatctgataagatatcttctcaaaagatcaaggaaatggaagaaacagaagacttttaattcttatcaataacatatttttctatgatctgtcttttaaacgatggattttccacaaatgcgcctctcaagtccctcatagaatgatacacgtataaaaaatatagcataggcaatgactccttatttttagacattagatatgccaaaatcatagccccgcttctatttactcccgcagcacaatgaaccaacacgggctcgtttcgttgatcacatttagataaaaaggcggttacgtcgtcaaaatatttactaatatcggtagttgtatcatctaccaacggtatatgaataatattaatattagagttaggtaatgtatatttatccatcgtcaaatttaaaacatatttgaacttaacttcagatgatggtgcatccatagcatttttataatttcccaaatacacattattggttacccttgtcattatagtgggagatttggctctgtgcatatctccagttgaacgtagtagtaagtatttatacaaacttttcttatccatttataacgtacaaatggataaaactactttatcggtaaacgcgtgtaatttagaatacgttagagaaaaggctatagtaggcgtacaagcagccaaaacatcaacacttatattctttgttattatattggcaattagtgcgctattactctggtttcagacgtctgataatccagtctttaatgaattaacgagatatatgcgaattaaaaatacggttaacgattggaaatcattaacggatagcaaaacaaaattagaaagtgatagaggtagacttctagccgctggtaaggatgatatattcgacttcaaatgtgtggatttcggcgcctattttatagctatgcgattggataagaaaacatatctgccgcaagctattaggcgaggtactggagacgcgtggatggttaaaaaggcggcaaaggtcgatccatctgctcaacaattttgtcagtatttgataaaacacaagtctaataatgttattacttgtggtaatgagatgttaaatgaattaggttatagcggttattttatgtcaccgcattggtgttccgattttagtaatatggaatagtgttagataaatgcggtaacgaatgttcctgtaaggaaccataacagcttagatttaacgttaaagatgagcataaacataataaacaaaattacaatcaaacctataacattaatatcaaacaatccaaaaaatgaaatcagtggagtagtaaacgcgtacataactcctggataacgtttagcagctgccgttcctattctagaccaaaaattcggtttcatgttttcgaaacggtattctgcaacaagtcgaggatcgtgttctacatatttggcggcgttatccagtatctgcctattgatcttcatttcgttttcgattctggctatttcaaaataaaatcccgatgatagacctccagactttataatttcatctacgatgttcagcgccgtagtaactctaataatataggctgataagctaacatcataccctcctgtatatgtgaatatggcatgatttttgtccattacaagctcggttttaactttattgcctgtaataatttctctcatctgtaggatatctatttttttgtcatgcattgccttcaagacgggacgaagaaacgtaatatcctcaataacgttatcgttttctacaataactacatattctacctttttattttctaactcggtaaaaaaattagaatcccatagggctaaatgtctagcgatatttcttttcgtttcctctgtacacatagtgttacaaaaccctgaaaagaagtgagtatacttgtcatcatttctaatgtttcctccagtccactgtataaacgcataatccttgtaatgatctggatcatccttgactaccacaacatttcttttttctggcataacttcgttgtcctttacatcatcgaacttctgatcattaatatgctcatgaacattaggaaatgtttctgatggaggtctatcaataactggcacaacaataacaggagttttcaccgccgccatttagttattgaaattaatcatatacaactctttaatacgagttatattttcgtctatccattgtttcacattgacatatttcgacaaaaagatataaaatgcgtattccaatgcttctctgtttaatgaattactaaaatatacaaacacgtcactgtctggcaataaatgatatcttagaatattgtaacaatttattttgtattgcacatgttcgtgatctatgagttcttcttcgaatggcataggatctccgaatctgaaaacgtataaataggagttagaataataatatttgagagtattggtaatatataaactctttagcggtataattagtttttttctctcaatttctatttttagatgtgatggaaaaatgactaattttgtagcattagtatcatgaactctaattaaaatcttaatatcttcgtcacacgttagctctttgaagtttttaagagatgcatcagttggttctacagatggagtaggtgcaacaattttttgttctacacatgtatgtactggagccattgttttaactataatggtgcttgtatcgaaaaactttaatgcagatagcggaagctcttcgccgcgactttctacgtcgtaattgggttctaacgccgatctctgaatggatactagttttctaagttctaatgtgattctctgaaaatgtaaatccaattcctccggcattatagatgtgtatacatcggtaaataaaactatagtatccaacgatcccttctcgcaaattctagtcttaaccaaaaaatcgtatataaccacggagatggcgtatttaagagtggattcttctaccgttttgttcttggatgtcatataggaaactataaagtccgcactactgttaagaatgattactaacgcaactatatagtttaaattaagcattttggaaacataaaataactctgtagacgatacttgactttcgaataagtttgcagacaaacgaagaaagaacagacctctcttaatttcagaagaaaactttttttcgtattcctgacgtctagagtttatatcaataagaaagttaagaattagtcggttaatgttgtatttcattacccaagtttgagatttcataatattatcaaaagacatgataatattaaagataaagcgctgactatgaacgaaatagctatatggttcgctcaagaatatagtcttgttaaacgtggaaacgataactgtatttttaatcacgtcagcggcatctaaattaaatataggtatatttattccacacactctacaatatgccacaccatcttcataataaataaattcgttagcaaaattattaattttagtgaaatagttagcgtcaactttcatagcttccttcaatctaatttgatgctcacacggtgcgaattccactctaacatcccttttccatgcctcaggttcatcgatctctataatatctagttttttgcgtttcacaaacacaggctcgtctctcgcgatgagatctgtatagtaactatgtaaatgataactagatagaaagatgtagctatatagatgacgatcctttaagagaggtataataactttaccccaatcagatagactgttgttatggtcttcggaaaaagaatttttataaatttttccagtattttccaaatatacgtacttaacatctaaaaaatccttaatgataataggaatggataatccgtctattttataaagaaatacatatcgcacattatacttttttttggaaatgggaataccgatgtgtctacataaatatgcaaagtctaaatattttttagagaatcttagttggtccaaattcttttccaagtacggtaatagatttttcatattgaacggtatcttcttaatctctggttctagttccgcattaaatgatgaaactaagtcactatttttataactaacgattacatcacctctaacatcatcatttaccagaatactgatcttcttttgtcgtaaatacatgtctaatgtgttaaaaaaaagatcatacaagttatacgtcatttcatctgtggtattcttgtcattgaaggataaactcgtactaatctcttctttaacagcctgttcaaatttatatcctatatacgaaaaaatagcaaccagtgtttgatcatccgcgtcaatattctgttctatcgtagtgtataacaatcgtatatcttcttctgtgatagtcgatacgttataaaggttgataacgaaaatatttttatttcgtgaaataaagtcatcgtaggattttggacttatattcgcgtctagtagatatgcttttatttttggaatgatctcaattagaatagtctctttagagtccatttaaagttacaaacaactaggaaattggtttatgatgtataatttttttagtttttatagattctttattctatacttaaaaaatgaaaataaatacaaaggttcttgagggttgtgttaaattgaaagcgagaaataatcataaattatttcattatcgcgatatccgttaagtttgtatcgtaatggcgtggtcaattacgaataaagcggatactagtagcttcacaaagatggctgaaatcagagctcatctaaaaaatagcgctgaaaataaagataaaaacgaggatattttcccggaagatgtaataattccatctactaagcccaaaaccaaacgagccactactcctcgtaaaccagcggctactaaaagatcaaccaaaaaggaggaagtggaagaagaagtagttatagaggaatatcatcaaacaactgaaaaaaattctccatctcctggagtcagcgacattgtagaaagcgtggccgctgtagagctcgatgatagcgacggggatgatgaacctatggtacaagttgaagctggtaaagtaaatcatagtgctagaagcgatctctctgacctaaaggtggctaccgacaatatcgttaaagatcttaagaaaattattactagaatctctgcagtatcgacggttctagaggatgttcaagcagctggtatctctagacaatttacttctatgactaaagctattacaacactatctgatctagtcaccgagggaaaatctaaagttgttcgtaaaaaagttaaaacttgtaagaagtaaatgcgtgcacttttttataaagatggtaaactctttaccgataataattttttaaatcctgtatcagacgataatccagcgtatgaggttttgcaacatgttaaaattcctactcatttaacagatgtagtagtatatgaacaaacgtgggaggaggcgttaactagattaatttttgtgggaagcgattcaaaaggacgtagacaatacttttacggaaaaatgcatgtacagaatcgcaacgctaaaagagatcgtatttttgttagagtatataacgttatgaaacgaattaattgttttataaacaaaaatataaagaaatcgtccacagattccaattatcagttggcggtttttatgttaatggaaactatgttttttattagatttggtaaaatgaaatatcttaaggagaatgaaacagtagggttattaacactaaaaaataaacacatagaaataagtcccgatgaaatagttatcaagtttgtaggaaaggacaaagtttcacatgaatttgttgttcataagtctaatagactatataaaccgctattgaaactgacggatgattctagtcccgaagaatttctgttcaacaaactaagtgaacgaaaggtatacgaatgtatcaaacagtttggtattagaatcaaggatctccgaacgtatggagtcaattatacgtttttatataatttttggacaaatgtaaagtccatatctcctcttccgtcaccaaaaaagttaatagcgttaactatcaaacaaactgctgaagtggtaggtcatactccatcaatttcaaaaagagcttatatggcaacgactattttagaaatggtaaaggataaaaattttttagatgtagtatctaaaactacgttcgatgaattcctatctatagtcgtagatcacgttaaatcatctacggatggatgatatagatctttacacaaataattacaagaccgataaatggaaatggataagcgtatgaaatctctcgcaatgacagctttcttcggagagctaaacacattagatattatggcattgataatgtctatatttaaacgccatccaaacaataccattttttcagtggataaggatggtcagtttatgattgatttcgaatacgataattataaggcttctcaatatttggatctgaccctcactccgatatttggagatgaatgcaagactcacgcatcgagtatagccgaacaattggcgtgtgcggatattattaaagaggatattagcgaatatatcaaaactactccccgtcttaaacgatttataaaaaaataccgcaatagatcagatactcgcatcagtcgagatacagaaaagcttaaaatagctctagctaaaggcatagattacgaatatataaaagacgcttgttaataagtaaatgaaaaaaaactagtcgtttataataaaacacgatatggatgccaacgtagtatcatcttctactattgcgacgtatatagacgctttagcgaagaatgcttcagaattagaacagaggtctaccgcatacgaaataaataatgaattggaactagtatttattaagccgccattgattactttgacaaatgtagtgaatatctctacgattcaggaatcgtttattcgatttaccgttactaataaggaaggtgttaaaattagaactaagattccattatctaaggtacatggtctagatgtaaaaaatgtacagttagtagatgctatagataacatagtttgggaaaagaaatcattagtgacggaaaatcgtcttcacaaagaatgcttgttgagactatcgacagaggaacgtcatatatttttggattacaagaaatatggatcctctatccgactagaattagtcaatcttattcaagcaaaaacaaaaaactttacgatagactttaagctaaaatattttctaggatccggtgcccaatctaaaagttctttattacacgctattaatcatccaaagtcaaggcctaatacatctctggaaatagaattcacacctagagacaatgaaacagttccatatgatgaactaataaaggaattgacgactctatcacgtcatatatttatggcttctccagagaatgtaattctttctccgcctattaacgcgcctataaaaacctttatgttgcctaaacaagatatagtaggtttggatctggaaaatctatatgccgtaactaagactgacggcattcctataactatcagagttacatcaaacgggttgtattgttattttacacatcttggttatattattagatatcctgttaagagaataatagattccgaagtagtagtctttggtgaggcagttaaggataagaactggaccgtatatctcattaagctaatagagcccgtgaatgctatcagtgatagactagaagaaagtaagtatgttgaatctaaactagtggatatttgtgatcggatagtattcaagtcaaagaaatacgaaggtccgtttactacaactagtgaagtcgtcgatatgttatctacatatttaccaaagcaaccagaaggtgttattctgttctattcaaagggacctaaatctaacattgattttaaaattaaaaaggaaaatactatagaccaaactgcaaatgtagtatttaggtacatgtccagtgaaccaattatctttggagaatcgtctatctttgtagagtataagaaatttagcaacgataaaggctttcctaaagaatatggttctggtaagattgtgttatataacggcgttaattatctaaataatatctattgtttggaatatattaatacacataatgaagtgggtattaagtccgtggttgtacctattaagtttatagcagaattcttagttaatggagaaatacttaaacctagaattgataaaaccatgaaatatattaactcagaagattattatggaaatcaacataatatcatagtcgaacatttaagagatcaaagcatcaaaataggagatatctttaacgaggataaactatcggatgtgggacatcaatacgccaataatgataaatttagattaaatccagaagttagttattttacgaataaacgaactagaggaccgttgggaattttatcaaactacgtcaagactcttcttatttctatgtattgttccaaaacatttttagacgattccaacaaacgaaaggtattggcgattgattttggaaacggtgctgacctggaaaaatacttttatggagagattgcgttattggtagcgacggatccggatgctgatgctatagctagaggaaatgaaagatacaacaaattaaactctggaattaaaaccaagtactacaaatttgactacattcaggaaactattcgatccgatacatttgtctctagtgtcagagaagtattctattttggaaagtttaatatcatcgactggcagtttgctatccattattcttttcatccgagacattatgctaccgtcatgaataacttatccgaactaactgcttctggaggcaaggtattaatcactaccatggacggagacaaattatcaaaattaacagataaaaagacttttataattcataagaatttacctagtagcgaaaactatatgtctgtagaaaaaatagctgatgatagaatagtggtatataatccatcaacaatgtctactccaatgactgaatacattatcaaaaagaacgatatagtcagagtgtttaacgaatacggatttgttcttgtagataacgttgatttcgctacaattatagaacgaagtaaaaagtttattaatggcgcatctacaatggaagatagaccgtctacaaaaaactttttcgaactaaatagaggagccattaaatgtgaaggtttagatgtcgaagacttacttagttactatgttgtttatgtcttttctaagcggtaaataataatatggtatgggttctgatatccccgttctaaatgcattaaataattccaatagagcgatttttgttcctataggaccttccaactgtggatactctgtattgttaatagatatattaatacttttgtcgggtaacagaggttctacgtcttctaaaaataaaagttttataacatctggcctgttcataaataaaaacttggcgattctatatatactcttattatcaaatctagccattgtcttatagatgtgagctactgtaggtgtaccatttgattttctttctaatactatatatttctctcgaagaagttcttgcacatcatctgggaataaaatactactgttgagtaaatcagttattttttttatatcgatattgatggacatttttatagttaaggataataagtatcccaaagtcgataacgacgataacgaagtatttatacttttaggaaatcacaatgactttatcagattaaaattaacaaaattaaaggagcatgtatttttttctgaatatattgtgactccagatacatatggatctttatgcgtcgaattaaatgggtctagttttcagcacggcggtagatatatagaggtggaggaatttatagatgctggaagacaagttagatggtgttctacatccaatcatatatctgaagatatacccgaagatatacacactgataaatttgtcatttatgatatatacacttttgattcgttcaagaataaacgattggtatttgtacaggtacctccgtcgttaggagatgatagtcatttgactaatccgttattgtctccgtattatcgtaattcagtagccagacaaatggtcaatgatatgatttttaatcaagattcatttttaaaatatttattagaacatctgattagaagccactatagagtttctaaacatataacaatagttagatacaaggataccgaagaattaaatctaacgagaatatgttataatagagataagtttaaggcgtttgtattcgcttggtttaacggcgtttcggaaaatgaaaaggtactagatacgtataaaaaggtatctaatttgatataatgaattcagtgactgtatcacacgcgccatatactattacttatcacgatgattgggaaccagtaatgagtcaattggtagagttttataacgaagtagccagttggctgctacgagacgagacgtcgcctattcctgataagttctttatacagttgaaacaaccgcttagaaataaacgagtatgtgtgtgcggtatagatccgtatccgaaagatggaactggtgtaccgttcgaatcaccaaattttacaaaaaaatcaattaaggagatagcttcatctatatctagattaaccggagtaattgattataaaggttataaccttaatataatagacggggttataccctggaattattacttaagttgtaaattaggagaaacaaaaagtcacgcgatctactgggataagatttccaagttactgctgcagcatataactaaacacgttagtgttctttattgtttgggtaaaacagatttctcgaatatacgggcaaagttagaatccccggtaactaccatagtcggatatcatccagcggctagagaccgccaattcgagaaagatagatcatttgaaattatcaacgttttactggaattagacaacaaggcacctataaattgggctcaagggtttatttattaatgctttagtgaaattttaacttgtgttctaaatggatgcggctattagaggtaatgatgttatctttgttcttaagactataggtgtcccgtcagcgtgcagacaaaatgaagatccaagatttgtagaagcatttaaatgcgacgagttagaaagatatattgagaataatccagaatgtacactattcgaaagtcttagggatgaggaagcatactctatagtcagaattttcatggatgtagatttagacgcgtatctagacgaaatagattatttaacggctattcaagattttattatcgaggtgtcaaactgtgtagctagattcgcgtttacagaatgcggcgccattcatgaaaatgtaataaaatccatgagatctaatttttcattgactaagtctacaaatagagataaaacaagttttcatattatctttttagacacgtataccactatggatacattgatagctatgaaacgaacactattagaattaagtagatcatctgaaaatccactaaccagatcgatagacactgccgtatataggagaaaaacaactcttcgggttgtaggtactaggaaaaatccaaattgcgacactattcatgtaatgcaaccaccgcatgataatatagaagattacctattcacttacgtggatatgaacaacaatagttattacttttctctacaacaacgattggaggatttagttcctgataagttatgggaaccagggtttatttcattcgaagacgctataaaaagagtttcaaaaatattcattaattctataataaactttaatgatctcgatgaaaataattttacaacggtaccactggtcatagattacgtaacaccttgtgcattatgtaaaaaacgatcgcataaacatccgcatcaactatcgttggaaaatggtgctattagaatttacaaaactggtaatccacatagttgtaaagttaaaattgttccgttggatggtaataaactgtttaatattgcacaaagaattttagacactaactctgttttattaaccgaacgaggagaccatatagtttggattaataattcatggaaatttaacagcgaagaacccttgataacaaaactaattttgtcaataagacatcaactacctaaggaatattcaagcgaattactctgtccgaggaaacgaaagactgtagaagctaacatacgagacatgttagtagattcagtggagaccgatacctatccggataaacttccgtttaaaaatggtgtattggacctggtagacggaatgttttactctggagatgatgctaaaaaatatacgtgtactgtatcaaccggatttaaatttgacgatacaaagttcgtcgaagacagtccagaaatggaagagttaatgaatatcattaacgatatccaaccattaacggatgaaaataagaaaaatagagagctatatgaaaaaacattatctagttgtttatgcggtgctaccaaaggatgtttaacattcttttttggagaaactgcaactggaaagtcgacaaccaaacgtttgttaaagtctgctatcggtgacctgtttgttgagacgggtcaaacaattttaacagatgtattggataaaggacctaatccatttatcgctaacatgcatttgaaaagatctgtattctgtagcgaactacctgattttgcatgtagtgggtcaaagaaaatcagatctgataatattaaaaagttgacagaaccttgtgtcattggaagaccgtgtttctccaataaaattaataatagaaaccatgcgacaatcattatcgatactaattacaaacctgtttttgataggatagataacgcattaatgagaagaattgccgtcgtgcgattcagaacacacttttctcaaccttctggtagagaggctgctgaaaataatgacgcgtacgataaagtcaaactattagacgaggggttagatggtaaaatacaaaataatagatatagattcgcatttctatacttgttggtgaaatggtacagaaaatatcatgttcctattatgaaactatatcctacacccgaagagattcctgactttgcattctatctcaaaataggtactctgttggtatctagctctgtaaagcatattccattaatgacggacctctccaaaaagggatatatattgtacgataatgtggtcactcttccgttgactactttccaacagaaaatatccaagtattttaattctagactatttggacacgatatagagagcttcatcaatagacataagaaatttgccaatgttagtgatgaatatctgcaatatatattcatagaggatatttcatctccgtaaatatatgctcatatatttatagaagatatcacatatctaaatgaataccggaatcatagatttatttgataatcatgttgatagtataccaactatattacctcatcagttagctactctagattatctagttagaactatcatagatgagaacagaagcgtgttattgttccatattatgggatcaggtaaaacaataatcgctttgttgttcgccttggtagcttccagatttaaaaaggtttacattctagtgccgaacatcaacatcttaaaaattttcaattataatatgggtgtagctatgaacttgtttaatgacgaattcatagctgagaatatctttattcattccacaacaagtttttattctcttaattataacgataacgtcattaattataacggattatctcgctacaataactctatttttatcgttgatgaggcacataatatctttgggaataatactggagaacttatgaccgtgataaaaaataaaaacaagattccttttttactattgtctggatctcccattactaacacacctaatactctgggtcatattatagatttaatgtccgaagagacgatagattttggtgaaattattagtcgtggtaagaaagtaattcagacacttcttaacgaacgcggtgtgaatgtacttaaggatttgcttaaaggaagaatatcatattacgaaatgcctgataaagatctaccaacgataagatatcacggacgtaagtttctagatactagagtagtatattgtcacatgtctaaacttcaagagagagattatatgattactagacgacagctatgttatcatgaaatgtttgataaaaatatgtataacgtgtcaatggcagtattgggacaacttaatctgatgaataatttagatactttatttcaggaacaggataaggaattgtacccaaatctgaaaataaataatggcgtgttatacggagaagaattggtaacgttaaacattagttccaaatttaaatactttattaatcggatacagacactcaacggaaaacattttatatacttttctaattctacatatggcggattggtaattaaatatatcatgctcagtaatggatattctgaatataatggttctcagggaactaatccacatatgataaacggcaaaccaaaaacatttgctatcgttactagtaaaatgaaatcgtctttagaggatctattagatgtgtataattctcctgaaaacgatgatggtagtcaattgatgtttttgttttcatcaaacattatgtccgaatcctatactctaaaagaggtaaggcatatttggtttatgactatcccagatactttttctcaatacaaccaaattcttggacgatctattagaaaattctcttacgccgatatttctgaaccagttaatgtatatcttttagccgccgtatattccgatttcaatgacgaagtgacgtcattaaacgattacacacaggatgaattaattaatgttttaccatttgacatcaaaaagctgttgtatctaaaatttaagacgaaagaaacgaatagaatatactctattcttcaagagatgtctgaaacgtattctcttccaccacatccatcaattgtaaaagttttattgggagaattggtcagacaatttttttataataattctcgtattaagtataacgataccaagttacttaaaatggttacatcagttataaaaaataaagaagacgctaggaattacatagatgatattgtaaacggtcacttctttgtatcgaataaagtatttgataaatctcttttatacaaatacgaaaacgatattattacagtaccgtttagactttcctacgaaccatttgtttggggagttaactttcgtaaagaatataacgtggtatcttctccataaaactgatgagatatataaagaaataaatgtcgagctttgttaccaatggatacctttccgttacattggaaccacacgagctgacgttagacataaaaactaatattaggaatgccgtatataagacgtatctccatagagaaattagtggtaaaatggccaagaaaatagaaattcgtgaagacgtggaattacctctcggcgaaatagttaataattctgtagttataaacgttccgtgtgtaataacctacgcgtattatcacgttggggatatagtcagaggaacattaaacatcgaagatgaatcaaatgtaactattcaatgtggagatttaatctgtaaactaagtagagattcgggtactgtatcatttagcgattcaaagtactgcttttttcgaaatggtaatgcgtatgacaatggcagcgaagtcactgccgttctaatggaggctcaacaaggtatcgaatctagttttgtttttctcgcgaatatcgtcgactcataaaaaagagaatagcggtaagtataaacacgaatactatggcaataattgcgaatgttttattctcttcgatatatttttgataatatgaaaaacatgtctctctcaaatcggacaaccatctcataaaatagttctcgcgcgctggagaggtagttgccgctcgtataatctctccagaataatatacttgcgtgtcgtcgttcaatttatacggatttctatagttctctgttatataatgcggtttgccctcatgattagacgacgacaatagtgttctaaatttagatagttgatcagaatgaatgtttattggcgttggaaaaattatccatacagcgtctgcagagtggttgatagttgttcctagatatgtaaaataatccaacttactaggcagcaaattgtctagataaaatactgaatcaaacggtgcagacgtattggcggatctaatggaatccaattgattaactatcttttgaaaatatacatttttatgatccaatacttgtaagaatatagaaataatgataagtccatcatcgtgtttttttgcctcttcataagaactatattttttcttattccaatgaacaagattaatctctccagagtatttgtacacatctatcaagtgattggatccataatcgtcttcctttccccaatatatatgtagtgatgataacacatattcattggggagaaaccctccacttatatatcctcctttaaaattaatccttactagttttccagtgttctggatagtggttggtttcgactcattataatgtatgtctaacggcttcaatcgcgcgttagaaattgcttttttagtttctatattaataggagatagttgttgcggcatagtaaaaatgaaatgataactgtttaaaaatagctcttagtatgggaattacaatggatgaggaagtgatatttgaaactcctagagaattaatatctattaaacgaataaaagatattccaagatcaaaagacacgcatgtgtttgctgcgtgtataacaagtgacggatatccgttaataggagctagaagaacttcattcgcgttccaggcgatattatctcaacaaaattcagattctatctttagagtatccactaaactattacggtttatgtactacaatgaactaagagaaatctttagacggttgagaaaaggttctatcaacaatatcgatcctcactttgaagagttaatattattgggtggtaaactagataaaaaggaatctattaaagattgtttaagaagagaattaaaagaggaaagtgatgaacgtataacagtaaaagaatttggaaatgtaattctaaaacttacaacacgggataaattatttaataaagtatatataagttattgcatggcgtgttttattaatcaatcgttggaggatttatcgcatactagtatttacaatgtagaaattagaaagattaaatcattaaatgattgtattaacgacgataaatacgaatatctgtcttatatttataatatgctagttaatagtaaatgaacttttacagatctagtataattagtcagattattaagtataatagacgactagctaagtctattatttgcgaggatgactctcaaattattacactcacggcattcgttaaccaatgcctatggtgtcataaacgagtatccgtgtccgctattttattaactactgataacaaaatattagtatgtaacagacgagatagttttctctattctgaaataattagaactagaaacatgtttagaaagaaacgattatttctgaattattccaattatttgaacaaacaggaaagaagtatactatcgtcatttttttctctagatccagctactactgataatgatagaatagacgctatttatccgggtggcatacccaaaaggggtgagaatgttccagagtgtttatccagggaaattaaagaagaagttaatatagacaattcttttgtattcatagacactcggttttttattcatggcatcatagaagataccattattaataaattttttgaggtaatcttctttgtcggaagaatatctctaacgagtgatcaaatcattgatacatttaaaagtaatcatgaaatcaaggatctaatatttttagatccgaattcaggtaatggactccaatacgaaattgcaaaatatgctctagatactgcaaaacttaaatgttacggccatagaggatgttattatgaatcattaaaaaaattaactgaggatgattgattaaaaaatataaattaatttaccatcgtgtatttttataacgggattgtccggcatatcatgtagatagttaccgtctacatcgtatactcgaccatctacgcctttaaatcctctatttattgacattaatctattagaattggaataccaaatattagtaccctcaattagtttattggtaatattttttttagacgatagatcgatggctcttgaaaccaaggttttccaaccggactcattgtcgatcggtgagaagtctttttcattagcatgaatccattctaatgatgtatgtttaaacactctaaacaattggacaaattcttttgatttgctttgaatgatttcaaataggtcttcgtctacagtaggcataccattagataatctagccattataaagtgcacgtttacatatctacgttctggaggagtaagaacgtgactattgagacgaatggctcttcctactatctgacgaagagacgcctcgttccatgtcatatctaaaatgaagatatcattaattgagaaaaaactaataccctcgcctccactagaagagaatacgcatgttttaatgcattctccgttagtgtttgattcttggttaaactcagccaccgccttgattctagtatcttttgttctagatgagaactctatattagagataccaaagactttgaaatatagtaataagatttctattcctgactgattaacaaatggttcaaagactagacatttaccatgggatgctaatattcccaaacatacatctataaatttgacgcttttctcttttaattcagtaaatagagagatatcagccgcactagcatcccctttcaatagttctccctttttaaaggtatctaatgcggatttagaaaactctctatctcttaatgaatttttaaaatcattatatagtgttgctatctcttgcgcgtattcgcccggatcacgattttgtctttcaggaaagctatcgaacgtaaacgtagtagccatacgtctcagaattctaaatgatgatatacctgtttttatttcagcgagtttagccttttgataaatttcttcttgctttttcgacatattaacgtatcgcattaatactgttttcttagcgaatgatgcagacccttctacgtcatcaaaaatagaaaactcgttattaactatatacgaacatagtcctcctagtttggagactaattctttttcatcgactagacgtttattctcaaatagtgattggtgttgtaaggatcctggtcgtagtaagttaaccaacatggtgaattcttgcacactattgacgataggtgtagccgataaacaaatcatcttatggttttttaacgcaatggtcttagataaaaaattatatactgaacgagtaggacggatcttaccatcttctttgattaatgatttagaaatgaagttatgacattcatcaatgatgacgcatattctactcttggaattaatagttttgatattagtaaaaaatttatttctaaaattttgatcatcgtaattaataaaaatacaatccttcgttatctctggagcgtatctgagtatagtgttcatccaaggatcttctatcaaagcctttttcaccaataagataatagcccaattcgtataaatatccttaagatgtttgagaatatatacagtagtcattgttttaccgacacccgtttcatggaacaataaaagagaatgcatactgtctaatcctaagaaaactcttgctacaaaatgttgataatccttgaggcgtactacgtccgaccccatcatttcaacgggcatattagtagttctgcgtaaggcataatcgatataggccgcgtgtgatttactcatttatgagtgataagtaataactatgttttaaaaatcacagcagtagtttaactagtcttctctgatgtttgttttcgatactttttgaatcagaagtcatactagaataaagcaacgagtgaacgtaatagagagcttcgtatactctattcgaaaactctaagaacttattaatgaattccgtatccactggattgtttaaaatactaaattgaacactgttcacatccttccaagaagaagacttagtgacggacttaacatgagacataaataaatccaaattttttttacaaacatcactagccaccataatggcgctatctttcaaccagctatcgcttacgcattttagcagtctaacatttttaaagagactacaatatattctcatagtatcgattacacctctaccgaataaagttggaagtttaataatacaatatttttcgtttacaaaatcaaataatggtcgaaacacgtcgaaggttaacatcttataatcgctaatgtatagattgttttcagtgagatgattattagatttaatagcatctcgttcacgtttgaacagtttattgcgtgcgctgaggtcggcaactacggcgtccgctttagtactcctcccataatactttacgctattaatctttaaaatttcatagactttatctagatcgctttctggtaacatgatatcatgtgtaaaaagttttaacatgtcggtcggcattctatttagatcattaactctagaaatctgaagaaagtaattagctccgtattccagactaggtaatgggcttttacctagagacagattaagttctggcaatgtttcataaaatggaagaaggacatgcgttccctcccggatattttttacaatttcatccatttacaactctatagtttgttttcattattattagttattatctcccataatcttggtaatacttaccccttgatcgtaagataccttatacaggtcattacatacaactaccaattgtttttgtacataatagattggatggttgacatccatggtggaataaactactcgaacagatagtttatctttccccctagatacattagccgtaatagttgtcggcctaaagaatatctttggtgtaaagttaaaagttagggttcttgttccattattgctttttgtcagtagttcattataaattctcgagatgggtccgttctctgaatatagaacatcatttccaaatctaacttctagtctagaaataatatcggtcttattcttaaaatctattcccttgatgaagggatcgttaatgaacaaatccttggcctttgattcggctgatctattatctccgttatagacgttacgttgactagtccaaagacttacaggaatagatgtatcgatgatgttgatactatgtgatatgtgagcaaagattgttctcttagtggcatcactatatgttccagtaatggcggaaaactttttagaaatgttatatataaaagaattttttcgtgttccaaacattagcagattagtatgaagataaacactcatattatcaggaacattatcaatttttacatacacatcagcatcttgaatagaaacgataccatcttctggaacctctacgatctcggcagactccggataaccagtcggtggaccatcgctaacaataactagatcatccaacaatctactcacatatgcatctatataatctttttcatcttgtgagtaccctggatacgaaataaatttattatccgtatttccataataaggtttagtataaacagagagcgatgttgccgcatgaacttcagttacagtcgccgttggttggtttatttgacctattactctcctaggtttctctataaacgatggtttaatttgtacattcttaaccatatatccaataaagctcaattcaggaacataaacaaattctttgttgaacgtttcaaagtcgaacgaagagtcacgaataacgatatcggatactggattgaaggtcaccgttacggtaatttttgaatcggatagtttaagactgctgaatgtatcttccacatcaaacggagttttaatataaacgtatactgtagatggttctttaatagtgtcattaggagttaggccaatagaaatatcattaagttcactagaatatccagagtgtttcaaagcaattgtattattgatacaattattatataattcttcgccctcaatttcccaaataacaccgttacacgaagagatagatacgtgattaatacatttatatccaacatatggtacgtaactgaatcttcccatacctttaacttctggaagttccaaactcagaaccaaatgattaagcgcagtaatatactgatccctaatttcgaagctagcgatagcctgattgtctggaccatcgtttgtcataactccggatagagaaatatattgcggcatatataaagttggaatttgactatcgactgcgaagacattagaccgtttaatagagtcatccccaccgatcaaagaattaatgatagtattattcattttctatttaaaatggaaaaagcttacaataaactccgtagagaaatatctataatttgtgagttttccttaaagtaacagcttccgtaaacgccgtctttatctcttagtaggtttattgtatttatgaccttttccttatcttcatagaatactaaaggcaacaaagaaatttttggttcttctctaagagctacgtgagacttaaccatagaagccaacgaatccctacatattttagaacagaaatacccaacttcaccacccttgtatgtctcaatactaataggtctaaaaaccaaatcttgattacaaaaccaacacttatcaattacactatttgtcttaatagacacatctgccatagatttataatactttggtagtatacaagcgagtgcttcttctttagcgggcttaaagactgctttaggtgctgaaataaccacatctggaaggcttactcgcttagccatttaattacggaactatttttttatacttctaatgagcaagtagaaaacctctcatctacaaaaacgtactcgtgtccataatcctctaccatagttacacgttttttagatctcatatgtgctaaaaagttttcccatactaattggttactattatttttcgtataatttttaacagtttgaggttttagatttttagttacagaagtgatatcgaatattttatccaaaaagaatgaataattaattgtcttagaaggagtgttttcttggcaaaagaataccaagtgcttaaatatttctactacttcattaatcttttctgtactcagattcagtttctcatcttttacttgattgattatttcaaagactaacttataatcctttttatttattctctcgttagccttaagaaaactagatacaaaatttgcatctacatcatccgtggatatttgatttttttccatgatatccaagagttccgagataatttctccagaacattgatgagacaataatctccgcaatacatttctcaaatgaataagtttattagacacgtggaagtttgactttttttgtacctttgtacatttttgaaataccgactcgcaaaaaatacaatattcatatccttgttcagatactataccgttatgtctacaaccgctacataatcgtagattcatgttaacactctacgtatctcgtcgtccaatattttatataaaaacattttatttctagacgttgccagaaaatcctgtaatatttttagttttttgggctgtgaataaagtatcgccctaatattgttaccgtcttccgccaatatagtagttaaattatccgcacatgcagaagaacaccgcttaggcggattcagtacaatgttatatttttcgtaccaactcatttaaatatcataatctaaaatagttctgtaatatgtctagcgctaatatattgatcataatcctgtgcataaattaagatacaacaatgtctcgaaatcatcgacatggcttcttccatagttagaagatcgtcgtcaaagttagcaacgtgattcatcaacatttgctgttttgaggcagcaaatactgaaccgtcgccattcaaccattcataaaaaccatcgtctgaatccattgataatttcttgtactggtttttgagagctcgcatcaatctagcatttctagctcccggattgaaaacagaaagaggatcgtacatccagggtccattttctgtaaatagaatcgtataatgtcccttcaagaagatatcagacgatccacaatcaaagaattggtctccgagtttgtaacaaactgcggactttaacctatacatgataccgtttagcataatttctggtgatacgtcaatcggagtatcatctattagagatctaaagccggtgtaacattctccaccaaacatattcttattctgacgtcgttctacataaaacatcattgctccattaacgataacaggggaatgaacagcactacccatcacattagttcccaatggatcaatgtgtgtaactccagaacatcttccatagcctatgttaggaggagcgaacaccactcttccactattgccatcgaatgccatagaataaatatccttggaattgatagaaatcggactgtcggatgttgtgatcatcttcataggattaacaactatgtatggtgccgcctgaagtttcatatcgtaactgatgccgtttataggtctagccacagaaaccaacgtaggtctaaatccaactatagacaaaatagaagccaatatctgttcctcatctgtcataacttgagagcatccagtatgaataatcttcattagatggggatctaccgcatcatcatcgttacaataaaaaattcccattctaatgttcataattgcttttctaatcatggtatgcatgtttgctctctgaatctctgtggaaattagatctgatacacctgtaatcactatcggattatcctccgtaagacgattaaccaacaacatataattataagactttacttttctaaattcataaagttgctggattaggctataggtgtctccatgtacatacgcgttctcgagcgcaggaagtttaataccgaatagtgccatcagaataggatgaatatagtaattagtttctggttttctataaataaaagacaaatcttgtgaactagacatatcggtaaaatgcatggattggaatcgtgtagtcgacagaagaatatgatgattagatggagagtatattttatctaactctttgagttggtcaccgattctaggactagctcgagaatgaataagtactaaaggatgagtacatttcacagaaacactagcattgttcaatgtgctctttacatgggtaaggagttgaaatagctcgtttctatttgttctgacaatatttagtttattcataatgttaagcatatcctgaatagtaaagttagatgtgtcatacttgttagtagttagatatttagcaattgcattcccatcatttctcaatctcgtactccaatcatgtgtagatgctacttcgtcgatggaaaccatacaatcctttttgataggctgttgagattgatcatttcctgcacgtttaggtttggtacgttgatttctagcccctgcggatataaagtcatcgtctacaatttgggacaatgaattgcatacactacaagacaaagatttatcagaagtgtgaatatgatcttcatctaccaaagaaagagtttgattagtataactagattttagtcctgcgttagatgttaaaaaaacatcgctattgaccacggcttccattatttatattcgtagtttttactcgaaagcgtgattttaatatccaatcttattacttttggaatcgttcaaaacctttgactagttgtagaatttgatctattgccctacgcgtatactcccttgcatcatatacgttcgtcaccagatcgtttgtttcggcctgaagttggtgcatatctctttcaacattcgacatgagatccttaagggccatatcgtctagattttgttgagatgctgctcctggatttggattttgttgtgctgttgtacatactgtaccaccagtaggtgtaggagtacatacagtggccacaataggaggttgagaaagtgtaaccgttggagtagtacaagaaatacttccatccgattgttgtgtacatgtagttgttggtaacgtctgagaaggttgggtagatggcggcgtcgtcgttttttgatctttattaaatttagagataatatcctgaacagcattgctcggcgtcaacgctggaaggagtgaactcgccggcgcatcagtatcttcagacagccaatcaaaaagattagacatatcagatgatgtattagtttgttgtcgtggttttggtgtaggagcagtactactaggtagaagaataggagccgatgtagctgttggaaccggctgtggagttatatgaatagttggttgtagcggttggataggctgtctgctggcggccatcatattatctctagctagttgttctcgcaactgtctttgataatacgactcttgagactttagtcctatttcaatcgcttcatcctttttcgtatccggatccttttcttcagaataatagattgacgactttggtgtagaggattctgccagcctctgtgagaacttgttaaagaagtccatttaaggctttaaaattgaattgcgattataagattaaatggcagacacagacgatattatcgactatgaatccgatgatctcaccgaatacgaggatgatgaagaagaggaagaagatggagagtcactagaaactagtgatatagatcccaaatcttcttataagattgtagaatcagcatccactcatatagaagatgcgcattccaatcttaaacatatagggaatcatatatctgctcttaaacgacgctatactagacgtataagtctatttgaaatagcgggtataatagcagaaagctataacttgcttcaacgaggaagattacctctagtttcagaattttctgacgaaacgatgaagcaaaatatgctacatgtaattatacaagagatagaggagggttcttgtcctatagtcatcgaaaagaacggagaattgttgtcggtaaacgattttgacaaagatggtctaaaattccatctagactatattatcaaaatttggaaacttcaaaaacgatattagaatttatacgaatatcgttctctaaatgtcacaatcaagtctcgcatgttcagcaatttattgtcgtactttatatcgtgttcattaacgatatcttgcaaaatagtaatgattctatcttccttcgatagatattcttcagagattattgtcttatattctttcttgttatcagatatgaatttgataagactttgaacattattgatacccgtctgtttaattttttctacagatattttagttttggcagattctatcgtatctgtcaatagacatccaacatcgacattcgacgtcaattgtctataaatcaacgtataaattttagaaataacattagcgaattgttgtgcgttgatgtcgttattctgaaacagtatgattttaggtagcattttcttaacaaagagaacgtatttattgttactcagttgaacagatgatatatccagattactaacgcatctgattccgtataccaaactttcagaagaaatggtatacaattgtttgtattcattcaatgtctctttttcagaaattagtttagagtcgaatactgcaataattttcaagagatagttttcatcagataagattttatttagtgtagatatgataaaactattgttttgttggagaacttgatacgccgcgttctctgtagtcgacgctctcaaatgggaaacaatctccattatttttttggaatcggatactatatcttcggtatcttgacgcagtctagtatacatagagttaagagagattagagtttgtacattaagcaacatgtctctaaatgtggctacaaacttttcctttttcacatcatctagtttattatataccgatttcacaacggcaccagatttaaggaaccagaatgaaaaactctgataactacaatatttcatcatagttacgattttatcatcttctatagttggtgtaatagcgcatacctttttctccaagactggaaccaacgtcataaaaatgtttaaatcaaaatccatatcaacatctgatgcgctaagaccagtctcgcgttcaagattatctttactaatggtgacgaactcatcgtataaaactctaagtttgtccattatttatttacagatttagttgtttaatttatttgtgctcttccagagttgggatagtatttttctaacgtcggtattatattattaggatctacgttcatatgtatcataatattaatcatccacgttttgataaatctatctttagcttctgaaataacgtatttaaacaaaggagaaaaatatttagctacggcatcagacgcaataacattttttgtaaatgtaacgtatttagacgacagatcttcgttaaaaagttttccatctatgtagaatccatcggttgttaacaccattcccgcgtcagattgaataggagtttgaatagtttgttttggaaatagatccttcaataacttatagttgggtgggaaaaaatcgattttatcactagactctttcttttttactatcattacctcatgaactatttcttgaatgagtatatgtattttctttcctatatcggacgcgttcattggaaaatataccatgtcgttaactataagaatatttttatcctcgtttacaaactgaataatatcagatgtagttcgtaaacgaactatatcatcaccagcacaacatctaactatatgatatccactagtttcctttagccgtttattatcttgttccatattagcagtcattccatcatttaagaaggcgtcaaagataatagggagaaatgacattttggattctgttacgactttaccaaaattaaggatatacggacttactatctttttctcaacgtcaatttgatgaacacacgatgaaaatgtgcttctatgagattgatcatgtagaaaacaacaagggatacaatatttccgcatatcatgaaatatattaagaaatcccaccttattatatttccccaaaggatccatgcacgtaaacattatgccgttatcattaataaagacttctttctcatcggatctgtaaaagttgttactgatttttttcattccaggatctagataattaataatgatgggttttctattcttattctttgtattttggcatatcctagaccagtaaacagtttccactttggtaaaatcagcagacttttgaacgctattaaacatggcattaatggcaataactaaaaatgtaaaatatttttctatgttaggaatatggtttttcactttaatagatatatggtttttggccaaaatgatagatatttttttatccgaggatagtaaaatattattagtcgccgtctctataaaaatgaagctagtctcgatatccaattttattctagaattgataggagtcgccaaatgtaccttatacgttatatctcccttgatgcgttccatttgtgtatctatatcggacacaagatctgtaaatagttttacgttattaatcatcacggtatcgccgtcgctagataacgctaatgtaccatccaagtcccaaatggagagatttaactgttcatcgtttagaataaaatgattaccggtcatattaataaagtgttcatcgtatctagataacaacgacttataattaatgtccaagtcttgaactcgctgaatgatcttttttaacccagttagttttagattggtacgaaatatattgttaaactttgattctacagtaatgtccaaatctagttgtggaaatacttccatcaacattgtttcaaacttgataatattattatctacatcttcgtacgatccaaattccggaatagatgtatcgcacgctctggccacccagataaccaaaaagtcacacgctccaggatatacattgtataaaaagctatcgttttttagtagggtttttttctgcgtgtatacgaagggattaaaaatagtattatcaacgtaactatattccaaattattcttatgagaatagataataatatcgtccttaatatctaacaaatttcctaaatatccctttaattgagtcattcgaagcgtcaatagaatatgtctcttaactatttccggctgttgtatatttaaatgacttcgtaaaaaataatatatgggcgacttctcatctatgtaatcatatggagtgagatatagggctcgttctacctcctgccccttacccacctgtaataccaattgcggacttactatatatcgcatatttatatcgtggggtaaagtgaaaatctactaccgatgatgtaagtcttacaatgttcgaaccagtaccagatcttaatttggaggcctccgtagaactaggggaggtaaatatagatcaaacaacacctatgataaaggagaatagcggttttatatcccgcagtagacgtctattcgcccatagatctaaggatgatgagagaaaactagcactacgattctttttacaaagactttattttttagatcatagagagattcattatttgttcagatgcgttgacgctgtaaaagacgtcactattaccaaaaaaaataacattatcgtggcgccttatatagcacttttaactatcgcatcaaaaggatgcaaacttacagaaacaatgattgaagcattctttccagaactatataatgaacatagtaagaaatttaaattcaactctcaagtatccatcatccaagaaaaactcggataccagtttggaaactatcacgtttatgattttgaaccgtattactctacagtagctctggctattcgagatgaacattcatctggcatttttaatatccgtcaagagagttatctggtaagttcattatctgaaataacatatagattttatctaattaatctaaaatctgatcttgttcaatggagtgctagtacgggcgctgtaattaatcaaatggtaaatactgtattgattacagtgtatgaaaagttacaactggtcatagaaaatgattcacaatttacatgttcattggctgtggaatcaaaacttccaataaaattacttaaagatagaaatgaattatttacaaaattcattaacgagttaaaaaagaccagttcattcaagataagcaaacgcgataaggatacgctactaaaatattttacttaggactggagttagaatttatagacgactcatttcgtttatcattgttactattattactattactatcattattagtgttggcattattagtattcttcttgtcatcttgttcagaaatatacagcaatgctatacctaatactaaatacattatcatgctcgcaatggctctaacaacaacgaaccaaaatgaatttggtcgtagcttttgttcacaaaaatacataaagaaatgtctacataaatctatggcgccattggctacttgaaatagcgccagtcctcctacagattttaatatagctgtataacatgacatttattcatcatcaaaagagacagagtcaccatctgtcatatttagattttttttcatgtgttcaaagtatcctctactcatttcattataatagtttatcatacttagaattttaggacggatcaatgagtaagacttgactagatcgtcagtagtaatttgtgcatcgtctattctgcatccgcttcgtcgaataatgtatagcatcgctttgagattctccatagctatcaagtctttatacaatgacatggaaatatctgtgaatactttatacttctccaacatcgatgccttaacatcatcgcctactttagcattgaaaatacgttctattgtgtagatggatgtagcaagatttttaaacaacaatgccatcttacacgatgattgcctcaagtctccaatcgtttgtttagaacgattagctacagagtccaatgcttggctgactagcatattattatctttagaaattgtattcttcaatgaggcgtttatcatatctgtgatttcgttagtcatattacagtctgactgggttgtaatgttatccaacatatcacctatggatacggtacacgtaccagcatttgtaataatcctatctaagatgttgtatggcattgcgcagaaaatatcttctcctgtaatatctccactctcgataaatctactcagattattcttaaatgccttattctctggagaaaagatatcagtgtccatcatttcattaatagtatacgcagaaaagataccacgagtatcaattctatccaagatacttatcggttccgagtcacagataatggtttcctctccttcgggagatcctgcatagaaatatctaggacaatagtttctatactgtctgtaactctgataatctctaaagtcactaactgataccatgaaattgagaagatcaaacgctgaagtaattaatttttctgcctcgtttttactacaactagttttcatcaatgtagtgacgatgtattgtttagttacttttggtctaatactgatgatagagatattattgcttcccataatggatcttctagtagtcaccttaaagcccattgatgcgaatagcagatagataaagtcttggtatgactcctttctaatatagtacggactacctttgtcacccaactttatacccacataagccataacaacctctttaatagccgtttcatgaggtttatcagccatgagcctgagtagttggaagaatctcatgaatcccgtctcagaaagtcctatatgcatgatagatttatctttcctgggaaactctcgtatagtcatagatgaaatactctttaaagtttctgaaataagattagtaacagtcttacctccgactactctaggtaacaaacaaactctaataggtgttttctctgcggagataatatcagaaaggatagagcaataagtagtattattgtgattataaagaccgaatacataacaggtagaatttataaacatcatgtcctgaaggtttttagacttgtattcctcgtaatccataccgtcccaaaacatggatttggtaactttgatagccgtagatctttgttccttcgccaacaggttaaagaaattaataaagaatttgttgtttctatttatgtccacaaattgcacgtttggaagcgccacggttacattcactgcagcattttgaggatcgcgagtatgaagtacgatgttattgtttactggtatatctggaaagaaatctaccagtctaggaataagagattgatatcgcatagaaatagtaaagtttataatctcatcatcgaagagcattttgttaccattgtaataaatatccactctgtcatatgtataaatgaagtactgttcaaacatgatgagatgtttatatgttggcatagtagtgagatcgacgtttggtaatggcaatgtattaagattaactccataatgtctagcagcatctgcgatgttataagcgtcgtcaaagcggggtcgatcttgtattgttatatattgtctaacacctataagattatcaaaatcttgtctgcttaatacaccgttaacaatttttgccttgaattcttttattggtgcattaataacatccttatagaggatgttaaacaaataagtgttatcaaagttaagatctggatatttcttttctgctagaacatccattgagtcggagccatctggtttaatataaccaccgataaatctagctctgtattctgtatccgtcaatctaatattaagaaggtgttgagtgaaaggtggaagatcgtaaaagctgtgagtattaatgataggattagtttccgaactaatgttaattggggtattaataatatctatatttccagcgttaagtgtaacattaaacagttttaattcacgtgacgtggtatcaattaaataattaatgcccaatttggatatagcagcctgaagctcatcttgtttagttacggatcctaatgagttattaagcaatatatcgaacggatgaacgaaggttgttttaagttggtcacatactttgtaatctagacatagatgcggaagaacggtagaaactatacgaaataaatattcagagtcctctaattgatcaagagtaactattgacttaataggcatcatttatttagtattaaatgacgaccgtaccagtgacggatatacaaaacgatttaattacagagttttcagaagataattatccatctaacaaaaattatgaaataactcttcgtcaaatgtctattctaactcacgttaacaacgtggtagatagagaacataatgccgccgtagtgtcatctccagaggaaatatcctcacaacttaatgaagatctatttccagatgatgattcaccggccactattatcgaacgagtacaacctcatactactattattgacgatactccacctcctacgtttcgtagagagttattaatatcggaacaacgtcaacaacgagaaaaaagatttaatattacagtatcgaaaaatgctgaagcaataatggaatctagatctatgataacttctatgccaacacaaacaccatccttgggagtagtttatgataaagataaaagaattcagatgttagaggatgaagtggttaatcttagaaatcaacgatctaatacaaaatcatctgataatttagataattttaccaaaatactatttggtaagactccgtataaatcaacagaagttaataagcgtatagccatcgttaattatgcaaatttgaacgggtctcccttatcagtcgaggacttggatgtttgttcggaggatgaaatagatagaatctataaaacgattaaacaatatcacgaaagtagaaaacgaaaaattatcgtcactaacgtgattattattgtcataaacattatcgagcaggcattgctaaaactcggatttgaagaaatcaaaggactgagtaccgatatcacttcagaaattatcgatgtggagatcggagatgactgcgatgctgtagcatcaaaactaggaatcggtaacagtccggttcttaatattgtattgtttatactcaagatattcgttaaacgaattaaaattatttaatttaatacattcccatatccagacaacaatcgtctggattaatctgttcctgtcgtctcataccggacgacatattaatctttttattagtgggcatctttttagatggtttctttttcccagcattaactgagtcgatacctagaagatcgtgattgatctctccgaccattccacgaacttctaattggccgtctctgacggtaccataaactattttaccagcattagtaacagcttggacaatctgaccatccatcgcattgtacgatgtagtagtaactgttgttctacgtctaggagcaccagaagtatttttggagcccttggatgttgatgtagaagaagacgaggattttgattttggtttacatgtaatacattttgaactctttgattttgtatcacatgcgccggcagtcacatctgtttgagaattaagattattgttgcctcctttgacggctgcatctccaccgatttgcgctagtagatttttaagctgtggtgtaatcttattaactgtttcgatataatcatcgtaactgcttctaacggctaaattttttttatccgccatttagaagctaaaaatatttttatttatgcagaagatttaactagattatacaatgaactaatatgatccttttccagattatttacaaacttggtattttttggttctggaggaggcgaatttaaattcggacttggattcggattttgtaagttcttgatcttattatacatcgagtataggatggcgacagtaactgctacacaaataccgatcaaaagaagaataccaatcatttattgacaataacttcactattgatcaagtatgcaatatatcatcttttcactaaataagtagtaataatgattcaacaatgtcgagatatatggacgataataatttagttcatggaaatatcgctatgattggtgtgaatgactccgctaactctgtggggtgcgcagtgctttccccacatagaataaattagcattccgactgtgataataataccaagtataaacgccataatactcaatactttccatgtacgagtgggactggtagacttactaaagtcaataaaggcgaagatacacgaaagaatcaaaagaatgattccagcgattagcacgccggaaaaataatttccaatcataagcatcatgtccatttaactaataaaaattttaaatcgccgaatgaacaaagtggaatataaaccatataaaaacaatagtttgtactgcaaaaataatatctatttttgttttcgaagatatggtaaaattaaatagtagtacacagcatgttataactaacagcagcaacggctcgtaattacttatcatttactagacgaaaaggtggtgggatattttcttgctcaaataatacgaatatatcacccatccattttatgcgatgtttatatactctaatctttaatagatctatagacgacgggtttaccaacaatatagattttatcgattcatctaatttaaacccttccttaaacgtgaatgatctattatctggcataacgatgaccctacctgatgaatcggacaatgtactgggccatgtagaataaattatcaacgaattatcgtctacgaacatttatatcatttgttttaattttaggacgcgaataaatggatataaaatagaaaataacagatattacaaccaatgttatggccgcgcccaaccaggtaggcagttttattttatcttttactacaggttctcctggatgtacgtcaccaacggcggacgtagttctagtacaattagacgtaagttccgcttgggaattttttaacgctaaagagttaacgttaatcgtgcacccaacgtatttacatctagttcgttgaacatcttgattataatataaccattttctatctctagattcgtcagtgcactcatgtaaccaacataccctaggtcctaaatatttatctccggaattagattttggataattcgcgcaccaacaatttctatttcctttatgatcgttacaaaagacgtataatgccgtatccccaaaagtaaaataatcaggacgaataattctaataaactcagaacaatatctcgcatccatatgtttggagcaaatatcggaataagtagacatagccggtttccgttttgcacgtaaccattctaaacaattggggtttccaggatcgtttctacaaaatccagtcatgaaatcgtcacaatgttctgtcttgtaattattattaaatatttttggacagtgtttggtatttgtcttagaacaacattttgccacgctatcactatcgcccaggagataatccttttttataaaatgacatcgttgcccggatgctatataatcagtagcgtgttttaaatccttaatatattcaggagttacctcgttctgataatagattaatgatccaggacgaaatttgaaagaactacatggttctccatgaattaatacatattgtttagcaaattcaggaactataaaactactacaatgatctatcgacataccatctatcaaacaaaacttgggtttaatttctcccggagatgtttcataatagtacgtataactttcttctgcaaacttaacagctctattatattcaggataattaaaacctaattccatatatttgtctcgtatatctgctattcctggtgctattttgattctattaagagtaacagctgcccccattcttaataatcgtcagtatttaaactgttaaatgttggtatatcaacatctaccttatttcccgcagtataaggtttgttgcaggtatactgttcaggaatggttacatttatacttcttctatagtcctgtctttcgatgttcatcacatatgcaaagaacagaataaacaaaataatgtaagaaataatattaaatatctgtgaattcgtaaatacattgattgccataataattacagcagctacaatacacacaatagacattcccacagtgttgccattacctccacgatacatttgagttactaagcaataggtaataactaagctagtaagaggcaatagaaaagatgagataaatatcatcaatatagagattagaggagggctatatagagccaagacgaacaaaatcaaaccgagtaacgttctaacatcattatttttgaagattcccaaataatcattcattcctccataatcgttttgcatcatacctccatctttaggcataaacgattgctgctgttcctctgtaaataaatctttatcaagcactccagcacccgcagagaagtcgtcaagcatattgtaatatcttaaataactcatttatatattaaaaaatgtcactattaaagatggagtataatctttatgccgaactaaaaaaaatgacttgtggtcaacccctaagtctttttaacgaagacggggatttcgtagaagttgaaccgggatcatcctttaagtttctgatacctaagggattttacgcctctccttccgtaaagacgagtctagtattcgagacattaacaacgaccgataataaaatcactagtatcaatccaacaaatgcgccaaagttatatcctcttcaacgcaaagtcgtatctgaagtagtttctaatatgaggaaaatgatcgaatcaaaacgtcctctatacattactcttcacttggcgtgtggatttggtaagactattaccacgtgttatcttatggctacacacggtagaaaaaccgtcatttgcgtacccaataaaatgttaatacatcaatggaagacacaggtagaggcagtcggattggaacataagatatccatagatggagtaagtagtctattaaaggaactaaagactcaaagtccggatgtattaatagtagtcagtagacatctgacaaacgatgccttttgtaaatatatcaataagcattatgatttgttcatcttggatgaatcacatacgtataatctgatgaacaatacagcagttacaagatttttagcgtattatcctccgatgatgtgttattttttaactgctacacctagaccatctaaccgaatttattgtaacagtattattaatattgccaagttatccaatctaaaaaaaactatctatgcagtagatagtttttttgagccatattccacagataatattagacatatggtaaaacgactagatggaccatctaataaatatcatatatataccgagaagttattatctgtagacgagcctagaaatcaacttattcttgataccctggtagaagaattcaagtcaggaactattaatcgcattttagttattactaaactacgtgaacatatggtattattctacaaacgattattagattttttcggaccagaggttgtatttataggagacgcccaaaatagacgtactccagatatggtcaaatcaatcaaggaactaaatagatttatattcgtatccaccttattttattccggtactggtttagatattcctagtttggattcgttgttcatttgctcggcagtaatcaacaatatgcaaatagagcaattactagggagggtatgtcgagaaacagaactattagataggacggtatatgtatttcctaacacatccatcaaagaaataaagtacatgataggaaatttcatgcaacgaattattagtctgtctgtagataaactaggatttaaacaaaaaagttatcggaaacatcaagaatccgatcccacttctgcatgtacaacatcatccagagaagaacgtgtattaaatagaatatttaactcgcaaaatcgttaagaagtttaagcgacgatccgcatgctgcgcaggccagtgtattacccctcatagtattaatataatccaatgatacttttgtgatgtcggaaatcttaaccaatttagactgacaggcagaacacgtcatgcaatcatcatcgtcatcgataactgtagtcttgggcttctttttgcgactcttcattccggaacgcacattggtgctatccatttaggtagtaaaaaataagtcagaatatgccctataacacgatcgtgcaaaacctggtatatcgtctctatctttatcacaatatagtgtatcgacatttttattattattgacctcgtttatcttggaacatggaatgggaacatttttgttatcaacggccatctttgccttaattccagatgttgtaaaattataactaaacagtctatcatcgacacaaatgaaattcttgtttagacgtttgtagtttacgtatgcggctcgttcgcgtctcattttttcagatattgcaggtactataatattaaaaataagaatgaaataacataggattaaaaataaagttatcatgacttctagcgctgatttaactaacttaaaagaattacttagtctgtacaaaagtttgagattttcagattctgcggctatagaaaagtataattctttggtagaatggggaacatctacttactggaaaataggcgtgcaaaaggtagctaatgtcgagacgtcaatatctgattattatgatgaggtaaaaaataaaccgtttaatattgatccgggctattacattttcttaccggtatattttgggagcgtctttatttattcgaagggtaaaaatatggtagaacttggatctggaaactcttttcaaataccagatgatatgcgaagtgcgtgtaacaaagtattagacagcgataacggaatagactttctgagatttgttttgttaaacaatagatggataatggaagatgctatatcaaaatatcagtctccagttaatatatttaaactagctagtgagtacggattaaacatacccaaatatttagaaattgaaatagaggaagacacattatttgacgacgagttatactctattatagaacgctctttcgatgataaatttccaaaaatatccatatcgtatattaagttgggagaacttagacggcaagttgtagactttttcaaattctcattcatgtatattgagtccatcaaggtagatcgtataggagataatatttttattcctagcgttataacaaaatcaggaaaaaagatattagtaaaagatgtagaccatttaatacgatccaaggttagagaacatacatttgtaaaagtaaaaaagaaaaacacattttccattttatacgactatgatggaaacggaacagaaactagaggagaagtaataaaacgaattatagacactataggacgagactattatgttaacggaaagtatttctctaaggttggtagtgcaggcttaaagcaattgactaataaattagatattaatgagtgcgcaactgtcgatgagttagttgatgagattaataaatccggaactgtaaaacgaaaaataaaaaaccaatcagcatttgatttaagcagagaatgtttgggatatccagaagcggattttataacgttagttaataacatgcggttcaaaatagaaaattgtaaggttgtaaatttcaatattgaaaatactaattgtttaaataacccgagtattgaaactatatatggaaactttaaccagttcgtctcaatctttaatgtcgtcaccgatgtcaaaaaaagattattcgagtgaaataatatgcgcctttgatataggtgcaaaaaatcctgccagaactgttttagaagtcaaggataactccgttagggtattggatatatcaaaattagactggagttctgattgggaaaggcgcatagctaaagatttgtcacaatatgaatacactacagttcttctagaacgtcagcctagaaggtcgccgtatgttaaatttatctattttattaaaggctttttatatcatacatcggctgccaaagttatttgcgtctcgcctgtcatgtctggtaattcatatagagatcgaaaaaagagatcggtcgaagcatttcttgattggatggacacattcggattgcgagactccgttccggatagacgcaaattagacgatgtagcggatagtttcaatttggctatgagatacgtattagataaatggaatactaattatacaccttataataggtgtaaatctagaaattacataaaaaaaatgtaataacgttagtaacgccattatggataatctatttacctttctacatgaaatagaagatagatatgccagaactatttttaactttcatctaataagttgcgatgaaataggagatatatatggtcttatgaaagaacgcatttcctcagaggatatgtttgataatatagtgtataataaagatatacatcctgccattaagaaactagtgtattgcgacatccaacttactaaacacattattaatcagaatacgtatccggtatttaacgattcttcacaagtgaaatgttgtcattatttcgacataaactcagataatagcaatattagctctcgtacagtagagatatttgagagggaaaagtcatctcttgtatcatatattaaaactaccaataagaagagaaaggtcaattacggcgaaataaagaaaactgttcatggaggcactaatgcaaattacttttccggtaaaaagtctgacgagtatctgagtactacagttagatccaacattaatcaaccttggatcaaaaccatctctaagaggatgagagttgatatcattaatcactctatagtaacgcgtggaaaaagctctatattacaaactatagaaattatttttactaatagaacatgtgtgaaaatattcaaggattctactatgcacattattctatccaaggacaaggatgaaaaggggtgtatacacatgattgacaaattattctatgtctattataatttatttctgttgttcgaagatatcatccaaaacgagtactttaaagaagtagctaatgttgtaaaccacgtactcacggctacggcattagatgagaaattattcctaattaagaaaatggctgaacacgatgtttatggagttagcaatttcaaaatagggatgtttaacctgacatttattaagtcgttggatcataccgttttcccctctctgttagatgaggatagcaaaataaagttttttaaggggaaaaagctcaatattgtagcattacgatctctggaggattgtataaattacgtgactaaatccgagaatatgatagaaatgatgaaggaaagatcgactattttaaatagcatagatatagaaacggaatcggtagatcgtctaaaagaattgcttctaaaatgaaaaaaaacactaattcagaaatggatcaacgactagggtataagtttttggtgcctgatcctaaagccggagttttttatagaccgttacatttccaatatgtatcgtattctaattttatattgcatcgattgcatgaaatcttgaccgtcaagcggccactcttatcgtttaagaataatacagaacgaattatgatagaaattagcaatgttaaagtgactcctccagattactcacctataatcgcgagtattaaaggtaagagttatgacgcattagccacgttcactgtaaatatctttaaagaggtaatgaccaaagagggtatatccatcactaaaataagtagttatgagggaaaagattctcatttgataaaaattccgctactaataggatacgggaataaaaatccacttgatacagccaagtatcttgttcctaatgtcataggtggagtctttatcaataaacaatctgtcgaaaaagtaggaattaatctagtagaaaagattacaacatggccaaaatttagggttgttaagccaaactcattcactttctcgttttcctccgtatcccctcctaatgtattaccgacaagatatcgccattacaagatatctctggatatatcacaattggaagcgttgaatatatcatcgacaaagacatttataacggtcaatattgttttgctgtctcaatatttatctagagtgagtctagaattcattagacgtagtttatcatacgatatgcctccagaagttgtctatctagtaaacgcgataatagatagtgctaaacgaattactgaatctattactgactttaatattgatacatacattaatgacctggtggaagctgaacacattaaacaaaaatctcagttaacgattaacgagttcaaatatgaaatgctgcataactttttacctcatatgaactatacacccgatcaactaaagggattttatatgatatctttactaagaaagtttctctactgtatcttccacacttctagatatccagatagagattcgatggtttgtcatcgcatcctaacgtacggcaaatattttgagacgttggcacatgatgaattagagaattacataggcaacatccgaaacgatatcatgaacaatcacaagaacagaggcacttacgcggtaaacattcatgtactaacaactcccggacttaatcatgcattttctagtctattgagtggaaagttcaaaaagtcagacggtagttatcgaacacatcctcactattcatggatgcagaatatttctattcctaggagtgttggattttatccggatcaagtaaagatttcaaagatgttttctgtcagaaaataccatccaagtcaatatctttacttttgttcatcagacgttccggaaagaggtcctcaggtaggtttagtatctcaattgtctgtcttgagttccattacaaatatactaacgtctgagtatttggatttggaaaagaaaatttgtgagtatatcagatcatattataaagatgatataagttactttgaaacaggatttccaatcactatagaaaatgctctagtcgcatctcttaatccaaatatgatatgtgattttgtaactgactttagacgtagaaaacggatgggattcttcggtaacttggaggtaggtattactttagttagggatcacatgaatgaaattcgcattaatattggagcaggaagattagtcagaccattcttggttgtggataacggagagctcatgatggatgtgtgtccggagttagaaagcagattagacgacatgacattctctgacattcagaaagagtttccgcatgtcattgaaatggtagatatagaacaatttacttttagtaacgtatgtgaatcggttcaaaaatttagaatgatgtcaaaggatgaaagaaagcaatacgatttatgtgactttcctgccgaatttagagatggatatgtagcatcttcactagtgggaatcaatcacaattctggacccagagctattcttggatgtgctcaagctaaacaagctatctcttgtctgagctcggatatacgaaataaaatagacaatggaattcatttgatgtatccagagaggccaatcgtgattagtaaggctttagaaacttcaaagattgcggctaattgcttcggccaacatgttactatagcattaatgtcgtacaaaggtatcaatcaagaggatggaattatcatcaaaaaacaatttattcagagaggcggtctcgatattgttacagccaagaaacatcaagtagaaattccattggaaaactttaataacaaagaaagagataggtctaacgcctattcaaaattagaaagtaatggattagttagactgaatgctttcttggaatccggagacgctatggcacgaaatatctcatcaagaactcttgaagatgattttgctagagataatcagattagcttcgatgtttccgagaaatataccgatatgtacaaatctcgcgttgaacgagtacaagtagaacttactgacaaagttaaggtacgagtattaaccatgaaagaaagaagacccattctaggagacaaatttaccactagaacgagtcaaaagggaacagtcgcgtatgtcgcggatgaaacggaacttccatacgacgaaaatggtatcacaccagatgtcattattaattctacatccatcttctctagaaaaactatatctatgttgatagaagttattttaacagccgcatattctgctaagccgtacaacaataagggagaaaaccgacctgtctgttttcctagtagtaacgaaacatccatcgatacatatatgcaattcgctaaacaatgttatgagcattcaaatccgaaattgtctgatgaagaattatcggataaaatcttttgtgaaaagattctctatgatcctgaaacggataagccttatgcatccaaagtattttttggaccaatttattacttgcgtctgagacatttaactcaggacaaggcaaccgttagatgtagaggtaaaaagacgaagctcattagacaggcgaatgagggacgaaaacgtggaggaggtatcaagttcggagaaatggagagagactgtttaatagcgcatggtgcagccaatactattacagaagttttgaaagattcggaagaagattatcaagatgtgtatgtttgtgaaaattgtggagacatagcagcacaaatcaagggtattaatacatgtcttagatgttcaaaacttaatctctctcctctcttaacaaaaattgataccacgcacgtatctaaagtatttcttactcaaatgaacgccagaggcgtaaaagtcaaattagatttcgaacgaaggcctccttcgttttataaaccattagataaagttgatctcaagccgtcttttctggtgtaatattctagtttggtagtagatacatatcaatatcatcaaattcgagatccgaattataaaatgggcgtggattgttaactatagaatcggacgtctgatattcgaaaatctgtggagtttcaggttttggtggaggtgtaactgctacttgggatactgaagtctgatattcagaaagctgtggatgttctggttcggcatccaccgatggtgtcacatcactaatcggttcggtaacgtctgtggatggaggtgctacttctacagaacctgtagcctcagttgtcaacggagatacatttttaatgcgagaaaatgtataatttggtaatggtttcttatgtggatctgaagaagaggtaagatatctactagaaagataccgatcacgttctagttctcttttgtagaacttaactttttctttctccgcatctagttgatattccaacctcttcacgttactacgttcagattccaattcacgttcgcatgggttacctccgcagtttttacgagcgatttcacgttcagccttcatgcgtctctccctctctctatcgagtttatcagagcagtctttctgaaggcgatcgaactccataaatttctccaacgctttgattgtttccatagatttccgaagttcagcttttaggactgtgattctttttctttcgaattcacagctggatgtacaaccgtttccattaccgccatctctaagtttcttttctagatcggcaacatttcatccccatgccttttacattcctcgagtctactgtcgtcgaaatatcgttccagctccttttcgacatcaataactttagcacgttgtctctcaagctctcttttgtagttatctgattccctggcacgtttaagatcttcatgcaattgagtcagctcttaacttcctctcttgcttcttcgtcatagtacgcgcaatcactgtgagatccattgttaccacgtctacactcggcgagctcgcgtttaagagattcaatttcccgtttgtattggtccatgtttccattgctaccaccattagatttacaggctgctagttgtcgttcgagatcagaaatacgggttttcttggaattgatttcgtcgatgtacttggcatcgaaacacttattaagttctttttccaattctacgattttatttctttcgcgagtcaattccctcctgtagtaactatctgttttgtcagattcacgctctctacgtagactttcttgcaagttactaatttgttccctagcacgtccgagtttagttttatatgctgaatagagttctgattcatcctttgagcagatctctagcgatcgtttaagattcctaattctagtctttagcctatttacctcctcagaagatgttccgttaccgttgcgtttacactcgttaagctgtctatcaagatccatgattctatctctaagacgttgcatctctctttccatatcagcattgctttcattattacgtctgcagtcactcaactgtctttcaatatctgagattctatctctaagacgtcgcatctctctctgtttcggcattggtttcattattacgtttacagtcgttcaactgtctttcaagatctgatattctagattggagtctgctaatctctgtagcattttcacggcattcactcagttgtctttcaagatctgaaattttagattggagtctgctaatctctgtaagatttcctcctccgctctcgatgcagtcggtcaacttattctctagttctctaatacgcgaacgcagtgcatcaacttcttgcgtgtcttcctggttgcgtgtacattcatcgagtctagattcgagatctctaacgcgtcgtcgttcttcctcaagttctctgcgtactacagaaagcgtgtccttatcttgttgatatttagcaatttctgattctagagtactgattttgcttacgtagttactaatatttgtcttggccttatcaagatcctccttgtatttgtcgcattccttgatatccctacgaagtctggacagttcccattcgacattacgacgtttatcgatttcagctcggagatcgtcatcgcgttgttttagccacatacgactgagttcaagttctcgttgacaagatccatctacttttccattcctaatagtatccagttccttttctagttctgaacgcatttctcgttccctatcaagcgattctctcaattctcggatagtcttcttatcaatttctaataaatctgaaccatcatctgtcccattttgaatatccctgtgttctttgatctcttttgtaagtcggtcgattctttcggttttataaacagaatccctttccaaagtcctaatcttactgagtttatcactaagttctgcattcaattcggtgagttttctcttggcttcttccaactctgttttaaactctccactatttccgcattcttcctcgcatttatctaaccattcaattagtttattaataactagttggtaatcagcgattcctatagccgttcttgtaattgtgggaacataattaggatcttctaatggattgtatggcttgatagcatcatctttatcattattagggggatggacaaccttaattggttggtcctcatctcctccagtagcgtgtggttcttcaataccagtgttagtaataggcttaggcaaatgcttgtcgtacgcgggcacttcctcatccatcaagtatttataatcgggttctacttcagaatattcttttctaagagacgcgacttcgggagttagtagaagaactctgtttctgtatctatcaacgctggaatcaatactcaagttaaggatagcgaatacctcatcgtcatcatccgtatcttctgaaacaccatcatatgacatttcatgaagtctaacgtattgataaatagaatcagatttagtattaaacagatccttaacctttttagtaaacgcatatgtatattttagatctccagatttcataatatgatcacatgccttaaatgtcagtgcttccatgatataatctggaacactaatgggtgacgaaaaagatacagcaccatatgctacgttgataaataaatctgaaccactaagtagataatgattaatgttaagaaagaggaaatattcagtgtataggtatgtcttggcgtcatatcttgtactaaacacgctaaacagtttgttaatgtgatcaatttccaatagattaattagagcagcgggaataccaacaaacatattaccacatccgtattttctatgaatatcacatatcatgttaaaaaatcttgatagaagagcgaatatctcgtctgacttaatgagtcgtagttcagcagcaacataagtcataactgtaaatagaacatactttcctgtagtgttgattctagactccacatcaacaccattattaaaaatagttttatatacatctttaatctgctctccgttaatcgtcgaacgttctagtatacggaaacactttgatttcttatctgtagttaatgacttagtgatatcacgaagaatattacgaattacatttcttgtttttcttgagagacctgattcagaactcaactcatcgttccatagtttttctacctcagtggcgaaatctttggagtgcttggtacatttttcaataaggttcgtgacctccatttattataaaaaatttattcaaaacttaactacaatcgggtaattataaaatcgtagatctcccatgtggcggaatactaccatctatcgcatgtggatggacagtaggtaatggccatgggaacagtaatgtttgcatatttatctttcttgccagtattactgcatattgtcccaatgtttcgatgtgatgttctaacctatcaactgccgctgtatcacaacaatagtgtccgatgaaattaagattatgatccaatgtgtttaatatatgattatcaagtcttatacgatccgcgtcttttttgacaggatcaggttcttctacaggaagaagtttcggcctcttatgatattcatgtctgggaaacggtggtctagggtgaggctccggtatcggagtgggttttggattataatcatcatcgtctatgacatcatcttcgacttcgatatttattttgctatcttgatgatgtcctgtatcagttgcattttcagcactcgactgaatattagcgcattcattgtctattattaccatatttctaaacccaaaatgtatgtgttgaacatcagtactatcgttgatgagtcttatagcatgaattcgcttatcgttatcgggtttatcttctgtcaccttagcaattccttttttattaaactctacataatcatatccatttctattgtttgttctaatataaacgagtatagcatcattgctaaatttttcaatagtatcaaaaacagaatatcctaaaccatataatatatattcaggaacactcaaactaaatgtccaggattctcctaaatacgtaaactttaatagtgcgaaatcattcaaaaatctaccacttatagatagatagtacataaatgcgtatagtagtctacctatctctttattatgaaaaccggcattacgatcatatatgtcgtgatatacctgtgatccgtttacgttaaaccataaatacatgggtgatcctataaacatgaatttatttctaattctcagagctatagttaattgaccgtgtaatatttgcttacatgcatacttgatacgcttattaataagatttttatcattgctcgttatttcagaatcgtatatataaggagtaccatcgtgattcttaccagatattatacaaaatactatatataaaatatattgacccacgttagtaatcatataaatgtttaacgttttaaattttgtattcaatgatccattatcatacgctatcatggtcttgtaatattcattctttaaaatataatattgtgttagccattgcattggagctcctaatggagattttctattctcatccattttaggataggctttcataaagtccctaataacttcgtgaataatgtttctatgttttctactgatgcatgtatttgcttcgatttttttatcccatgtttcatctatcatagatttaaacgcagtaatgctcgcaacattaacatcttgaaccgttggtacaattccgttccataaatttataatgttcgccatttatataactcattttttgaatatacttttaattaacaaaagagttaagttactcatatggacgccgtccagtctgaacatcaatctttttagccagagatatcatagccgctcttagagtttcagcgtgattttccaacctaaatagaacttcatcgttgcgtttacaacacttttctatttgttcaaactttgttgttacattagtaatctttttttccaaattagttagccgttgtttgagagtttcctcattgtcgtcttcatcggctttaacaattgcttcgcgtttagcctctggctttttagcagcctttgtagaaaaaaattcagttgctggaattgcaagatcgtcatctccggggaaaagagttccgtccatttaaagtacagattttagaaactgacactctgcgttatttatatttggtacaacacatggattataaatattgatgttaataacatcagaaaatgtaaagtctatacattgttgcatcgtgttaaattttctaatggatctagtattattgggtccaacttctgcctgaaatccaaatatggaagcggatacaaaaccgtttcctggataaaccacacatctccacttttgctttacatcagaaattgtgtcgttgacatcttgaactctcctatctaatgccggtgttccacctatagattttgaatattcgaatgctgcatgagtagcattaaattccttaatattgccataattttcatatattgagtaaccctggataaaaagtaaacacaccgcagccgtcgctaccacaataaaaaaaattgatagagagttcatttataatctattagaagctgacaaaatttttttacacgcatcagacaatgctttaataaatagttcaacatctacttttgtcatatcgaaccgatggtatgattctaacctagaattacatccgaaaaagttgactatgttcatagtcattaagtcattaacaaacaacattccagactctggattataagacgatactgtttcgtcacaattacctaccttaatcatgtgattatgaatattggctattagagcaccttctaagaaatctataatatctttgaaacacgatttaaaatcaaaccacgaatatacttctacgaagaaagttagtttacccataggagaaataactataaatggagatctaaatacaaaatccggatctatgatagttttaacattattatattctctattaaatacctccacatctaaaaatgttaattttgaaactatgtcttcgtttattaccgtacctgaactaaacgctataagctctattgtttgagaactctttaaacgatattcttgaaatacatgtaacaaagtttcctttaactcggtcggtttatctaccatagttacagaatttgtatccttatctataatataataatcaaaatcgtataaagttatataattatcgcgttcagattgggatcttttcaaatagactaaaaaccccatttctctagtaagtatcttatgtatatgtttgtaaaatatcttcatggtgggaatatgctctaccgcagttagccattcctcattgacagcggtagatgtattagacaaaactattccaatgtttaacaagggccattttacgagattattaaatccttgtttgataaatgtagccaatgagggttcgagttcaacgacgattgaattctcttcccgcggatgctgcatgatgaacgacgggatgttgttcgattgatttggaattctttttcgactttttgtttatattaaatattttaaaatttatagcggatagcaattcatgtaccacggataatgtagacgcgtattgcgcatcgatatctttattattagataaatttatcaataaatgtgagaagtttgcctcgttaaggtcttccatttaaatattatataaacatttgtgtttgtaacttattcgtcttttatggaatagttttttactagtaaagctgcaattacacactttgtccgtaaaacataaatataaacaccagcttttatcaatcgttccaaaaagtcgacggcggacatttttaacatggcatctattttaaatacacttaggtttttggaaaaaacatcattttataattgtaacgattcaataactaaagaaaagattaagattaaacataagggaatgtcatttgtattttataagccaaagcattctaccgttgttaaatacttgtctggaggaggtatatatcatgatgatttggttgtattggggaaggtaacaattaataatctaaagatgatgctattttacatggatttatcatatcatggagtgacaagtagtggagcaatttacaaattgggatcgtctatcgatagactttctctaaataggactattgttacaaaagttaataattatgatgatacattttttgacgacgatgattgatcgctattgcacaattttgtttttgtactttctaatatagtgtttaggttctttttcatatgagaatattgatttactaaaatatctatgtttaacttttgttctatgacgtccttatcggcggtatcggtacatatacgtaattcaccttcacaaaatacggagtcttcgataataatagccaatcgattattggatctagctgtctgtatcatattcaacatgtttaatatatcctttcgtttcccctttacaggcatcgatcgtagcatattttccgcgtctgatatggaaatgttaaaactacaaaaatgcgtaatgttagcccgtcctaatattggtacgtgtctataagtttggcatagtagaataatagacgtgtttaaatgccttccaaagtttaagaattctattagagtattgcattttgatagtttatcgcctacatcatcaaaaataagtaaaaagtgtgctgattttttatgattttgtgcgacagcaatacatttttctatgttacttttagttcgtatcagattatattctagagattcctgactactaacgaaattaatatgatttggccaaatgtatccatcataatctgggttataaacgggtgtaaacaagaatatatgtttatattttttaactagtgtagaaaacagagatagtaaatagatagtttttccagatccagatcctcctgttaaaaccattctaaacggcatttttaataaattttctcttgaaaattgtttttcttggaaacaattcataattatatttacagttactaaattaatttgataataaatcaaaatatggaaaactaaggttgttagtagggaggagaacaaagaaggcacatcgtgatataaataacatttattatcatgatgacaccagaaaacgacgaagagcagacatctgtgttctccgctactgtttacggagacaaaattcagggaaagaataaacgcaaacgcgtgattggtctatgtattagaatatctatggttatttcactactatctatgattaccatgtccgcgtttctcatagtgcgcctaaatcaatgcatgtctgctaacgaggctgctattactgacgccgctgttgccgttgctgctgcatcatctactcatagaaaggttgcgtctagcactacacaatatgatcacaaagaaagctgtaatggtttatattaccagggttcttgttatatattacattcagactaccagttattctcggatgctaaagcaaattgcactgcggaatcatcaacactacccaataaatccgatgtcttgactacctggctcattgattatgttgaggatacatggggatctgatggtaatccaattacaaaaactacatccgattatcaagattctgatgtatcacaagaagttagaaagtatttttgtgttaaaacaatgaactaatatttatttttgtacattaataaatgaaatcgcttaatagacaaactgtaagtaggtttaagaagttgtcggtgccggccgctataatgatgatactctcaaccattattagtggcataggaacatttctgcattacaaagaagaactgatgcctagtgcttgcgccaatggatggatacaatacgataaacattgttatttagatactaacattaaaatgtctacagataatgcggtttatcagtgtcgtaaattacgagccagattgcctagacctgatactagacatctgagagtattgtttagtattttttataaagattattgggtaagtttaaaaaagaccaataataaatggttagatattaataatgataaagatatagatattagtaaattaacaaattttaaacaactaaacagtacgacggatgctgaagcgtgttatatatacaagtctggaaaactggttaaaacagtatgtaaaagtactcaatctgtactatgtgttaaaaaattctacaagtgacaacaaaaaatgaattaataataagtcgttaacgtacgccgccatggacgccgcgtttgttattactccaatgggtgtgttgactataacagatacattgtatgatgatctcgatatctcaatcatggactttataggaccatacattataggtaacataaaaactgtccaaatagatgtacgggatataaaatattccgacatgcaaaaatgctactttagctataagggtaaaatagttcctcaggattctaatgatttggctagattcaacatttatagcatttgtgccgcatacagatcaaaaaataccatcatcatagcatgcgactatgatatcatgttagatatagaagataaacatcagccattttatctattcccatctattgatgtttttaacgctacaatcatagaagcgtataacctgtatacagctggagattatcatctaatcatcaatccttcagataatctgaaaatgaaattgtcgtttaattcttcattctgcatatcagacggcaatggatggatcataattgatgggaaatgcaatagtaattttttatcataaaagttgtaaagtaaataataaaacaataaatattgaactagtagtacgtatattgagcaatcagaaatgatgctggtacctcttatcacggtgaccgtagttgcgggaacaatattagtatgttatatattatatatttgtaggaaaaagatacgtactgtctataatgacaataaaattatcatgacaaaattaaaaaagataaagagttctaattccagcaaatctagtaaatcaactgatagcgaatcagactgggaggatcactgtagtgctatggaacaaaacaatgacgtagataatatttctaggaatgagatattggacgatgatagcttcgctggtagtttaatatgggataacgaatccaatgttatggcgcctagcacagaacacatttacgatagtgttgctggaagcacgctgctaataaataatgatcgtaatgaacagactatttatcagaacactacagtagtaattaatgaaacggagactgttaaagtacttaatgaagataccaaacagaatcctaactattcatccaatcctttcgtaaattataataaaaccagtatttgtagcaagtcaaatccgtttattacagaacttaacaataaatttagtgagaataatccgtttagacgagcacatagcgatgattatcttaataagcaagaacaagatcatgaacacgatgatatagaatcatcggtcgtatcattggtgtgattagtttcctttttataaaattgaagtaatatttagtattattgctgccgtcacgttgtacaaatggagatattccctgtattcggcatttctaaaattagcaattttattgctaataatgactgtagatattatatagatacagaacatcaaaaaattatatctgatgagatcaatagacagatggatgaaacggtacttcttaccaacatcttaagcgtagaagttgtaaatgacaatgagatgtaccatcttattcctcatagattatcgacgattatactctgtattagttctgtcggaggatgtgttatctctatagataatgacatcaatggcaaaaatattctaacctttcccattgatcatgctgtaatcatatccccactgagtaaatgtgtcgtagttagcaagggtcctacaaccatattggttgttaaagcggatatacctagcaaacgattggtaacatcgtttacaaacgacatactatatgtaaacaatctgtcactgattaattatttgccgttgtctgtattcattattagacgagtcaccgactatttggatagacacatatgcgatcagatatttgctaataataagtggtattcccttataaccatcgacgataagcaatatcctattccatcaaactgtataggtatgtcctctgccaagtacataaattctagcatcgagcaagatactttaatccatgtttgtaacctcgagcatccgttcgactcagtatacaaaaaaatgcagtcgtacaattctctacctatcaaggaacaaatattgtacggtagaattgataatataaatatgagcattagtatttctgtggattaatagatttctagtatggggatcattaatcatctctaatctctaaatacctcataaaacgaaaaaaaagctattatcaaatactgtacggaatggattcattctcttctctttttatgaaactctgttgtatatctactgataaaactggaagcaaaaaatctgatagaaagaataagaataagatcaaggattatatggaacacgattattataaaataacaatagttcctggttcctcttccacgtctactagctcgtggtattatacacatgcctagtaatagtctctttgcgttgacggaaagcagactagaaataacaggctaaaatgttcagacaccataatagttcccaacccagataataacagagttccatcaacacattcctttaaactcaatcccaaacccaaaaccgttaaaatgtatccggccaattgatagtagataatgaggtgtacagcgcatgataatttacacagtaaccaaaatgaaaacactttagtaattataagaaatatagacggtaatgtcatcatcaacaatccaataatatgcctgagagtaaacattgatggataaaacaaaaatgctccgcataactctatcatggcaataacacaaccaaatacttgtaagattcctaaattagtagaaaatacaacggatatcgatgtataagtgatctcgagaaataataagaataaagtaatgcccgtaaagataaacatcaacattgtttggtaatcattaaaccaattagtatgaagttgaactaatttcacagtagattttattccagtattatccccgcatgtatacgtacctggtaagatatctttatattccataatcaatgagacatcactatccgataacgaatgaagtctagcactagtatgccatttacttaatatggtcgtcttggaagttttattataagttaaaatatcatggttatccaatttccatctaatatactttgtcggattatctatagtacacggaataatgatggtatcattacatgctgtatactctatggtctttgtagttgttataacaaccaacgtatagaggtatatcaacgatattctaactcttgacattttttatttatttaaaatgatacctttgttatttattttattctattttgctaacggtattgaatggcataagtttgaaacgagtgaagaaataatttctacttacttattagacgacgtattatacacgggtgttaatggggcggtatacacattttcaaataataaactaaacaaaactggtttaactaataataattatatcacaacatctataaaagtagaggatgcggataaggatacattagtatgcggaaccaataacggaaatcccaaatgttggaaaatagacggttcagacgacccaaaacatagaggtagaggatacgctccttatcaaaatagcaaagtaacgataatcagtcacaacggatgtgtactatctgacataaacatatcaaaagaaggaattaaacgatggagaagatttgacggaccatgtggttatgatttatacacggcggataacgtaattccaaaagatggtttacgaggagcattcgtcgataaagatggtacttatgacaaagtttacattcttttcactgatactatcggctcaaagagaattgtcaaaattccgtatatagcacaaatgtgcctaaacgacgaaggtggtccatcatcattgtctagtcatagatggtcgacgtttctcaaagtcgaattagaatgtgatatcgacggaagaagttatagacaaattattcattctagaactataaaaacagataatgatacgatactatatgtattcttcgatagtccttattccaagtccgcattatgtacctattctatgaataccattaaacaatctttttctacgtcaaaattggaaggatatacaaagcaattgccgtctccagctcctggtatatgtttaccagctggaaaagttgttccacataccacgtttgaagtcatagaaaaatataatgtactagatgatattataaagcctttatctaaccaacctatcttcgaaggaccgtctggtgttaaatggttcgatataaaggagaaggaaaatgaacatcgggaatatagaatatacttcataaaagaaaattctatatattcgttcgatacaaaatctaaacaaactcgtagctcgcaagtcgatgcgcgactattttcagtaatggtaacttcgaaaccgttatttatagcagatatagggataggagtaggaatgccacaaatgaaaaaaatacttaaaatgtaatcttaatcgagtacaccacacgacaatgaacaaacataagacagattatgctggttatgcttgctgcgtaatatgcggtctaattgttggaattatttttacagcgacactattaaaagttgtagaacgtaaattagttcatacaccatcaatagataaaacgataaaagatgcatatattagagaagattgtcctactgactggataagctataataataaatgtatccatttatctactgatcgaaaaacctgggaggaaggacgtaatgcatgcaaagctctaaatccaaattcggatctaattaagatagagactccaaacgagttaagttttttaagaagcattagacgcggatattgggtaggagaatccgaaatattaaaccagacaaccccatataattttatagctaagaatgccacgaagaatggaactaaaaaacggaaatatatttgtagcacaacgaatactcccaaactgcattcgtgttacactatataacaattacactacatttttatcataacactacttcggttagatgttttagaaaaaaataaatatcgccgtaccgttcttgtttttataaaaataacaattaacaattatcaaattttttctttaatattttacgtggttgaccattcttggtggtaaaataatctcttagtgttggaatggaatgctgtttaatgtttccacactcatcgtatattttgacgtatgcagtcacatcgtttacgcaatagtcagactgtagttctatcatgcttcctacattagaaggaggaacagttttaaagtctcttggttttaatctattaccgttagttttcatgaaatcctttgttttatccacttcacattttaaataaatgtccactatacattcttttgttaattttactagatcgtcatgggtcatagaatttataggttccgtagtccatggatccaaactagcaaacttcgcgtatacggtatcgcgattagtgtatacaccaactgtatgaaaattaagaaaacagtttaatagatcaacagaaatatttaatcctccgtttgatacagatgcgccatatttatggatttcggattcacacgttgtttgtctgaggtgttcgtctagtgttgcttctacgtaaactttgattcccatatattctttattgtcagaatcgcataccgatttatcatcatacactgtttgaaaactaaatggtatacacatcaaaataacaaatactaacgagtacattctgcaatattgttatcgtaattggaaaaatagtgttcgagtgagttggattatgtgagtattggattgtatattttattttatattttgtaataagaataaaatgctaatgtcaagtttattccaatagatgtcttattaaaaacatatataataaataacaatggctgaatggcataaaattatcgaggatatctcaaaaaataataagttcgaggatgccgccatcgttgattacaagactacaaagaatgttctagctgctattcctaacagaacatttgccaagattaatccgggtgaaattattcctctcatcactaatcgtaatattctaaaacctcttattggtcagaaatattgtattgtatatactaactctctaatggatgagaacacgtatgctatggagttgcttactgggtacgcccctgtatctccgatcgttatagcgagaactcataccgcacttatatttttgatgggtaagccaacaacatccagacgtgacgtgtatagaacgtgtagagatcacgctacccgtgtacgtgcaactggtaattaaaataaaaagtaatattcatatgtagtgtcaattttaaatgatgatgatgaaatggataatatccatattgacgatgtcaataatgccggtattggcatacagttcatcgatttttagatttcattcagaggatgtggaattatgttatgggcatttgtattttgataggatctataatgtagtaaatataaaatataatccgcatattccatatagatataattttattaatcgcacgttaaccgtagatgaactagacgataatgtcttttttacacatggttattttttaaaacacaaatatggttcacttaatcctagtttgattgtctcattatcaggaaacttaaaatataatgatatacaatgctcagtaaatgtatcgtgtctcattaaaaatttggcaacgagtacatctactatattaacatctaaacataagacttattctctacatcggtccacgtgtattactataataggatacgattctattatatggtataaagatataaatgacaagtataatgacatctatgattttactgcaatatgtatgctaatagcgtctacattgatagtgaccatatacgtgtttaaaaaaataaaaatgaactcttaattatgctatgctattagaaatggataaaatcaaaattacggttgattcaaaaattggtaatgttgttaccatatcgtataacttggaaaagataactattgatgtcacacctaaaaagaaaaaagaaaaggatgtattattagcgcaatcagttgctgtcgaagaggcaaaagatgtcaaggtagaagaaaaaaatattatcgatattgaagatgacgatgatatggatgtagaaagcgcgtaatacgatctataaaaataagtatataaatactttttatttactgtactcttactgtgtagtggtgataccctactcgattatttttttaaaaaaaaaatacttattctgattcttctagccatttccgtgttcgtttgaatgccacatcgacgtcaaagataggggagtagttgaaatctagttctgcattgttggtacgcacctcaaatgtagtgttggatatcttcaacgtatagttgttgagtagtgatggttttctaaatagaattctcttcatatcattcttgcacgcgtacatttttagcatccatcttggaatcctagatccttgttctattcccaatggtttcatcaatagaagattaaacatatcgtacgaacacgatggagagtaatcgtagcaaaagtaagcatttcctttaatcttagatcccggatactggatatattttgcagccaacacgtgcatccatgcagcatttcctacatatacccggctatgcaccgcgtcatcatcgactgtacgatacataatgttaccgtgttgcttacattgctcgtaaaagactttcatcaatttgtctccttctccgtaaattccagtgggtcttaggcaacaagtatacaattttgctccattcatgattacggaattattggctttcataaccagttgctcggccatacgtttactttttgcgtatacatgtcctggtgatatatcataaagggtatgctcatggccgatgaatggatcaccgtgtttattgggtcctattgcttccatgctactagtatagatcaaatacttgattcctaggtccacacaagctgccaaaatagtctgtgttccataatagtttactttcatgatttcattatcggtgtattttccaaatacatccactagagcagccgtatgaataatcagatttaccccatctagcgcttctctcaccttatcaaagtcgtttatatcacattgtatatagtttataaccttaactttcgaggttattggttgtggatcttctacaatatctatgactctgatttcttgaacatcatctgcactaattaacagttttactatatacctgcctagaaatccggcaccaccagtaaccgcgtacacggccattgctgccactcataatatcagactacttattctattttactaaataatggctgtttgtataatagaccacgataatatcagaggagttatttactttgaaccagtccatggaaaagataaagttttaggatcagttattggattaaaatccggaacgtatagtttgataattcatcgttacggagatattagtcaaggatgtgattccataggcagtccagaaatatttatcggtaacatctttgtaaacagatatggtgtagcatatgtttatttagatacagatgtaaatatatctacaattattggaaaggcgttatctatttcaaaaaatgatcagagattagcgtgtggagttattggtatttcttacataaatgaaaagataatacattttcttacaattaacgagaatggcgtttgatatatcagttaatgcgtctaaaacaataaatgcattagtttacttttctactcagcaaaataaattagtcatacgtaatgaagttaatgatacacactacactgtcgaatttgatagggacaaagtagttgacacgtttatttcatataataaacataatgacaccatagagataagaggggtgcttccagaggaaactaatattggttgcgcggttagtatgacttacttgtataataagtatagttttaaactgattttagcagaatatataagacacagaaatactatatccggcaatatttattcggcattgatgacactagatgatttggctattaaacagtatggagacattgatctattatttaatgagaaacttaaagtagactccgattcgggactatttgactttgtcaactttgtaaaggatatgatatgttgtgattctagaatagtagtagctctatctagtctagtatctaaacattgggaattgacaaataaaaagtataggtgtatggcattagccgaacatatatctgatagtattccaatatctgagctatctagactacgatacaatctatgtaagtatctacgcgggcacactgagagcatagaggatgaatttgattattttgaagacgatgattcgtctacatgttctgccgtaaccgacagggaaacggatgtataattttttttatagcgtgaaggatatgataaaaaatataattgttgtatttatcccattccaatcaccttatatgattctgtaacacaataaaggagtctcatagatgtatagaggtcagatactggtttgataaactgtttattccacataagtatgtttgactttatggttagacccgcatactttaacaaatcactgaaaattggagttaggtattgacctctcagaatcagttgccgttctggaacattaaatgtattttttatgatatactccaacgcatttatgtgggcatacaacaagtcattactaatggagtattccaagagttttagttgtctagtatttaacaagagaagagatttcaacagactgtttatgaactcgaatgccgcctcattgtcgcttatattgatgatgtcgaattctcccaatatcatcactgatgagtagctcatcttgttatcgggatccaagttttctaaagatgtcattaaaccctcgatcatgaatggatttatcatcatcgtttttatgttggacatgagcttagtccgtttgtccacatctatagacgacgatttctgaattatttcatatatccctctctttaactccaggaacttgtcaggatggtctactttaatatgttctcgtctaagagatgaaaatctttggatggttgcacgcgacttttctctaaaggatgacgttgcccaagatcctctcttaaatgaatccatcttatccttggacaagatggacagtctattttccttagatggtttaatatttttgttacccatgatctataaaggtagacctaatcgtctcggatgacctatatatttattttcagttttattatacgcataaattgtaaaaaatatgttaggtttacgaaaatgtctcgtggggcattaatcgtttttgaaggattggacaaatctggaaaaacaacacaatgtatgaacatcatggaatctataccggcaaacacgataaaatatcttaactttcctcagagatccactgtcactggaaagatgatagatgactatctaactcgtaaaaaaacctataatgatcatatagttaatctattattttgtgcaaatagatgggagtttgcatcttttatacaagaacaactagaacagggaattactttaatagttgatagatacgcattttctggagtagcgtatgccgccgctaaaggcgcgtcaatgactctcagtaagagttatgaatctggattgcctaaacccgacttagttatattcttggaatctggtagcaaagaaattaatagaaacgtcggcgaggaaatttatgaagatgttacattccaacaaaaggtattacaagaatataaaaaaatgattgaagaaggagatattcattggcaaattatttcttctgaattcgaggaagatgtaaagaaggagttgattaagaatatagttatagaggctatacacacggttactggaccagtggggcaactgtggatgtaatagtgaaattacattttttataaatagatgttagtacagtgttataaatggatgaagcatattactctggcaacttggaatcagtactcggatacgtgtccgatatgcataccgaactcgcatcaatatctcaattagttattgccaagatagaaactatagataatgatatattaaacaaggacattgtaaattttatcatgtgtagatcaaacttggataatccatttatctctttcctagatactgtatatactattatagatcaagagaactatcagaccgaattgattaattcattagacgacaatgaaattatcgattgtatagttaataagtttatgagcttttataaggataacctagaaaatatagtagatgctatcattactctaaaatatataatgaataatccagattttaaaactacgtatgccgaagtactcggttccagaatagccgatatagatattaaacaagtgatacgtaagaatatactacaattgtctaatgatatccgcgaacgatatttgtgaaaaatattaaaaaaaaatactttttttattaaatgacgtcgcttcgcgaatttagaaaattatgctgtgatatatatcacgcatcaggatataaagaaaaatctaaattaattagagactttataacagatagggatgataaatatttgatcattaagctattgcttcccggattagacgatagaatttataacatgaacgataaacaaattataaaattatatagtataatatttaaacaatctcaggaagatatgctacaagatttaggatacggatatataggagacactattaggactttcttcaaagagaacacagaaatccgtccacgagataaaagcattttaactttagaagaagtggatagttttttaactacgttatcatccgtaactaaagaatcgcatcaaataaaattattgactgatatcgcatccgtttgtacatgtaatgatttaaaatgtgtagtcatgcttattgataaagatctaaaaattaaagcgggtcctcggtacgtacttaacgctattagtcctcatgcctatgatgtgtttagaaaatctaataacttgaaagagataatagaaaatgcatctaaacaaaatctagactctatatctatttctgttatgactccaattaatcccatgttagcggaatcgtgtgattctgtcaataaggcgtttaaaaaatttccatcaggaatgtttgcggaagtcaaatacgatggtgaaagagtacaagttcataaaaataataacgagtttgccttctttagtagaaacatgaaaccagtactctctcataaagtggattatctcaaagaatacataccgaaagcatttaaaaaagctacgtctatcgtattggattctgaaattgttcttgtagacgaacataatgtaccgctaccgtttggaagtttaggaatacacaaaaagaaagaatataaaaactctaacatgtgtttgttcgtgtttgactgtttgtactttgatggattcgatatgacggacattccattgtacgaacgaagatcttttctcaaagatgttatggttgaaatacccaatagaatagtattctcagagttgacgaatattagtaacgagtctcagttaactgacgtattggatgatgcactaacgagaaaattagaaggattggtcttaaaagatattaatggagtatacgaaccgggaaagagaagatggttaaaaataaagcgagactatttgaacgagggttccatggcagattctgccgatttagtagtactaggtgcctactatggtaaaggagcaaagggtggtatcatggcagtctttctaatgggttgttacgacgatgaatccggtaaatggaagacggttaccaagtgttcaggacacgatgataatacgttaagggagttgcaagaccaattaaagatgattaaaattaacaaggatcccaaaaaaattccagagtggttagtagttaataaaatctatattcccgattttgtagtagaggatccgaaacaatctcagatatgggaaatttcaggagcagagtttacatcttccaagtcccataccgcaaatggaatatccattagatttcctagatttactaggataagagaggataaaacgtggaaagaatctactcatctaaacgatttagtaaacttgactaaatcttaatagttacatacaaactgaaaattaaaataacactatttagttggtggtcgccatggatggtgttattgtatactgtctaaacgcgctagtaaaacatggcgaggaaataaatcatataaaaaatgatttcatgattaaaccatgttgtgaaagagtttgtgaaaaagtcaagaacgttcacatcgacggacaatctaaaaacaatacagtgattgcagatttgccatatctggataatgcggtatccgatgtatgcaattcactgtataaaaagaatgtatcaagaatatccagatttgctaatttgataaagatagatgacgatgacaagactcctactggtgtatataattattttaaacctaaagatgccattcctgttatcatatctataggaaaggataaagatgtctgtgaactattaatctcatctgataaagcgtgtgcgtgtatagagttaaattcatataaagtagccattcttcccatggatgtttccttttttaccaaaggaaatgcatcattgattattctcctgtttgatttctctatcgatgcggcacctctcttaagaagtgtaaccgataataatgttattatatctagacaccagcgtctacatgacgagcttccgagttccaattggttcaagttttacataagtataaagtccgactattgttctatattatatatggttgttgatggatctgtgatgcatgcgatagctgataatagaactcacgcaattattagcaaaaatatattagacaatactacgattaacgatgagtgtagatgctgttattttgaaccacagattaggattcttgatagagatgagatgctcaatggatcatcgtgtgatatgaacagacattgtattatgatgaatttacctgatgtaggcgaatttggatctagtatgttggggaaatatgaacctgacatgattaagattgctctttcggtggctggtaatttaataagaaatcgagactacattcccgggagacgaggatatagctactacgtttacggtatagcctctagataatttttttaagcacgaaataaaaaacataattttaaaccaatctatttcatactattttgtgtgatcaccatggacataaagatagatattagtatttctggtgataaatttacggtgactactaggagggaaaatgaagaaagaaaaaaatatctacctctccaaaaagaaaaaactactgatgttatcaaacctgattatcttgagtacgatgacttgttagatagagatgagatgtttactattctagaggaatattttatgtacagaggtctattaggcctcagaataaaatatggacgactctttaacgaaattaaaaaattcgacaatgatgcggaagaacaattcggtactatagaagaactcaagcagaaacttagattaaattctgaagagggagcagataactttatagattatataaaggtacaaaaacaggatatcgtcaaacttactgtatacgattgcatatctatgataggattgtgtgcatgcgtggtagatgtttggagaaatgagaaactgttttctagatggaaatattgtttacgagcgattaaactgtttattgatgatcacatgcttgataagataaaatctatactgcagaatagactagtatatgtggaaatgtcatagaaagttaaaagttaatgagagcaaaaatatataaggttgtattccatatttgttattttttctgtaatagttaaaaaaatacattcgatggtctatctatcagattattatgtgttataaggtactttttctcataataaactagagtatgagtaagatagtgtttttcaaaacatataaatctaaaattgatggatgagatatacagctattaatttcgaaaatatattttaatctgataactttaaacatggatttttgatggtggtttaacgttttaaaaaaagattttgttattgtagtatatgataatattaaaagatggatataaagaatttgctgactgcatgtactattttttacattactacattggctacggcagatatacctacttcgtcactgccacacgctccggtaaacggggcatgtgacgagggagaatatcttgataagaggcataatcaatgttgtaatcagtgtccacctggagaatttgccaaggtcagatgtaatggtaacgataacacaaaatgtgaacgctgcccacctcatacatataccgcaatccccaattactctaatggatgtcatcaatgtagaaaatgcccaacaggatcatttgataaggtaaagtgtaccggaacacagaacagtaaatgttcgtgtcttcctggttggtattgcgctactgattcttcacagactgaagattgtcgagattgtataccaaaaaggagatgtccatgcggatactttggtggaatagatgaacaaggaaatcctatttgtaaatcgtgttgtgttggtgaatattgcgactacctacgtaattatagacttgatccatttcctccatgcaaactatctaaatgtaattaattatgattttgatgataatgttaccatacattatatcgctacttggttagtgtattattcagtatgaagacctattaataattacttatcttttgacgatcttgttataattataatataaaaacttatggcatagtaacttataattgctgacgcgataaattcgtaataatctgttttgttcaaaggaatctacaggcataaaaataaaaatataatttataatatactcttacagcgcgccatcatgaataacagcagtaaattaattgctgttattaatggatttagaaatagtggacgattttgtgatattaatatagttattaatgatgaaaggataaacgctcacagactcatcctatctggagcctccgaatatttttccattctgttttccaataattttatcgattctaatgaatacgaagttaatctaagtcatttagattatcaaagcgtaaacgatttgatcgattacatttatgggatacctttgagcctaactaacgataacgtgaaatatattctttcaaccgctgattttttacaaattggatctgctattacggagtgtgaaaattacatacttaaaaatctttgttctagaaactgtatcgatttctacatatacgctgataaatataataacaagaaaatagaatcagcgtcgtttaacacaatattacaaaatattttgagactcatcaacgatgaaaactttaaatacttaacagaggaatcaatgataaaaattttaagcgatgatatgttaaatataaaaaatgaggatttcgccccactaattctcattaaatggttagagagtactcaacaatcatgcaccgtcgagttacttagatgcctcagaatatcattgctttccccacaagttataaaatcactttatagtcatcaactggttagttcaatctacgaatgtataacattcttaaacaatatagcattcttggatgaatcatttcctagataccatagcatcgagttgatatctatcggtataagtaattcgcatgataagatttccataaactgctacaatcataaaaaaaatacatgggaaatgatatcttcacgtagatataggtgtagtttcgcagtggccgtcctggataatattatctatatgatgggtggatatgatcagtccccgtatagaagttcaaaggttatagcgtacaatacatgtacaaattcttggatatatgatataccagagctaaaatatcctcgttctaattgtgggggactggctgatgacgaatacatttattgtataggcggcatacgcgatcaggattcatcgttgacatctagtattgatagatggaagccatcaaaaccatattggcagaagtatgctaaaatgcgcgaaccaaaatgtgatatgggggttgcgatgttaaacggattaatatatgttataggtggaatcgttaaaggtgacacgtgtaccgacgcactagagagtttatcagaagatggatggatgaagcatcaacgtcttccaataaaaatgtccaatatgtcgacgattgttcatgatggcaagatttatatatctggaggttacaacaatagtagtgtagttaatgtaatatcgaatctagtccttagctataattcgatatatgatgaatggaccaaattatcatcattaaacattcctagaattaatcccgctctatggtcagcgcataataaattatatgtaggaggaggaatatctgatgatgttcgaactaatacatctgagacatacgacaaagaaaaagattgttggacattggataatggtcacgtgttaccacgcaattatataatgtataaatgcgaaccgattaaacataaatatccattggaaaaaacacagtacacgaatgattttctaaagtatttggaaagttttataggtagttgatagaacaaaatacataattttgtaaaaataaatcactttttatactaatatgacacgattaccaatacttttgttactaatatcattagtatactctacaccttctcctcagacatctaaaaaaataggtgatgatgcaactctatcatgtaatcgaaataatacaaatgactacgttgttatgagtgcttggtataaggagcccaattccattattcttttagctgctaaaagcgacgtcttgtattttgataattataccaaggataaaatatcttacgactctccatacgatgatctagttacaactatcacaattaaatcattgactgctagagatgccggtacttatgtatgtgcattctttatgacatcgcctacaaatgacactgataaagtagattatgaagaatactccacagagttgattgtaaatacagatagtgaatcgactatagacataatactatctggatctacacattcaccggaaactagttctgagaaacctgattatatagataattctaattgctcgtcggtattcgaaatcgcgactccggaaccaattactgataatgtagaagatcatacagacaccgtcacatacactagtgatagcattaatacagtaagtgcatcatctggagaatccacaacagacgagactccggaaccaattactgataaagaagatcatacagtcacagacactgtctcatacactacagtaagtacatcatctggaattgtcactactaaatcaaccaccgatgatacgtacaatgataatgatacagtaccaccaactactgtaggcggtagtacaacctctattagcaattataaaaccaaggactttgtagaaatatttggtattaccgcattaattatattgtcggccgtggcaatattctgtattacgtattatatatgtaataaacgttcacgtaaatacaaaacagagaacaaagtctagatttttgacttacataaatgtctgggatagtaaaatctatcatattgagcgggccatctggtttaggaaagacagccatagccaaaagactatgggaatatatttggatttgtggtgtcccataccactagatttcctcgtcctatggaacgagaaggtgtcgattaccattacgttaacagagaggccatctggaagggaatagccgccggaaactttctagaacatactgagtttttaggaaatatttacggaacttctaaaactgctgtgaatacagcggctattaataatcgtatttgtgtgatggatctaaacatcgatggcgttagaagtcttaaaaatacgtacctaatgccttactcggtgtatataagacctacctctcttaaaatggttgagaccaagcttcgttgtagaaacactgaagcggatgatgagattcatcgtcgtgtgatgttggcaaaaactgacatggatgaggcaggtgaagccggtctattcgacactattatcattgaagatgatgtgaatttagcatatagtaagttaattcagatactacaggaccgtattagaatgtattttaacactaattagagacttaagacttaaaacttgataattaataatataactcgtttttatatgtggctatttcaacgtctaatgtattagttaaatattaaaacttaccacgtaaaacttaaaatttaaaatgatatttcattgacagatagatcacacattatgaactttcaaggacttgtgttaactgacaattgcaaaaatcaatgggtcgttggaccattaataggaaaaggtggatttggtagtatttatactactaatgacaataattatgtagtaaaaatagagcccaaagctaacggatcattatttaccgaacaggcattttatactagagtacttaaaccatccgttatcgaagaatggaaaaaatctcacaatataaagcacgtaggtcttatcacgtgcaaggcatttggtctatacaaatccattaatgtggaatatcgattcttggtaattaatagattaggtgcagatctagatgcggtgatcagagccaataataatagactaccaaaaaggtcggtgatgttgatcggaatcgaaatcttaaataccatacaatttatgcacgagcaaggatattctcacggagatattaaagcgagtaatatagtcttggatcaaatagataagaataaattatatctagtggattacggattggtttctaaattcatgtctaacggcgaacatgttccatttataagaaatccaaataaaatggataacggtactctagaatttacacctatagattcgcataaaggatacgttgtatctagacgtggagatctagaaacacttggatattgtatgattagatggttgggaggtatcttgccatggactaagatatctgaaacaaagaattgtgcattagtaagtgccacaaaacagaaatatgttaacaatactgcgactttgttaatgaccagtttgcaatatgaacctagagaattgctgcaatatattaccatggtaaactctttgacatattttgaggaacccaattacgacgagtttcggcacatattaatgcagggtgtatattattaagtgtggtgtttggtcgataaaaattaaaaaataacttaatttattattgatctcgtgtgtacaaccgaaatcatggcgatgttttacgcacacgctctcggtgggtacgacgagaatcttcatgcctttcctggaatatcatcgactgttgccaatgatgtcaggaaatattctgttgtgtcagtttataataacaagtatgacattgtaaaagacaaatatatgtggtgttacagtcaggtgaacaagagatatattggagcactgctgcctatgtttgagtgcaatgaatatctacaaattggaaatccgatccatgatcaagaaggaaatcaaatctctatcatcacatatcgccacaaaaactactatgctctaagcggaatcgggtacgagagtctagacttgtgtttggaaggagtagggattcatcatcacgtacttgaaacaggaaacgctgtatatggaaaagttcaacatgattattctactatcaaagagaaggccaaagaaatgagtgcacttagtccaggacctatcatcgattaccacgtctggataggagattgtatctgtcaagttactgctgtggacgtacatggaaaggaaattatgaaaatgagattcaaaaagggtgcggtgcttccgatcccaaatctggtaaaagttaaacttggggagaatgatacagaaaatctttcttctactatatcggcggcaccatcgaggtaaccacctctctggaagacagcgtgaataatgtactcatgaaacgtttggaaactatacgccatatgtggtctgttgtatatgatcattttgatattgtgaatggtaaagaatgctgttatgtgcatacgcatttgtctaatcaaaatcttataccgagtactgtaaaaacaaatttgtacatgaagactatgggatcatgcattcaaatggattccatggaagctctagagtatcttagcgaactgaaggaatcaggtggatggagtcccagaccagaaatgcaggaatttgaatatccagatggagtggaagacactgaatcaattgagagattggtagaggagttcttcaatagatcagaacttcaggctggtgaatcagtcaaatttggtaattctattaatgttaaacatacatctgtttcagctaagcaactaagaacacgtatacggcagcagcttccttctatactctcatcttttaccaacacaaagggtggatatttgttcattggagttgataataatacacacaaagtatttggattcacggtgggttacgactacctcagactgatagagaatgatatagaaaagcatatcaaaagactttgtgttgtgtatttctgtgagaagaaagaggacatcaagtacgcgtgtcgattcatcaaggtatataaacctggggatgaggctacctcgacatacgtgtgcgctatcaaagtggaaagatgctgttgtgctgtgtttgcagattggccagaatcatggtatatggatactaatggtatcaagaagtattctccagatgaatgggtgtcacatataaaattttaattaatgtaactatagagaacaaataataaggttgtaatatcatatagacaataactaacaattaattagtaactgttatctcttttttaattaaccaactaactatatacctattaatacatcgtaattatagttcttaacatctattaatcattaattcgcttctttaattttttataaactaacattgttaattgaaaagggataacatgttacagaatataaattatatatggatttttttaaaaaggaaatacttgactggagtatatatttatctcttcattatatagcacgcgtgttttccaatttttccacatcccatataatacaggattataatctcgttcgaacatacgagaaagtggataaaacaatagttgattttttatctaggttgccaaatttattccatattttagaatatggggaaaatattctacatatttattctatggatgatgctaatacgaatattataattttttttctagatagagtattaaatattaataagaacgggtcatttatacacaatctcgggttatcatcatccattaatataaaagaatatgtatatcaattagttaataatgatcatccagataataggataagactaatgcttgaaaatggacgtagaacaagacattttttgtcctatatatcagatacagttaatatctatatatgtattttaataaatcatggattttatatagatgccgaagacagttacggttgtacattattacatagatgtatatatcactataagaaatcagaatcagaatcatacaatgaattaattaagatattgttaaataatggatcagatgtagataaaaaagatacgtacggaaacacaccttttatcctattatgtaaacacgatatcaacaacgtggaattgtttgagatatgtttagagaatgctaatatagactctgtagactttaatagatatacacctcttcattatgtctcatgtcgtaataaatatgattttgtaaagttattaatttctaaaggagcaaatgttaatgcgcgtaataaattcggaactactccattttattgtggaattatacacggtatctcgcttataaaactatatttggaatcagacacagagttagaaatagataatgaacatatagttcgtcatttaataatttttgatgctgttgaatctttagattatctattatccagaggagttattgatattaactatcgtactatatacaacgaaacatctatttacgacgctgtcagttataatgcgtataatacgttggtctatctattaaacaaaaatggtgattttgagacgattactactagtggatgtacatgtatttcggaagcagtcgcaaacaacaacaaaataataatggaagtactattgtctaaacgaccatctttgaaaattatgatacagtctatgatagcaattactaaacataaacagcataatgcagatttattgaaaatgtgtataaaatatactgcgtgtatgaccgattatgatactcttatagatgtacagtcgctacagcaatataaatggtatattttaagatgtttcgatgaaatagatatcatgaagagatgttatataaaaaataaaactgtattccaattagttttttgtatcaaagacattaatactttaatgagatacggtaaacatccttctttcgtgaaatgcactagtctcgacgtatacggaagtcgtgtacgtaatatcatagcatctattagatatcgtcagagattaattagtctattatccaagaagctggatcctggagataaatggtcgtgttttcctaacgaaataaaatataaaatattggaaaactttaacgataacgaactatccacatatctaaaaatcttataaacattattaaaatataaaatctaagtaggataaaatcacactacatcattgtttccttttagtgctcgacagtgtatactatttttaacgctcataaataaaaatgaaaacgatttccgttgttacgttgttatgcgtactacctgctgttgtttattcaacatgtactgtacccactatgaataacgctaaattaacgtctaccgaaacatcgtttaatgataaccagaaagttacgtttacatgtgatcagggatatcattctttggatccaaatgctgtctgtgaaacagataaatggaaatacgaaaatccatgcaaaaaaatgtgcacagtttctgattatgtctctgaactatataataaaccgctatacgaagtgaattccaccatgacactaagttgcaacggcgaaacaaaatattttcgttgcgaagaaaaaaatggaaatacttcttggaatgatactgttacgtgtcctaatgcggaatgtcaacctcttcaattagaacacggatcgtgtcaaccagttaaagaaaaatactcatttggggaatatatgactatcaactgtgatgttggatatgaggttattggtgcttcgtacataagttgtacagctaattcttggaatgttattccatcatgtcaacaaaaatgtgatatgccgtctctatctaacggattaatttccggatctacattttctatcggtggcgttatacatcttagttgtaaaagtggttttacactaacggggtctccatcatccacatgtatcgacggtaaatggaatcccatactcccaatatgtgtacgaactaacgaaaaatttgatccagtggatgatggtcccgacgatgagacagatttgagcaaactctcgaaagacgttgtacaatatgaacaagaaatagaatcgttagaagcaacttatcatataatcatagtggcgttgacaattatgggcgtcatatttttaatctccgttatagtattagtttgttcctgtgacaaaaataatgaccaatataagttccataaattgctaccgtaaatataaatccgttaaaataattaataatttaataacaaacaagtatcaaaagattaaagacttatagctagaatcaattgagatgtcttcttcagtggatgttgatatctacgatgccgttagagcatttttactcaggcactattataacaagagatttattgtgtatggaagaagtaacgccatattacataatatatacaggctatttacaagatgcgccgttataccgttcgatgatatagtacgtactatgccaaatgaatcacgtgttaaacaatgggtgatggatacacttaatggtataatgatgaatgaacgcgatgtttctgtaagcgttggcaccggaatactattcatggaaatgtttttcgattacaataaaaatagtatcaacaatcaactaatgtatgatataattaatagcgtatctataattctagctaatgagagatatagaagcgcttttaacgacgatggtatatacatccgtagaaatatgattaacaagttgtacggatacgcatctctaactactattggcacgatcgctggaggtgtttgttattatctgttgatgcatctagttagtttgtataaataattatttcaatatactagttaaaattttaagattttaaatgtataaaaaactaataacgtttttatttgtaataggtgcattagcatcctattcgaataatgagtacactccgtttaataaactgagtgtaaaactctatatagatggagtagataatatagaaaattcatatactgatgataataatgaattggtgttaaattttaaagagtacacaatttctattattacagagtcatgcgacgtcggatttgattccatagatatagatgttataaacgactataaaattattgatatgtataccattgactcgtctactattcaacgcagaggtcacacgtgtagaatatctaccaaattatcatgccattatgataagtacccttatattcacaaatatgatggtgatgagcgacaatattctattactgcagagggaaaatgctataaaggaataaaatatgaaataagtatgatcaacgatgatactctattgagaaaacatactcttaaaattggatctacttatatatttgatcgtcatggacatagtaatacatattattcaaaatatgatttttaaaaatttaaaatatattatcacttcagtgacagtagtcaaataacaaacaacaccatgagatatattataattctcgcagttttgttcattaatagtatacatgctaaaataactagttataagtttgaatccgtcaattttgattccaaaattgaatggactggggatggtctatacaatatatcccttaaaaattatggcatcaagacgtggcaaacaatgtatacaaatgtaccagaaggaacatacgacatatccgcatttccaaagaatgatttcgtatctttctgggttaaatttgaacaaggcgattataaagtggaagagtattgtacgggactatgcgtcgaagtaaaaattggaccaccgactgtaacattgactgaatacgacgaccatatcaatttgtacatcgagcatccgtatgctactagaggtagcaaaaagattcctatttacaaacgcagtgacatgtgtgatatctacttgttgtatacggctaacttcacattcggagattctaaagaaccagtaccatatgatatcgatgactacgattgcacgtctacaggttgcagcatagactttgtcacaacagaaaaagtgtgcgtgacagcacagggagccacagaagggtttctcgaaaaaattactccatggagttcgaaagtatgtctgacacctaaaaagagtgtatatacatgcgcaattagatccaaagaagatgttcccaatttcaaggacaaaatggccagagttatcaagagaaaatttaatacacagtctcaatcttatttaactaaatttctcggtagcacatcaaatgatgttaccacttttcttagcatgcttaacttgactaaatattcataactaatttttattaatgaaataaaactgcatattatacactggttaacgcccttataggctctaaccattttcaagatgaggtccctgattatagtccttctgttcccctccatgtctattagacgatgtgagaagactgaagaggaaacatggggattgaaaatagggttgtgtataattgccaaagatttttatcccgaaagaactgattgcagtgttcatctcccaactgcaagtgaaggattcagggatatacgaaacaccgataaattataaaaaaagcaatgtgtccgctgtttccgttaataatactattttcgtaactggcggattattcataaataactctaatagcacgatcgtggttaacaatatggaaaacttgacatttataaagacaaacaatggtcgattatagaaatgcctatggctagggtatatcacggcatcgactcgacatttggaatgttatattttgccggaggtctatccgttaccgaacaatatggtaatttagagaaaaacaacgagatatcttgttacaatcctagaacgaataagtggtttgatatttcatatactatttataagatatccatatcatcattgtgtaaactaaataacgtcttctatgtatttagtaaggacattggatatgtggaaaagtatgatggtgcatggaagttagtacatgatcgtctccccgctataaaggcattatcaacttctccttattgattgaaaatataaatagtttttatgtatagcagtattaccctatagttttattgcttactactaacatggatacagatacagatacagatacagatacagatacagatacagatgttacaaatgtagaagatatcataaatgaaatagatagagagaaagaagaaatactaaaaaatgtagaaattgaaaataataaaaacattaacaagaatcatcccaatgaatatattagagaagcactcgttattaatacaagtagtaatagtgattccattgataaagaagttatagaatgtatctgtcacgatgtaggaatatagatcatatctactaatttttataatcgatacaaaacataaaaaacaactcgttattacatagcaggcatggaatccttcaagtattgttttgataacgatggcaagaaatggattatcggaaatactttatattctggtaattcaatactctataaggtcagaaaaaatttcactagttcgttctacaattacgtaatgaagatagatcacaaatcacacaagccattgttgtttgaaatacgattctatatatctgtattggatcctttgactatcgacaactggacacgggaacgtggtataaagtatttggctattccagatctgtatggaattggagaaaccgatgattatatgttcttcgttataaagaattcgggaagagtattcgccccaaaggatactgaatcagtcttcgaagcatgcgtcactatgataaacacgttagagtttatacactctcgaggatttacccatggaaaaatagaaccgaggaatatactgattagaaataaacgtctttcactaattgactattctagaactaacaaactatacaagagtggaaactcacatatagattacaacgaggacatgataacttcaggaaatatcaattatatgtgtgtagacaatcatcttggagcaacagtttcaagacgaggagatttagaaatgttgggatattgcatgatagaatggttcggtggcaaacttccatggaaaaacgaaagtagtataaaagtaataaaacaaaaaaaagaatataaaaaatttatagctactttctttgaggactgttttcctgaaggaaatgaacctctggaattagttagatatatagaattagtatacacgttagattattctcaaactcctaattatgacagactacgtaaactgtttatacaagattgaaattatattcttttttttatagagtgtggtagtgttacggatatctaatattaatattagactatctctatcgcgctacacgaccaatatcgattactatggatatcttctatgaaaggagagaatgtattcatttctccagcgtcaatctcgtcagtattgacaatactgtattatggagctaatggatccactgctgaacagctatcgaaatatgtagaaacggaggagaacacggataaggttagcgctcaaaatatctcattcaaatccataaataaagtatatgggcgatattctgccgtgtttaaagattcctttttgagaaaaattggcgataagtttcaaactgttgacttcactgattgtcgcactatagatgcaatcaacaagtgtgtagatatctttactgaggggaaaatcaatccactattggatgaaccattgtctcctagcaattagtgccgtatactttaaagcaaaatggttgacgccattcgaaaaggaatttaccagtgattatcccttttacgtatctccgacggaaatggtagacgtaagtatgatgtctatgtacggcaaggcatttaatcacgcatctgtaaaagaatcattcggcaacttttcaatcatagaactgccatatgttggagatactagtatgatggtcattcttccagacaagattgatggattagaatccatagaacaaaatctaacagatacaaattttaagaaatggtgtgactttatggatgctatgtttatagatgttcacattcccaagtttaaggtaacaggctcgtataatctggtggatactctagtaaagtcaggactgacagaggtgttcggttcaactggagattatagcaatatgtgtaatttagatgtgagtgtcgacgctatgatccacaaaacgtatatagatgtcaatgaagagtatacagaagcagctgcagcaacttctgtactagtggcagactgtgcatcaacaattacaaatgagttctgtgcagatcatccgttcatctatgtgattaggcatgttgatggaaaaattcttttcgttggtagatattgctctccgacaactaattgttaaccattttttttaaaaaaaatagaaaaaacatgtggtattagtgcaggtcgttgttcttccaattgcaattggtaagatgacggccaactttagtacccacgtcttttcaccacagcactgtggatgtgacagactgaccagtattgatgacgtcaaacaatgtttgactgaatatatttattggtcgtcctatgcataccgcaacaggcaatgcgctggacaattgtattccacactcctctcttttagagatgatgcggaattagtgttcatcgacattcgcgagctggtaaaaaatatgccgtgggatgatgtcaaagattgtacagaaatcatccgttgttatataccggatgagcaaaaaaccatcagagagatttcggccatcatcggactttgtgcatatgctgctacttactggggaggtgaagaccatcccactagtaacagtctgaacgcattgtttgtgatgcttgagatgctcaattacgtggattataacatcatattccggcgtatgaattgatgagttgtacatcttgacattttctttcttctcttctccctttcttctcttctccctttcttctcttctcccttcctccctcttctccctttcccagaaacaaacttttttacccactataaaataaaatgagtatactacctattatatttcttcctatatttttttattcttcattcgttcagacttttaacgcgcctgaatgtatcgacaaagggcaatattttgcatcattcatggagttagaaaacgagccagtaatcttaccatgtcctcaaataaatacgctatcatccggatataatatattagatattttatgggaaaaacgaggagcggataataatagaattataccgatagataatggtagcaatatgctaattctgaacccgacacaatcagactctggtatttatatatgcattaccacgaacgaaacctactgtgacatgatgtcgttaaatttgacaatcgtgtctgtctcagaatcaaatatagatcttatctcgtatccacaaatagtaaatgagagatctactggcgaaatggtatgtcccaatattaatgcatttattgctagtaacgtaaacgcagatattatatggagcggacatcgacgccttagaaataagagacttaaacaacggacacctggaattattaccatagaagatgttagaaaaaatgatgctggttattatacatgtgttttagaatatatatacggtggcaaaacatataacgtaaccagaattgtaaaattagaggtacgggataaaataataccttctactatgcaattaccagatggcattgtaacttcaataggtagtaatttgactattgcatgcagagtatcgttgagacctcccacaacggatgcagacgtcttttggataagtaatggtatgtattacgaagaagatgatggggacggagacggtagaataagtgtagcaaataaaatctatatgaccgataagagacgtgttattacatcccggttaaacattaatcctgtcaaggaagaagatgctacaacgtttacgtgtatggcgtttactattcctagcatcagcaaaacagttactgttagtataacgtgaatgtatgttgttacatttccatgtcaattgagtttataagaatttttatacattatcttccaacaaacaattgacgaacgtattgctatgattaactcccacgatactatgcatattattaatcattaacttgcagactatacctagtgctattttgacatactcatgttcttgtgtaattgcagtatctatattattaaagtacgtaaatctagctatagttttattatttaattttagataatataccgtctccttatttttaaaaattgccacatcctttattaaatcatgaatgggaatttctatgtcatcgttagtatattgtgaacaacaagagcagatatctataggaaagggtggaatgcgatacattgatctatgtagttttaaaacacacgcgaactttgaagaatttatataaatcattccatcgatacatccttctatgttgagatgtatatatccaggaattcttttattaatgtcgggaaatgtataaactaaaacattgcccgaaagcggtgcctctatctgcgttatatccgttcttaacttacaaaatgtaaccaatacctttgcatgacttgttttgttcggcaacgttagtttaaacttgacgaatggattaattacaatagcatgatccgcgcatctattaagtttttttactttaacgcccttgtatgtttttacagagactttatctaaatttctagtgcttgtatgtgttataaatataacgggatatagaaccgaatcacctaccttagatacccaattacattttatcagatccagataataaacaaattttgtcgccctaactaattctatattgttatatattttacaattggttatgatatcatgtaataacttggagtctaacgcgcatcgtcgtacgtttatacaattgtgatttagtgtagtatatctacacatgtatttttccgcactatagtattctggactagtgataaaactatcgttatatctgtcttcaatgaactcatcgagatattgctctctgtcatattcatacacctgcataaactttctagacatcttacaatccgtgttattttaggatcatatttacatatttacgggtatatcaaagatgttagattagttaatgggaatcgtctataataatgaatattaaacaattatatgaggacttttaccacaaagcatcataaaaatgagtcgtcgtctgatttatgttttaaatatcaaccgcgaatcaactcataaaatacaagagaatgaaatatatacatattttagtcattgcaatatagaccatacttctacagaacttgattttgtagttaaaaactatgatctaaacagacgacaacctgtaactgggtatactgcactacactgctatttgtataataattactttacaaacgatgtactgaagatattattaaatcatgacgtaaatgtaacgatgaaaaccagtagcggacgtatgcctgtttatatattgcttactagatgttgtaatatttcacatgatgtagtgatagatatgatagacaaagataaaaaccacttattacatagagactattccaacctattactagagtatataaaatctcgttacatgttattaaaggaagaggatatcgatgagaacatagtatccactttattagataagggaatcgatcctaactttaaacaagacggatatacagcgttacattattattatttgtgtctcgcacacgtttataaaccaggtgagtgtagaaaaccgataacgataaaaaaggccaagcgaattatttctttgtttatacaacatggagctaatctaaacgcgttagataattgtggtaatacaccattccatttgtatcttagtattgaaatgtgtaataatattcatatgactaaaatgctgttgacttttaatccgaatttcgaaatatgtaataatcatggattaacgcctatactatgttatataacttccgactacatacaacacgatattcttgttatgttaatacatcactatgaaacaaatgttggagaaatgccgatagatgagcgtcgtatgatcgtattcgagtttatcaaaacatattctacacgtccggcagattcgataacttatttgatgaataggtttaaaaatataaatatttatacccgctatgaaggaaagacattattacacgtagcatgtgaatataataatacacacgtaatagattatcttatacgtatcaacggagatataaatgcgttaaccgacaataacaaacacgctacacaactcattatagataacaaagaaaattccccatataccattaattgtttactgtatatacttagatatattgtagataagaatgtgataagatcgttggtggatcaacttccatctctacctatctttcgtcgcttatcatactagtcatatcctaaatgttgatcatattccaccaaatgattgtgaaagagattgagattaaatcgtctaacaaacaattagtttttatgacattaacatataataaataaattaatcattattgacttaacgatgacgaaagttatcatcatcttaggattcttgattattaatacaaattcattgtctatgaaatgtgaacaaggtgtctcatattataattcacaagaattaaagtgttgtaaactatgtaagccaggaacatattcagatcatcgatgtgataaatacagcgataccatttgtggacattgtccgagtgacacattcacgtcaatatataatcgttctccttggtgtcatagttgtagaggtccatgtggtactaatcgagtagaggtcacaccttgtacacctaccacaaatagaatctgtcattgtgactcgaatagttattgtctccttaaagcttctgatggtaactgtgttacatgtgctcctaaaacaaaatgtggtcgtgggtatggaaagaaaggagaagatgaaatgggtaataccatttgtaagaaatgtcggaagggtacttattcagatattgtatctgactctgatcaatgtaaaccaatgacaagataagacttactcgcatctactggatagacataaaatatcctcctcgtaataatgaaatataaatatacactaattattaatatcaataacaatcgagtattaatatataggtcatttttaaatcccttttgggttccgtcccaaacggcgtttcggtctgcgtcgccgccatggccatgccgagcctctccgcgtgctcctccatcgaggacgacttcaactatggcagctcggtggcgtctgccagcgtgcacatacgaatggcatttctaagaaaagtctacggtatcctttgtctacaatttcttttaacaacggcaacaactgcagtatttttatactttgactgcatgcggacatttatacaagggagtcctgttctaatattggcatcaatgttcggatctataggcttgattttcgcattgactttacacagacataaacatcccctgaatctgtacctgctttgtggatttacactgtcggaatctctaacgctggcctctgttgttactttctatgatgtgcatgtcgttatgcaagctttcatgctgactactgcagcgtttcttgctctgactacatatactctacaatcaaagagagatttcagtaaacttggagcaggattgtttgctgctttgtggattttaattttgtcaggactcttggggatatttgtgcaaaatgagacagtggagctggtcctgtctgcttttggggcccttgtattctgtggattcattatctatgacacgcactcactaatacataagctctcgcctgaagagtatgtgttagcctctatcaatctctacttggatatcatcaatctgttcttgcatctgttgcagcttttggaagtatctaataagaaataaagtttaaaatagaattaataaaaacatataggtcattttttaaacatggattggaaaccaaggtagttagttaatacacacaagatatatttttttcacatcatccacccatgggtaacaccaaggttgttagttaataatatacaagatattttttctcactctgatccatgtaaaccaaggacgagataagacactctcattcctcatccacaacccattaaaaaaatggaaattaaagccctctattagcataaacggctacaggtctacctttacaatggcctctccttgtgcccagttcagaccctgtcattgccacgctactaaggactccctgaataccgtggccgacgtcagacattgtctgactgaatacatcctgtgggtttctcatagatggacccatagagaaagcgcagggtctctctacaggcttctcatctctttcagaactgatgcaacggagctctttggtggtgagttgaaggattcacttccgtgggacaattgcgtggagatcattaaatgtttcatcagaaatgactccatgaaaaccgccgaagaacttcgtgcaatcattggactttgtactcaatcagctatcgtctctggaagagtcttcaacgataagtatatcgacatactacttatgctgcgaaagattctgaacgagaacgactatctcaccctcttggatcatatccgcactgctaaatactaaatctccttcatgctctctcactacactttttatcatcttatgaggaatgattgccttcgtgaaataggaataattagcaccagaatagctatggattattgtggtagagagtgcactattctatgtcgtctactggatgaagatgtgacgtacaaaaaaataaaactagaaattgaaacgtgtcacaacttatcaaaacatatagatagacgaggaaacaatgcgctacattgttacgtctccaataaatgcgatacagacattaagattgttctctcgcggagtcgagagactttgtagaaacaacgaaggattaactccgctaggagtatacagtaagcatagatacgtcaaatctcaaattgtgcatctactgatatccagctattcgaattcctctaacgaactcaagtcgaatataaatgatttcgatctgtattcggataatatcgacttacgtctgctaaaatacctaattgtggataaacggatacgtccgtccaagaatacgaattatgcaatcaatggtctcggattggtggatatatacgtaacgacgcctaatccgagaccagaagtattgctatggcttcttaaatcagaatgttacagcaccggttacgtatttcgtacctgtatgtacgacagtgatatgtgtaagaactctcttcattactatatatcgtctcatagagaatctcaatctctatccaaggatgtaattaaatgtttgatcgataacaatgtttccatccatggcagagacgaaggaggatctttacccatccaatactactggtctttctcaaccatagatatagagattgttaaattattattaataaaggatgtggacacgtgtagagtatacgacgtcagccctatattagaggcgtattatctaaacaagcgatttagagtaaccccatataatgtagacatggaaatcgttaatcttcttattgagagacgtcatactcttgtcgacgtaatgcgtagtattacttcgtacgattccagagaatataaccactacatcatcgataacattctaaagagatttagacaacaggatgtacaagccatactgataaactacttacattacggcgatatggtcgttcgatgcatgttggataacggagcaaccatggataagacgacggacaacaactatcctctacacgactactttgttaataataatctcgtcgatgtaaacgtcgtaaggtttatcgtggaaaatatggacacgcggctgtaaatcacgtatcgaacaatggccgtctatgtatgtacggtctgatattatcgagatttaataattgcgggtatcactgttatgaaaccatactgatagatgtatttgatatactaagcaagtacatggatgatatagatatgatcgataactctactatattacgcggtcgatgtcaataatatacaatttgcaaagcggttattggaatatggagcgagtgtcacgctcgataatcaatacggccatccagaaaagcagttaccaaagagaaaacaaaacgaagctagttgatttattactgagttaccatcccactctagagactatgattgacgcatttaatagagatatacgctatctatatcctgaaccattattcgcctgtatcagatacgccttaatcctagatgatgattttccttctaaagtaaagtatgatatcgccggtcgtcataaggaactaaagcgctatagagtagacattaatagaatgaagaatgtctacatatcaggcgtttccatgtttgatatattatttaaacgaagcaaacgccacagattgagatacgcaaagaatccgacatcaaatggtacaaaaaagaactaacgtccatcattacagaaactgtaaagaacaatgagaggatcgactccatagtggacaacattaatacagacgataacttgatttcgaaattacccatggagatactttattactccattaaataatttatcatggagcgataatgtcctgtttcatttgtttccatgacatattacaaaatcgattccgtccaagatgataaaaacatttaccggcatcataaacacggagtttattttatatgtctcgcataaacattactaaaaaaatatattgttcggtttttctttcacatctttaattatgaaaaagtaaatcattatgagatggacgagattgtacgcatcgttcgcgacagtatgtggtacatacctaacgtatttatggacgacggtaagaatgaaggtcacgtttctgtcaacaatgtctgtcatatgtattttacgttctttgatgtagatacatcgtctcatctgtttaagctagttattaaacactgcgatctgaataaacgaggtaactctccattacattgctatacgatgaatacacgatttaatccatctgtattaaagatattgttacaccacggcatgcgtaactttgatagcaaggatgaccactatcaatcgataacaagatctttgatatactaacggacaccattgatgactttagtaaatcatccgatctattgctgtgttatcttagatataaattcaatgggagcttaaactattacgttctgtacaaaggatccgaccctaattgcgccgacgaggatgaactcacttctcttcattactactgtaaacacatatccacgttctacgaaagcaattattacaagtcaagtcacactaagatgcgagccgagaagcgattcatctacgcgataatagattatggagcaaacattaacgcggttacacacttaccttcaacagtataccaaacatagtcctcgtgtggtgtatgctcttttatctcgaggagccgatacgaggatacgtaataatcttgattgtacacccatcatggaacgattgtgcaacaggtcatattctcataatgttactcaattggcacgaacaaaaggaagaaggacaacatctactttatctattcataaaacataatcaaggatacactctcaatatactacggtatctattagataggttcgacattcagaaagacgaatactataataccgcctttcaaaattgtaacaacaatgttgcctcatacatcggatacgacatcaaccttccgactaaagacggtattcgacttggtgtttgaaaacagaaacatcatatacaaggcggatgttgtgaatgacatcatccaccacagactgaaagtatctctacctatgattaaatcgttgttctacaagatgtctctccctacgacgattactacgtaaaaaagatactagcctactgcctattaagggacgagtcattcgcggaactacatagtaaattctgtttaaacgaggactataaaagtgtatttatgaaaaatatatcattcgataagatagattccatcatcgtgacataagtcgcctcaaagagattcgaatctccgacaccgacctgtatacggtatcacagctatcttaaagccatacattcagacagtcacatttcatttcccatgtacgacgatctcatagaacagtgccatctatcgatggagcgtaaaagtaaactcgtcgacaaagcactcaataaattagagtctaccatcggtcaatctagactatcgtatttgcctccggaaattatgcgcaatatcatctaaacagtatgttgtacggaaagaaccattacaaatattatccatgatagaaagaaaatatctatatgattggagaagtaggaaacaggaacaagacaacgattactacattattaaatcatgaagtccgtattatactcgtatatattgtttctctcatgtataataataaacggaagagatatagcaccgcatgcaccatccgatggaaagtgtaaagacaacgaatacaaacgccataatttgtgtccgggaacatacgcttccagattatgcgatagcaagactaacacacaatgtacgccgtgtggttcgggtaccttcacatctcgcaataatcatttacccgcttgtctaagttgtaacggaagacgcgatcgtgtaacacgactcacaatagaatctgtgaatgctctcccggatattattgtcttctcaaaggatcatccggatgcaaggcatgtgtttcccaaacaaaatgtggaataggatacggagtatccggagacgtcatctgttctccgtgtggtctcggaacatattctcacaccgtctcttccgcagataaatgcgaacccgtacccagaaatacgtttaactatatcgatgtggaaattaacctgtatccagttaacgacacgtcgtgtactcggacgaccactaccggtctcagcgaatccatctcaacgtcggaactaactattactatgaatcataaagactgtaatcccgtctttcgtgatggatacttctccgttcttaataaggtagcgacttcaggtttctttacaggagaaaggtgtgcactctgaatttcgagattaaatgcaataacaaagattcttcctccaaacagttaacgaaagcaaagaatgatactatcatgccgcattcggagacagtaactctagtgggcgacatctatatactatatagtaataccaatactcaagactacgaaactgatacaatctcttatcatgtgggtaatgttctcgatgtcgatagccatatgcccggtagttgcgatatacataaactgatcactaattccaaacccacccactttttatagtaagtttttcacccataaataataaatacaataattaatttctcgtaaaagtagaaaatatattctaatttattgcacggtaaggaagtagaatcataaagaacagtactcaatcaatagcaattatgaaacaatatatcgtcctggcatgcatgtgcctggcggcagctgctatgcctgccagtcttcagcaatcatcctcatcctcctcctcgtgtacggaagaagaaaacaaacatcatatgggaatcgatgttattatcaaagtcacaaagcaagaccaaacaccgaccaatgataagatttgccaatccgtaacggaaattacagagtccgagtcagatccagatcccgaggtggaatcagaagatgattccacatcagtcgaggatgtagatcctcctaccacttattactccatcatcggtggaggtctgagaatgaactttggattcaccaaatgtcctcagattaaatccatctcagaatccgctgatggaaacacagtgaatgctagattgtccagcgtgtccccaggacaaggtaaggactctcccgcgatcactcatgaagaagctcttgctatgatcaaagactgtgaagtgtctatcgacatcagatgtagcgaagaagagaaagacagcgacatcaagacccatccagtactcgggtctaacatctctcataagaaagtgagttacgaagatatcatcggttcaacgatcgtcgatacaaaatgcgtcaagaatctagagtttagcgttcgtatcggagacatgtgcaaggaatcatctgaacttgaggtcaaggatggattcaagtatgtcgacggatcggcatctgaaggtgcaaccgatgatacttcactcatcgattcaacaaaactcaaagcgtgtgtctgaatcgataactctattcatctgaaattggatgagtagggttaatcgaacgattcaggcacaccacgaattaaaaaagtgtaccggacactatattccggtttgcaaaacaaaaatgttcttaactacattcacaaaaagttacctctcgcgacttcttctttttctgtctcaatagtgtgatacgattatgacactattcctattcctattcctatttcctttcagagtatcacaaaaatattaaacctctttctgatggtctcataaaaaaagttttacaaaaatatttttattctctttctctctttgatggtctcataaaaaaagttttacaaaaatatttttattctctttctctctttgatggtctcataaaaaaagttttacaaaaatatttttattctctttctctctttgatggtctcataaaaaaagttttacaaaaatatttttattctctttctctctttgatggtctcataaaaaaagttttacaaaaatatttttattctctttctctctttgatggtctcataaaaaaagttttacaaaaatatttttattctctttctctctttgatggtctcataaaaaaagttttacaaaaatatttttattctctttctctctttgatggtctcataaaaaaagttttacaaaaatatttttattctctttctctctttgatggtctcataaaaaaagttttacaaaaatatttttattctctttctctctttgatggtctcataaaaaaagttttacaaaaatatttttattctctttctctctttgatggtctcataaaaaaagttttacaaaaatatttttattctctttctctctttgatggtctcataaaaaaagttttacaaaaatatttttattctctttctctctttga

SEQ ID NO: 25 - DNA, 188082 bp, Artificial Sequence
  LIVP 7.1.1
atttttgtaaaactttttttatgagaccatcaaagagagaaagagaataaaaatatttttgtaaaactttttttatgagaccatcaaagagagaaagagaataaaaatatttttgtaaaactttttttatgagaccatcaaagagagaaagagaataaaaatatttttgtaaaactttttttatgagaccatcaaagagagaaagagaataaaaatatttttgtaaaactttttttatgagaccatcaaagagagaaagagaataaaaatatttttgtaaaactttttttatgagaccatcaaagagagaaagagaataaaaatatttttgtaaaactttttttatgagaccatcaaagagagaaagagaataaaaatatttttgtaaaactttttttatgagaccatcaaagagagaaagagaataaaaatatttttgtaaaactttttttatgagaccatcaaagagagaaagagaataaaaatatttttgtaaaactttttttatgagaccatcaaagagagaaagagaataaaaatatttttgtaaaactttttttatgagaccatcaaagagagaaagagaataaaaatatttttgtaaaactttttttatgagaccatcaaagagagaaagagaataaaaatatttttgtaaaactttttttatgagaccatcaaagagagaaagagaataaaaatatttttgtaaaactttttttatgagaccatcagaaagaggtttaatatttttgtgataccctgaaaggaaataggaataggaataggaataggaatagtgtcataatcgtatcacactattgagacagaaaaagaagaagtcgcgagaggtaactttttgtgaatgtagttaagaacatttttgttttgcaaaccggaatatagtgtccggtacacttttttaattcgtggtgtgcctgaatcgttcgattaaccctactcatccaatttcagatgaatagagttatcgattcagacacacgctttgagttttgttgaatcgatgagtgaagtatcatcggttgcaccttcagatgccgatccgtcgacatacttgaatccatccttgacctcaagttcagatgattccttgcacatgtctccgatacgaacgctaaactctagattcttgacacattttgtatcgacgatcgttgaaccgatgatatcttcgtaactcactttcttatgagagatgttagacccgagtactggatgggtcttgatgtcgctgtctttctcttcttcgctacatctgatgtcgatagacacctcacagtctttgatcatagcaagagcttcttcacgagtgatcgcgggagagtccttaccttgtcctggggacacgctggacaatctagcattcactgtgtttccatcagcggattctgagatggatttaatctgaggacatttggtgaatccaaagttcattctcagacctccaccgatgatggagtaataagtggtaggaggatctacatcctcgactgatgtggaatcatcttctgattccacctcgggatctggatctgactcggactctgtaatttccgttacggattggcaaatcttatcattggtcggtgtttggtcttgctttgtgactttgataataacatcgattcccatatgatgtttgttttcttcttccgtacacgaggaggaggatgaggatgattgctgaagactggcaggcatagcagctgccgccaggcacatgcatgccaggacgatatattgtttcataattgctattgattgagtactgttctttatgattctacttccttaccgcgcaataaattagaatatattttctacttttacgagaaattaattattgtatttattatttatgggtgaaaaacttactataaaaagtgggtgggtttggaattagtgatcagtttatgtatatcgcaactaccgggcatatggctatcgacatcgagaacattacccacatgataagagattgtatcagtttcgtagtcttgagtattggtattactatatagtatatagatgtcgcccactagagttactgtctccgaatgcggcatgatagtatcattctttgctttcgttaactgtttggaggaagaatctttgttattgcatttaatctcgaaattcagagtgcacacctttctcctgtaaagaatcctgaagttgctaccttattaagaacggagaagtatccatcacgaaatacgggattacagtctttatgattcatagtaatagttagttccgacgttgagatggattcgctgagaccggtagtggtcgtccgagtacacgacgtgtcgttgacgggatacagattaatttccacatcgatatagttaaacgtattactgggtacgggttcgcatttatctgcggaagagacggtgtgagaatatgttccgagaccacacggagaacagatgacgtctccggatactccgtatcctattccacattttgtttgggaaacacatgccttgcatccggatgatcctttgagaagacaataatatccgggagagcattcacagattctattgtgagtcgtgttacacgatcgcgtcttccgttacaacttagacaagcgggtaaatgattattgcgagatgtgaaggtacccgaaccacacggcgtacatcgtgtgttagtcttgctatcgcataatctggaagcgtatgttcccggacacaaattatggcgtttgtattcgttgtctttacactttccatcggatggtgcatgcggtgctatatctcttccgtttattattatacatgagagaaacaatatatacgagtataatacggacttcatgatttaataatgtagtaatcgttgtcttgttcctgtttcctacttctccaatcatatagatattttctttctatcatggataatatttgtaatggttctttccgtacaacatactgtttagatgatattgcgcataatttccggaggcaaatacgatagtctagattgaccgatggtagactctaatttattgagtgctttgtcgacgagtttacttttacgctccatcgatagatggcactgttctatgagatcgtcgtacatgggaaatgaaatgtgactgtctgaatgtatggctttaagatagctgtgataccgtatacaggtcggtgtcggagattcgaatctctttgaggcgacttatgtcacgatgatggaatctatcttatcgaatgatatatttttcataaatacacttttatagtcctcgtttaaacagaatttactatgtagttccgcgaatgactcgtcccttaataggcagtaggctagtatcttttttacgtagtaatcgtcgtagggagagacatcttgtagaacaacgatttaatcataggtagagatactttcagtctgtggtggatgatgtcattcacaacatccgccttgtatatgatgtttctgttttcaaacaccaagtcgaataccgtctttagtcggaaggttgatgtcgtatccgatgtatgaggcaacattgttgttacaattttgaaaggcggtattatagtattcgtctttctgaatgtcgaacctatctaatagataccgtagtatattgagagtgtatccttgattatgttttatgaatagataaagtagatgttgtccttcttccttttgttcgtgccaattgagtaacattatgagaatatgacctgttgcacaatcgttccatgatgggtgtacaatcaagattattacgtatcctcgtatcggctcctcgagataaaagagcatacaccacacgaggactatgtttggtatactgttgaaggtaagtgtgtaaccgcgttaatgtttgctccataatctattatcgcgtagatgaatcgcttctcggctcgcatcttagtgtgacttaacttgtaataattgctttcgtagaacgtggatatgtgtttacagtagtaatgaagagaagtgagttcatcctcgtcggcgcaattagggtcggatcctttgtacagaacgtaatagtttaagctcccattgaatttatatctaagataacacagcaatagatcggatgatttactaaagtcatcaatggtgtccgttagtatatcaaagatcttgttatcgattgatagtggtcatccttgctatcaaagttacgcatgccgtggtgtaacaatatctttaatacagatggattaaatcgtgtattcatcgtatagcaatgtaatggagagttacctcgtttattcagatcgcagtgtttaataactagcttaaacagatgagacgatgtatccacatcaaagaacgtaaaatacatatgacagacattgttgacagaaacgtgaccttcattcttaccgtcgtccataaatacgttaggtatgtaccacatactgtcgcgaacgatgcgtacaatctcgtccatctcataatgatttactttttcataattaaagatgtgaaagaaaaccgaacaatatatttttttagtaatgtttatgcgagacatataaaataaactccgtgtttatgatgccggtaaatgtttttatcatcttggacggaatcgattttgtaatatgtcatggaaacaaatgaaacaggacattatcgctccatgataaattatttaatggagtaataaagtatctccatgggtaatttcgaaatcaagttatcgtctgtattaatgttgtccactatggagtcgatcctctcattgttctttacagtttctgtaatgatggacgttagttcttttttgtaccatttgatgtcggattctttgcgtatctcaatttgtggcgtttgcttcgtttaaataatatatcaaacatggagacgcctgatatgtagacattcttcattctattaatgtctactctatagcgctttagttccttatgacgaccggcgatatcatactttactttagaaggaaaatcatcatctaggattaaggcgtatctgatacaggcgaataatggttcaggatatagatagcgtatatctctattaaatgcgtcaatcatagtctctagagtgggatggtaactcagtaataaatcaactagcttcgttttgttttctctttggtaactgcttttctggatggccgtattgattatcgagcgtgacactcgctccatattccaataaccgctttgcaaattgtatattattgacatcgaccgcgtaatatagtagagttatcgatcatatctatatcatccatgtacttgcttagtatatcaaatacatctatcagtatggtttcataacagtgatacccgcaattattaaatctcgataatatcagaccgtacatacatagacggccattgttcgatacgtgatttacagccgcgtgtccatattttccacgataaaccttacgacgtttacatcgacgagattattattaacaaagtagtcgtgcagaggatagttgttgtccgttatctaacatgcatcgaacgaccatatcgccgtaatgtaagtagtttatcaacatggcttgtacatcctgttgtctaaatctctttagaatgttatcgatgatgtagtggttatattctctggaatcgtacgaagtaatactacgcattacgtcgacaagagtatgacgtctctcaataagaagattaacgatttccatgtctacattatatggggttactctaaatcgcttgtttagataatacgcctctaatatagggctgacgtcgtatactctacacgtgtccacatcctttattaataataatttaacaatctctatatctatggttgagaaagaccagtagtattggatgggtaaagatcctccttcgtctctgccatggatggaaacattgttatcgatcaaacatttaattacatccttggatagagattgagattctctatgagacgatatatagtaatgaagagagttcttacacatatcactgtcgtacatacaggtacgaaatacgtaaccggtgctgtaacattctgatttaagaagccatagcaatacttctggtctctcgttacgtatatatccaccaatccgagaccattgattgcataattcgtattcttggacggacgtatccgtttatccacaattaggtattttagcagacgtaagtcgatattatccgaatacagatcgaaatcatttatattcgacttgagttcgttagaggaatttgaatagctggatatcagtagatgcacaatctgagattttacgtatctatgcttactgtatactcctagcggagttaatccttcgttgtttctacaaagtctctcgactccgcgagagaacaatcttaatgtctgtatcgcatttattggagacgtaacaatgtagcgcattgtttcctcgtctatctatatgttttgataagttgtgacacgtttcaatttctagttttatttttttgtacgtcacatcttcatccagtagacgacatagaatagtgcactctctaccacaataatccatagctattctggtgctaattattcctatttcacgaaggcaatcattcctcataagatgataaaaagtgtagtggagatttagtatttagcagtgcggatatgatccaagagggtgagatagtcgttctcgttcagaatctttcgcagcataagtagtatgtcgatatacttatcgttgaagactctttataaaagtctatttgtttatatttattgcggatagcagtatttccctataaaaagtatacgtcctgtggtgtctttaatcatgtacatgaatggatggtttatgtagaccttcgtacgatataccatcgaaaagttaatcgtaaatactcctgtaacggccgatgcttctgtatactcctcattaacatctataaacgtcgtatgtagaaatttttctacagtgatagtttcattacacatcttgctaaaatctgcataatatccgaatatattagtaagtcctaaattttctaaaatcggtaccagattatacggttctgtcatttccactttaaactttggcatatacaagtctatacttttagtagataacataccacaccattttttaaatttttcatctgttatatttttttctatgttatatataccttctatgtcgtccggtagtataatcaccatactagagtttccctcgtatggaatatcgataatagagaatcctccgaataattcattaatatgtacatattgcaagttattctcggtacccaccatcatatcaacgctggtaactatattcttagaaatataaaacttgtctgtatatgtaagatgtttagaaaatggatatttccacattgctttaaaatggacggcgctaacaactgtcatacgagtattaatggatagcggactagtcaataaggaattaattttaccatttgtcattgtcttaacccattcgttgattagttcctttgtttggttagcattattaaagtttacagtttgaaaatcgtcttttattttttgtaggaaggaggcgtggaactcgatactatcgctaccgtatattttatttgcggtagctagtgtcgcacaatacggaatatctacctccatgtcatcattattgtcatcgggtgtattctcattcatattctctatatattttgatagttgttcagctgtagaaccagctgctccatgatttagaatagataaagtagataaaatggaaactggagaaatcaaaacattttcatcagggtgttttaagattagttctttaaagatatccatggtatagacctaacgataacgatatatatcataaataaataatgttaaatttcaatttatgtttgtaccccgtattcatacttaacaaattggtattgcgtacacaatcaatcatattacataccattaataatgcaagcataaaaaattgttagtagatgtttctaaatataggttccgtaagcaaagaatataagaatgaagcggtaatgataaaatcaatcgttatctaaaatgatcatactcatttattttattctattatattaacacatacatttttaacagcaacacattcaatattgtattgttatttttatattatttacacaattaacaatatattattagtttatattactgaattaataatataaaattcccaatcttgtcataaacacacactgagaaacagcataaacacagaatccatcaaaaatgttgataaattatctgatgttgttgttcgctgctatgataatcagatcattcgccgatagtggtaacgctatcgaaacgacattgccagaaattacaaacgctacaacagatattccagctatcagattatgcggtccagagggagatggatattgtttacacggtgactgtatccacgctagagatattgacggtatgtattgtagatgctctcatggttatacaggcattagatgtcagcatgtagtattagtagactatcaacgttcagaaaacccaaacactacaacgtcatatatcccatctcccggtattatgcttgtattagtaggcattattatgtgttgtctattatctgtttataggttcactcgacgaactaaactacctatacaagatatggttgtgccataatttttataaatttttttatgagtatttttacaaaaatgtataaagtgtatgtcttatgtatatttataaaaatgctaagtatgcgatgtatctatgttatttgtatttatctaaacaatacctctacctctagatattatacaaaaattttttatttcggcatattaaagtaaaatctagttaccttgaaaatgaatacagtgggtggttccgtatcaccagtaagaacataatagtcaaatacagtatccgattgagattttgcatacaatactagtctagaaagaaatttgtaatcatcttctgtgacgggagtccatatatctgtatcatcgtctagtttatcagtgtcccatgctatattcctgttatcatcattagttaatgaaaataactctcgtgcttcagaaaagtcaaatattgtatccatacatacatctccaaaactatcgcttatacgtttatctttaacgatacctatacctagatggttatttactaacagacattttccagatctattgactataactcctatagtttccacatcaaccaagtaatgatcatctattgttatataacaataacataactcttttccatttttatcagtatgtatatctatatcaacgtcgtcgttgtagtgaatagtagtcattgatctattatatgaaacggatatgtctagaacggcaattgttttacgtccagttaacactttcgttgatttaaagtctagagtctttgcaaacataatatccttatccgactttatatttcctgtagggtggtataattttattttgcctccacatatcggtgtttccaaatatattactagacaatattccatatagttattagttaagggtacccaattagaacacgtacgcttattatcatcatttggatcgtatttcataaaagttattgtgttatcgatgtcaacacattctacattttttaatcgtctatatagtatttttctgatattttctataatatcagaattgtcttccatcggaagttgtatactatcggaatcagttacatgtttaaataattctctgatgtcattccttatacaatcaaattcattattaaacagtttaatagtctgtagacctttatcgtcgtaaatatccattgtcttattagttacgcttatttttatgtgtttttacgttgctttattatattttataagaatgattgtttgacgaatcacgagaactattaagacacattattaggtatatattataaaaaagtttttgattacgatgttataagaggaaagaggacacattaacatcatacatcaattaactacattcttataacatcgtaatcaaaagaattgcaattttgatgtataacaactgtcaatgggttatggaattgtatattacatattatacggtatgttggtaacgacaaataccggtcggtaattgtctgccggtgtaatagaattatatatatctatctattacaccggccttgtatacataataataagttgtggtagtatgatctccatatttataatttaggactttgtattcagtatttttggaatcataaaaaataaaaaaaagttttactaatttaaaatttaaaaagtatttacatttttttcactgtttagtcgcggatatggaattcgatcctgccaaaatcaatacatcatctatagatcatgtaacaatattacaatacatagatgaaccaaatgatataagactaacagtatgcattatccgaaatattatatcaatatcacaaaaataaatacacatttggctaatcaatttcgggcttggaaaaaacgtatcgccggaagggactatatgactaacttatctagagatacaggaatacaacaatcaaaacttactgaaactatacgtaactgtcaaaaaaatagaaacatatatggtctatatatacactacaatttagttattaattggataaccgatgtgattatcaatcaatattaagagggttggtaaattggtacatagctaataatacctatacacccaataatacaacaaccatttctgagttggatatcatcaaaatactggataaatacgaggacgtgtatagagtaagtaaagaaaaagaatgtggaatttgctatgaagttgtttactcaaaacgatagatactttggtttattggattcgtgtactcatatattttgcataacatgcatcaatatatggcatagaacacgaagagaaaccggtgcgtcggataattgtcctatatgccgtacccgttttagaaacataacaatgagcaagttctataagctagttaactaataaataaaaagtttaatttgttgacgacgtatgtcgttatttttctcgtatgaaagattaaattcaattcaattcgttgtttctaatataatctgccgtattggatggattctcaagacaattgcatttagattatattatcatgaataaaaatagtagcacacaactacttcagcaaatattcttttttgaaacgccatctatcgtagtgaggacacaagtgaacctataatgagcaaatttattagtatcagtcacatgaaggactttctgtagagtgacgattccactatctgtggtacgaacggtttcatcttctttgatgccatcacccagatgttctataaacttggtatcctcgtccgatttcatatcctttgccaaccaatacatatagctaaactcaggcatatgttccacacatcctgaacaatgaaattctccagaagatgttacaatgtctagatttggacatttggtttcaaccgcgttaacatatgagtgaacacacccatacatgaaagcgatgagaaataggattctcatcttgccaaaatatcactagaaaaaatttatttatcagttttaaaggtataaaaaatacttattgttgctcgaatattttgtatttgatggtatacggaagattagaaatgtaggtattatcatcaactgattctatggttttatgtattctatcatgtttcactattgcgttggaaataatatcatatgcttccacatatattttattttgttttaactcataatactcacgtaattctggattattggcatatctatgaataattttagctccatgatcagtaaatattaatgagaacatagtattaccacctaccattatttttttcatctcattcaattcttaattgcaaagatctatataatcattatagcgttgacttatggactctggaatcttagacgatgtacagtcatctataatcatggcatatttaatacattgttttatagcatagtcgttatctacgatgttagatatttctctcaatgaatcaatcacataatctaatgtaggtttatgacataatagcattttcagcagttcaatgtttttagattcgttgatggcaatggctatacatgtatatccgttatttgatctaatgttgacatctgaaccggattctagcagtaaagatactagagattgtttattatatttaacagccttgtgaagaagtgtttctcctcgtttgtcaatcatgttaatgtctttaagataaggtaggcaaatgtttatagtactaagaattgggcaagcataagacatgtcacaaagaccctttttgtatgtataagtgtagaaattataacatccatagttggatttacataggtgtccaatcgggatctctccatcatcgagataattgatggcatctcccttccttttttagtagatatttcatcgtgtaagaatcaatattaatatttctaaagtatccgtgtatagcctctttatttaccacagttccatattccactagagggatatcgccgaatgtcatatactcaattagtatatgttggaggacatccgagttcattgttttcaatatcaaagagatggtttccttatcatttctccatagtggtacaatactacacattatttcgtgcggctttccattttccaaaaacaatttgaccaaatctacatctttattgtatctataatcactatttagataatcagccataattactcgagtgcaacatgttagatcgtctatatatgaataagccgtgttatctattcctttcattaacaatttaacgatgtctatatctatatgagatgacttaatataatattgaagagctgtacaatagtttttatctataaaagacggcttgattccgtgattaattagacatttaacaacttccggacgcacatatgctctcgtatccgactctgaatacagatgagagatgatatacagatgcaatacggtaccgcaatttcgtagttgataatcatcatacgcgtatcagtactcgtcctcataaagaacactgcagccattttctatgaacaaatcaataattttaggaacaggatcattgtcattacataattttctataactgaacgatggttttcacatttaacactcaagtcaaatccatgttctaccaacacctttatcaagtcaacgtctacatttttggatttcatatagctgaatatattaaagtcatttatgttgctaaatccagtggcttctagtagagccatcgctatatcctttaactttaacatgtctactatttgtgtattcttctaatggggtagctgtctccaatttttgcgtaatggattagtgccactgtctagtagtagtttgacgacctcgacattattacaatgctcattaaaaaggtatgcgtgtaaagcattattcttgaattggttcctggtatcattaggatctctgtctttcaacatctgtttaagttcatcaagagccacctcctcattttccaaatagtcaaacattttgactgaatgagctactgtgaactctatacacccacacaactaatgtcattaaatatcatgtcaaaaacttgtacaattattaataaaaataatttagtgtttaaattttaccagttccagattttacacctccgttaatacctccattaaccccactggacgatcctcctccccacattccaccgccaccagatgtataagttttagatcctttattactaccatcatgtccatggataaagacactccacatgccgccactaccccctttagaagacatattaataagacttaaggacaagtttaacaataaaattaatcacgagtaccctactaccaacctacactattatatgattatagtttctatttttacagtaccttgactaaagtttctagtcacaagagcaatactaccaacctacactattatatgattatagtttctatttttataggaacgcgtacgagaaaatcaaatgtctaatttctaacggtagtgttgataaacgattgttatccgcggatacctcctctatcatgtcgtctattttcttactttgttctattaacttattagcattatatattatttgattataaaacttatattgcttattagcccaatctgtaaatatcggattattaacatatcgtttctttgtaggtttatttaacatgtacatcactgtaagcatgtccttaccatttattttaatttgacgcatatccgcaatttctttttcgcagtcggttataaattctatatatgatggatacatgctacatgtgtacttataatcgactaatatgaagtacttgatacatattttcagtaacgatttattattaccacctatgaataagtacctgtgatcgtctaggtaatcaactgttttcttaatacattcgatggttggtaatttactcagaataatttccaatatcttaatatataattctgctatttctgggatatatttatctgccagtataacacaaatagtaatacatgtaaacccatattttgttattatattaatgtctgcgccattatctattaaccattctactaggctgacactatgcgactcaatacaatgataaagtatactacatccatgtttatctattttgtttatatcatcaatatacggcttacaaagttttagtatcgataacacatccaactcacgcatagagaaggtagggaataatggcataatatttattaggttatcatcattgtcattatctacaactaagtttccattttttaaaatatactcgacaactttaggatctctattgccaaatttttgaaaatatttatttatatgcttaaatctatataatgtagctccttcatcaatcatacatttaataacattgatgtatactgtatgataagatacatattctaacaatagatcttgtatagaatctgtatatcttttaagaattgtggatattaggatattattacataaactattacacaattctaaaatataaaacgtatcacggtcgaataatagttgatcaactatataattatcgattttgtgatttttcttcctaaactgtttacgtaaatagttagatagaatattcattagttcatgaccactatagttactatcgaataacgcgtcaaatatttcccgtttaatatcgcatttgtcaagataataatagagtgtggtatgttcacgataagtataataacgcatctctttttcgtgtgaaattaaatagtttattacgtccaaagatgtagcataaccatcttgtgacctagtaataatataataatagagaactgttttacccattctatcatcataatcagtggtgtagtcgtaatcgtaatcgtctaattcatcatcccaattataatattcaccagcacgtctaatctgttctattttgatcttgtatccatactgtatgttgctacatgtaggtattcctttatccaataatagtttaaacacatctacattgggatttgatgttgtagcgtatttttctacaatattaataccatttttgatactatttatttctatacctttcgaaattagtaatttcaataagtctatattgatgttatcagaacatagatattcgaatatatcaaaatcattgatatttttatagtcgactgacgacaataacaaaatcacaacatcgtttttgatattattatttttcttggtaacgtatgcctttaatggagtttcaccatcatactcatataatggatttgcaccactttctatcaatgattgtgcactgctggcatcgatgttaaatgttttacaactatcatagagtatcttatcgttaaccatgattggttgttgatgctatcgcattttttggtttctttcatttcagttatgtatggatttagcacgtttgggaagcatgagctcatatgatttcagtactgtagtgtcagtactattagtttcaataagatcaatctctagatctatagaatcaaaacacgataggtcagaagataatgaatatctgtaggcttcttgttgtactgtaacttctggttttgttagatggttgcatcgtgctttaacgtcaatggtacaaattttatcctcgctttgtgtatcatattcgtccctactataaaattgtatattcagattatcatgcgatgtgtatacgctaacggtatcaataaacggagcacaccatttagtcataaccgtaatccaaaaatttttaaagtatatcttaacgaaagaagttgtgtcattgtctacggtgtatggtactagatcctcataagtgtatatatctagagtaatgtttaatttattaaatggttgataatatggatcctcgtgacaatttccgaagatggaaataagacataaacacgcaataaatctaattgcggacatggttactccttaaaaaaatacgaataatcaccttggctatttagtaagtgtcatttaacactatactcatattaatccatggactcataatctctatacgggattaacggatgttctatatacggggatgagtagttctcttctttaactttatactttttactaatcatatttagactgatgtatgggtaatagtgtttgaagagctcgttctcatcatcagaataaatcaatatctctgtttttttgttatacagatgtattacagcctcatatattacgtaatagaacgtgtcatctaccttattaactttcaccgcatagttgtttgcaaatacggttaatcctttgacctcgtcgatttccgaccaatctgggcgtataatgaatctaaactttaattgcttgtaatcattcgaaataatttttagtttgcatccgtagttatcccctttatgtaactgtaaatttctcaacgcgatatctccattaataatgatgtcgaattcgtgctgtatacccatactgaatggatgaacgaataccgacggcgttaatagtaatttactttttcatctttacatattgggtactagttttactatcataagtttataaattccacaagctactatggaataagccaaccatcttagtataccacacatgtcttaaagtttattaattaattacatgttgttttatatatatcgctacgaatttaaagagaaattagtttaggaagaaaaattatctatctacatcatcacgtctctgtattctacgatagagtgctactttaagatgcgacagatccgtgtcatcaaatatatactccattaaaatgattattccggcagcgaacttgatattggatatatcacaacctttgttaatatctacgacaatagacagcagtcccatggttccataaacagtgagtttatctttctttgaagagatattttgtagagatcttataaaactgtcgaatgacatcgcatttatatctttagctaaatcgtatatgttaccatcgtaatatctaaccgcgtctatcttaaacgtttccatcgctttaaagacgtttccgatagatggtctcatttcatcagtcatactgagccaacaaatataatcgtgtataacatctttgatagaatcagactctaaagaaaacgaatcggctttattatacgcattcatgataaacttaatgaaaaatgtttttcgttgtttaagttggatgaatagtatgtcttaataattgttattatttcattaattaatatttagtaacgagtacactctataaaaacgagaatgacataactaatcataactagttatcaaagtgtctaggacgcgtaattttcatatggtatagatcctgtaagcattgtctgtattctggagctattttctctatcgcattagtgagttcagaatatgttataaatttaaatcgaataacgaacataactttagtaaagtcgtctatattaactcttttattttctagccatcgtaataccatgtttaagatagtatattctctagttactacgatctcatcgttgtctagaatatcacatactgaatctacatccaattttagaaattggtctgtgttacatatctcttctatattattgttgatgtattgtcgtagaaaactattacgtagaccattttctttataaaacgaatatatagtactccaattatctttaccgatatatttgcacacataatccattctctcaatcactacatctttaagattttcgttgttaagatatttggctaaactatataattctattagatcatcaacagaatcagtatatatttttctagatccaaagacgaactctttggcgtcctctataatattcccagaaaagatattttcgtgttttagtttatcgagatctgatctgttcatatacgccatgattgtacggtacgttatgataaccgcataaaataaaaatccattttcatttttaaccaatactattcataattgagattgatgtaatactttgttactttgaacgtaaagacagtacacggatccgtatctccaacaagcacgtagtaatcaaatttggtgttgttaaacttcgcaatattcatcaatttagatagaaacttatactcatcatctgttttaggaatccatgtattattaccactttccaacttatcattatcccaggctatgtttcgtccatcatcgttgcgcagagtgaataattcttttgtattcggtagttcaaatatatgatccatgcatagatcggcaaagctattgtagatgtgatttttcctaaatctaatataaaactcgtttactagcaaacactttcctgatttatcgaccaagacacatatggtttctaaatctatcaagtggtggggatccatagttatgacgcagtaacatatattattacattcttgactgtcgctaatatctaaatatttattgttatcgtattggattctgcatatagatggcttgtatgtcaaagatatagaacacataaccaatttatagtcgcgctttacattctcgaatctaaagttaagagatttagaaaacattatatcctcggatgatgttatcactgtttctggagtaggatatattaaagtctttacagatttcgtccgattcaaataaatcactaaataatatcccacattatcatctgttagagtagtatcattaaatctattatattttatgaaagatatatcactgctcacctctatatttcgtacatttttaaactgtttgtataatatctctctgatacaatcagatatatctattgtgtcggtagacgataccgttacatttgaattaatggtgttccattttacaacttttaacaagttgaccaattcatttctaatagtatcaaactctccatgattaaatattttaatagtatccattttatatcactacggacacaaagtagctgacataaaccattgtataatttttatgttttatgtttattagcgtacacattttggaagttccggcttccatgtatttcctggagagcaagtagatgatgaggaaccagatagtttatatccgtacttgcacttaaagtctacattgtcgttgtatgagtatgatcttttaaacccgctagacaagtatccgtttgatattgtaggatgtggacatttaacaatctgacacgtgggtggatcggaccattctcctcctgaacacaggacactagagttaccaatcaacgaatatccactattgcaactataagttacaacgctcccatcggtataaaaatcctcgtatccgttatgtcttccgttggatatagatggaggggattggcatttaacagattcacaaataggtgcctcgggattccataccatagatccagtagatcctaattcacaatacgatttagattcaccgatcaactgatatccgctattacaagagtacgttatactagagccaaagtctactccaccaatatcaagttggccattatcgatatctcgaggcgatgggcatctccgtttaatacattgattaaagagtgtccatccagtacctgtacatttagcatatataggtcccattttttgctttctgtatccaggtagacatagatattctatagtgtctcctatgttgtaattagcattagcatcagtctccacactattcttaaatttcatattaatgggtcgtgacggaatagtacagcatgatagaacgcatcctattcccaacaatgtcaggaacgtcacgctctccaccttcatatttatttatccgtaaaaatgttatcctggacatcgtacaaataataaaaagcccatatatgttcgctattgtagaaattgtttttcacagttgctcaaaaacgatggcagtgacttatgagttacgttacactttggagtctcatctttagtaaacatatcataatattcgatattacgagttgacatatcgaacaaattccaagtatttgattttggataatattcgtattttgcatctgctataattaagatataatcaccgcaagaacacacgaacatctttcctacatggttaaagtacatgtacaattctatccatttgtcttccttaactatatatttgtatagataattacgagtctcgtgagtaattccagtaattacatagatgtcgccgtcgtactctacagcataaactatactatgatgtctaggcatgggagacttttttatccaacgatttttagtgaaacattccacatcgtttaatactacatatttctcatacgtggtataaactccacccattacatatatatcatcgtttacgaataccgacgcgcctgaatatctaggagtaattaagtttggaagtcttatccatttcgaagtgccgtgtttcaaatattctgccacacccgttgaaatagaaaattctaatcctcctattacatataactttccatcgttaacacaagtactaacttctgattttaacgacgacatattagtaaccgttttccattttttcgttttaagatctacccgcgatacggaataaacatgtctattgttaatcatgccgccaataatgtatagacaattatgtaaaacatttgcattatagaattgtctatctgtattaccgactatcgtccaatattctgttctaggagagtaatgggttattgtggatatataatcagagtttttaatgactactatattatgttttataccatttcgtgtcactggctttgtagatttggatatagttaatcccaacaatgatatagcattgcgcatagtattagtcataaacttgggatgtaaaatgttgatgatatctacatcgtttggatttttatgtatccactttaataatatcatagctgtaacatcctcatgatttacgttaacgtcttcgtgggataagatagttgtcagttcatcctttgataattttccaaattctggatcggatgtcaccgcagtaatattgttgattatttctgacatcgacgcattatatagttttttaattccatatcttttagaaaagttaaacatccttatacaatttgtgaaattaatattatgaatcatagtttttacacatagatctactacaggcggaacatcaattattatggcagcaactagtatcatttctacattgtttatggtgatgtttatcttcttccagcgcatatagtctaatagcgattcaaacgcgtgatagtttataccattcaatataatcgcttcatcctttagatggtgatcctgaatgcgtttaaaaaaattatacggagacgccgtaataatttccttattcacttgtataatttccccattgatagaaaatattacgctttccattcttaaagtactataagtaattatagtataatgtaaacgtttatatattcaatatttttataaaaatcattttgacattaattcctttttaaatttccgtctatcatctatagaaacgtattctatgaatttataaaatgcttttacgtgtcctatcgtaggcgatagaaccgctaaaaagcctatcgaatttctacaaaagaatctgttatatggtatagggagagtataaaacattaaatgtccgtacttattaaagtattcagtagccaatcctaactctttcgaatacttattaatggctcttgttctgtacgaatctatttttttgaacaacggacctagtggtatatcttgttctatgtatctaaaataatgtctgactagatccgttagtttaatatccgcagtcatcttgtctagaatggcaaatctaactgcgggtttaggctttagtttagtttctatatctacatctatgtctttatctaacaccaaaaatataatagctaatattttattacaatcatccggatattcttctacgatctcactaactaatgtttctttggttatactagtatagtcactatcggacaaataaagaaaatcagatgatcgatgaataatacatttaaattcatcatctgtaagatttttgagatgtctcattagaatattattagggttagtactcattatcattcggcagctattacttattttattatttttcaccatatagatcaatcattagatcatcaaaatatgtttcaatcatcctaaagagtatggtaaatgactcttcccatctaatttctgaacgttcaccaatgtctctagccactttggcactaatagcgatcattcgcttagcgtcttctatattattaactggttgattcaatctatctagcaatggaccgtcggacagcgtcattctcatgttcttaatcaatgtacatacatcgccgtcatctaccaattcatccaacaacataagctttttaaaatcatcattataataggtttgatcgttgtcatttctccaaagaatatatctaataagtagagtcctcatgcttagttaacaactattttttatgttaaatcaattagtacaccgctatgtttaatacttattcatattttagtttttaggattgagaatcaatacaaaaattaatgcatcattaattttagaaatacttagtttccacgtagtcaatgaaacatttgaactcatcgtacaggacgttctcgtacaggacgtaactataaaccggtttatatttgttcaagatagatacaaatccgataactttttttacgaattctacgggatccactttaaaagtgtcataccgggttctttttatttttttaaacagatcaatggtgtgatgttgattaggtcttttacgaatttgatatagaatagcgtttacatatcctccataatggtcaatcgccatttgttcgtatgtcataaattctttaattatatgacactgtgtattatttagttcatccttgttcattgttaggaatctatccaaaatggcaattatactagaactataggtgcgttgtatacacatattgatgtgtctgtttatacaatcaatgctactaccttcgggtaaaattgtagcatcatataccatttctagtactttaggttcattattatccattgcagaggacgtcatgatcgaatcataaaaaaatatattatttttatgttattttgttaaaaataatcatcgaatacttcgtaagatactccttcatgaacataatcagttacaaaacgtttatatgaagtaaagtatctacgatttttacaaaagtccggatgcataagtacaaagtacgcgataaacggaataataatagatttatctagtctatctttttctatagctttcatagttagatacatggtctcagaagtaggattatgtaacatcagcttcgataaaatgactgggttatttagtcttacacattcgctcatacatgtatgaccgttaactacagagtctacactaaaatgattgaacaatagatagtctaccattgtttcgtattcagatagtacagcgtagtacatggcatcttcacaaattatatcattgtctaatagatatttgacgcatcttatggatcccacttcaacagccatcttaaaatcggtagaatcatattgctttcctttatcattaataatttctagaacatcatctctatcataaaagatacaaatattaactgtttgatccgtaataacattgctagtcgatagcaatttgttaataagatgcgctgggctcaatgtcttaataagaagtgtaagaggactatctccgaatttgttttgtttattaacatccgttgatggaagtaaaagatctataatgtctacattcttgactgttttagagcatacaatatggagaggtgtatttccatcatgatctggttttgagggactaattcctagtttcatcatccatgagattgtagaagcttttggattgtctgacataagatgtctatgaatatgatttttgccaaatttatccactatcctggcttcgaatccgatggacattatttttttaaacactctttctgaaggatctgtacacgccaacaacggaccacatccttcttcatcaaccgagttgttaatcttggctccatactgtaccaataaatttattctctctatgacttcatcatctgttcccgagagataatatagaggcgttttatgctgtttatcacacgcgtttggatctgcgccgtgcgtcagcagcatcgcgactattctattattattaattttagaagctatatgcaatggataatttccatcatcatccgtctcatttggagagtatcctctatgaagaagttcttcgacaaatcgttcatctagtcctttaattccacaatacgcatgtagaatgtgataattatttccagaaggttcgatagcttgtagcatattcctaaatacatctaaatttttactattatatttggcataaagagatagataatactcggccgacataatgttgtccattgtagtataaaaattaatatttctatttctgtatatttgcaacaatttactctctataacaaatatcataacttagttcttttatgtcaagaaggcactggtttagttcatctataaatgtcacgccataactaccacgcatgccatactcagaattatgataaagatatttatccttggggtgtaggtaatggggattaatctttgttggatcagtctctaagttaacacatgtcacacatgatccatttatagttatatcacacgatgatgatttatgaattgattccggaagatcgctatcgtattttgtggttccacaattcatttccatacatgttattgtcacactaatattatgatgaactttatctagccgctgagtggtaaacaacagaacagatagtttattatctttaccaacaccctcagccgctgccacaaatctctgatccgtatccatgatggtcatgtttatttctagtccgtatccagtcaacactatgttagcatttctgtcgatatagctttcactcatatgacactcaccaataatagtagaattaatgtcgtaatttacaccaatagtgagttcggcggcaaagtaccaataccggtaatcttgtcgaggaggacatatagtattcttgtattctaccgaatacccgagagatgcgatacaaaagagcaagactaatttgtaaaccatcttactcaaaatatgtaacaatagtacgatgcaatgagtaagacaataggaaatctatcttatatacacataattattctatcaattttaccaattagttagtgtaatgttaacaaaaatgtgggagaatctaattagtttttctttacacaattgacgtacatgagtctgagttccttgtttttgctaattatttcatccaatttattattcttgacgatatcgagatcttttgtataggagtcaaacttgtattcaacatgcttttctataatcattttagctatttcggcatcatccaatagtacattttccagattagcagaatagatattaatgtcgtatttgaacagagcctgtaacatctcaatgtctttattatctatagccaatttaatgtccggaatgaagagaagggaattattggtgtttgtcgacgtcatatagtcgagcaagagaatcatcatatccacgtgtccattttttatagtgatgtgaatacaactaaggagaatagccagatcaaaagtagatggtatctctgaaagaaagtaggaaacaatacttacatcattaagcatgacggcatgataaaatgaagttttccatccagttttcccatagaacatcagtctccaatttttcttaacaaacagttttaccgtttgcatgttaccactatcaaccgcataatacaatgcggtgtttcccttgtcatcaaattgtgaatcatccagtccactgaatagcaaaatctttactattttggtatcttccaatgtggctgcctgatgtaatggaaattcattctctagaagatttttcaatgctccagcgttcaacaacgtacatactagacgcacgttattatcagctattgcataatacaaggcactatgtccatggacatccgccttaaatgtatctttactagagagaaagcttttcagctgcttagacttccaagtattaattcgtgacagatccatgtctgaaacaagacgctaattagtgtatattttttcattttttataattttgtcatattgcaccagaattaataatatctctaatagatctgattagtagatacatggctatcgcaaaacaacatatacacatttaataaaaataatatttattaagaaaattcagatttcacgtacccatcaatataaataaaataatgattccttacaccgtacccatattaaggagattccaccttacccataaacaatataaatccagtaatatcatgtctgatgatgaacacaaatggtgtattaaattccagtttttcaggagatgatctcgccgtagctaccataatagtagatgcctctgctacagttccttgttcgtcgacatctatctttgcattctgaaacattttataaatatataatgggtccctagtcatatgtttaaacgacgcattatctggattaaacatactaggagccatcatttcggctatcgacttaatatccctcttattttcgatagaaaatttagggagtttaagattgtacactttatttcctaattgagacgaccaatagtctaattttgcagccgtgatagaatctgtgaaatgggtcatattatcacctattgccaggtacatactaatattagcatccttatacggaaggcgtaccatgtcatattctttgtcatcgattgtgattgtatttccttgcaatttagtaactacgttcatcatgggaaccgttttcgtaccgtacttattagtaaaactagcattgcgtgttttagtgatatcaaacggatattgccatatacctttaaaatatatagtattaatgattgcccatagagtattattgtcgagcatattagaatctactacattagacataccggatctacgttctactatagaattaattttattaaccgcatctcgtctaaagtttaatctatataggccgaatctatgatattgttgataatacgacggtttaatgcacacagtattatctacgaaactttgataagttagatcagtgtacgtatatttagatgttttcagcttagctaatcctgatattaattctgtaaatgctggacccagatctctttttctcaaatccatagtcttcaataattctattctagtattacctgatgcaggcaatagcgacataaacatagaaaacgaataaccaaacggtgagaagacaatattatcatcttgaatatttttatacgctactataccggcattggtaaatccttgtagacgataggcggacgctgaacacgctaacgatagtatcaataacgcaatcatgattttatggtattaataattaaccttatttttatgttcggtataaaaaaattattgatgtctacacatccttttgtaattgacatctatatatccttttgtataatcaactctaatcactttaacttttacagttttccctaccagtttatccctatattcaacatatctatccatatgcatcttaacactctctgccaagatagcttcagagtgaggatagtcaaaaagataaatatatagagcataatcattctcgtatactctgccctttattacatcacccgcattgggcaacgaataacaaaatgcaagcatcttgttaacgggctcgtaaattgggataaaaattatgtttttattgtcttatatctattttattcaagagaatattcaggaatttctttttccggttgtatctcgtcgcagtatatatcatttgtacattgtttcatattttttaatagtttacaccttttagtaggactagtatcgtacaattcatagctgtattttgaattccaatcacgcataaaaatatcttccaattgttgacgaagacctaatccatcatccggtgtaatattaatagatgctccacatgtatccgtaaagtaatttcctgtccaatttgaggtacctatataggccgttttatcggttaccatatatttggcatggtttaccctagaatacggaatgggaggatcagcatctggtacaataaatagctttacttctatatttatgtttttagattttagcatagcgatagatcttaaaaagtttctcatgataaacgaagatcgttgccagcaactaatcaatagcttaacggatacttgtctgtctatagcggatcttcttaattcatcttctatataaggccaaaacaaaattttacccgccttcgaataaataatagggataaagttcataacagatacataaacgaatttactcgcatttctaatacatgacaataaagcggttaaatcattggttctttccatagtacatagttgttgcggtgcagaagcaataaatacagagtgtggaacgccgcttacgttaatactaagaggatgatctgtattataatacgacggataaaagtttttccaattatatggtagattgttaactccaagataccagtatacctcaaaaatttgagtgagatccgctgccaagttcctattattgaagatcgcaatacccaattccttgacctgagttagtgatctccaatccatgttagcgcttcctaaataaatatgtgtattatcagatatccaaaattttgtatgaagaactcctcctaggatatttgtaatatctatgtatcgtacttcaactccggccatttgtagtctttcaacatcctttaatggtttgttagatttattgacggctactctaactcgtactcctcttttgggtaattgtacaatctcgtttaatattatcgtgccgaaattcgtacccacttcatccgataaactccaataaaaagatgatatatctagtgtttttgtggtattggatagaatttccctccacatgttaaatgtagacaaatatactttatcaaattgcatacctataggaatagtttctgtaatcactgcgattgtattatccggattcattttatttgttaaaagaataatcctatatcacttcactctattaaaaatccaagtttctatttctttcatgactgattttttaacttcatccgtttccttatgaagatgatgtttggcaccttcataaatttttatttctctattacaatttgcatgttgcatgaaataatatgcacctaaaacatcgctaatcttattgtttgttccctggagtatgagagtcgggggggtgttaatcttggaaattatttttctaaccttgttggtagccttcaagacctgactagcaaatccagccttaattttttcatgattgactaatgggtcgtattggtatttataaactttatccatatctctagatactgattctggacatagctttccgactggcgcatttggtgtgatggttcccataagtttggcagctagcagattcagtcttgaaacagcatctgcattaactagaggagacattagaatcattgctgtaaacaagtttggattatcgtaagaggctagctcccatggaatgacccaataagtagatttaatagttaccacgtgctgtaccaaagtcatcaatcatcattttttcaccattacttcttccatgtccaatatgatcatgtgagaatactaaaattcctaacgatgatatgttttcagctagttcgtcataacgtccagaatgtttaccagctccatgacttatgaatactaatgccttaggatatgtaataggtttccaatatatgtaatcattgtccagattgaacatacagtttgcactcatgattcacgttatataactatcaatattaacagttcgtttgatgatcatattatttttatgttttattgataattgtaaaaacatacaattaaatcaatatagaggaaggagacggctactgtcttttgtgagatagtcatggcgactaaattagattatgaggatgctgttttttactttgtggatgatgataaaatatgtagtcgcgactccatcatcgatctaatagatgaatatattacgtggagaaatcatgttatagtgtttaacaaagatattaccagttgtggaagactgtacaaggaattgatgaagttcgatgatgtcgctatacggtactatggtattgataaaattaatgagattgtcgaagctatgagcgaaggagaccactacatcaattttacaaaagtccatgatcaggaaagtttattcgctaccataggaatatgtgctaaaatcactgaacattggggatacaaaaagatttcagaatctagattccaatcattgggaaacattacagatctgatgaccgacgataatataaacatcttgatactttttctagaaaaaaaattgaattgatgatataggggtcttcataacgcataattattacgttagcattctatatccgtgttaaaaaaaattatcctatcatgtatttgagagttttatatgtagcaaacatgatagctgtgatgccaataagctttagatattcacgcgtgctagtgttagggatggtattatctggtggtgaaatgtccgttatataatctacaaaacaatcatcgcatatagtatgcgatagtagagtaaacatttttatagtttttactggattcatacatcgtctacccaattcggttataaatgaaattgtcgccaatcttacacccaaccccttgttatccattagcatagtattaacttcgttatttatgtcataaactgtaaatgattttgtagatgccatatcatacatgatattcatgtccctattataatcattactaactttatcacaatatatgttgataatatctatatatgatctagtctttgtgggcaactgtctatacaagtcgtctaaacgttgtttactcatatagtatcgaacagccatcattacatggtcccgttccgttgatagataatcgagtatgttagtggacttgtcaaatctatataccatattttctggaagtggatatacatagtcgtgatcaacattattgctagcctcatcttctatatcctgtactataccattatctatatcatctacataatctatgatattattacacataaacatcgacaacatactattgtttattatctaagtcctgttgatccaaacccttgatctcctctatttgtactatctagagattgtacttcttccagttctggataatatatacgttgatagattagctgagctattctatctccagtatttacattaaacgtacattttccattattaataagaatgactcctatgtttcccctataatcttcgtctattacaccgcctcctatatcaatgccttttagtgacagaccagacctaggagctattctaccatagcaaatcttaggcatggacatactaatatctgtcttaattaactgtctttctcctggagggatagtataatcgtaagcgctatacaaatcatatccggcagcacccggcgattgcctagtaggagatttagctctgttagtttccttaacaaatctaactggtgagttaatattcatgttgaacataaaactaatattttatttcaaaattatttaccatcccatatattccatgaataagtgtgatgattgtacacttctatagtatctatatacgattcacgataaaatcctcctatcaatagcagtttattatccactatgatcaattctggattatccctcggataaataggatcatctatcagagtccatgtattgctggattcacaataaaattccgcatttctaccaaccaagaataaccttctaccgaacactaacgcgcatgatttataatgaggataataagtggatggtccaaactgccactgatcatgattgggtagcaaatattctgtagttgtatcagtttcagaatgtcctcccattacgtatataacattgtttatagatgccactgctggattacatctaggtttcagaagactcggcatattaacccaagcagcatccccgtggaaccaacgctcaacagatgtgggatttggtagacctcctactacgtataatttattgttagcgggtatcccgctagcatacagtctggggctattcatcggaggaattggaatccaattgtttgatatataatttaccgctatagcattgttatgtatttcattgttcatccatccaccgatgagatatactacttctccaacatgagtacttgtacacatatggaatatatctataatttgatccatgttcataggatactctatgaatggatacttgtatgatttgcgtggttgtttatcacaatgaaatattttggtacagtctagtatccattttacattatttatacctctgggagaaagataatttgacctgattacatttttgataaggagtagcagatttcctaatttatttcttcgctttatataccacttaatgacaaaatcaactacataatcctcatctggaacatttagttcatcgctttctagaataagttttatagatagataatcaaaattgtctatgatgtcatcttctagttccaaaaagtgtttggcaataaagtttttagtatgacataagagattggatagtccgtattctatacccatcatgtaacactcgacacaatattcctttctaaaatctcgtaagataaagtttatacaagtgtagatgataaattctacagaggttaatatagaagcacgtaataaattgacgacgttatgactatctatatatacctttccagtatatgagtaaataactatagaagttagactgtgaatgtcaaggtctagacaaacccttgtaactggatctttatttttcgtgtatttttgacgtaaatgtgtgcgaaagtaaggagataactttttcaatatcgtagaattgactattatattgccacctatagcatcaataattgttttgaatttcttagtcatagacaatgctaatatattcttacagtacacagtattgacaaatatcggcatttatgtttctttaaaagtcaacatctagagaaaaatgattatctttttgagacataactcccattttttggtattcacccacacgtttttcgaaaaaattagtttttccttccaatgatatattttccatgaaatcaaacggattggtaacattataaatttttttaaatcccaattcagaaatcaatctatccgcgacgaattctatatatgttttcatcatttcacaattcattcctataagtttaactggaagagccgcagtaagaaattcttgttcaatggataccgcatctgttataatagatctaacggtttcttcactcggtggatacaataaatgtttaaacatcaaacatgcgaaatcgcagtgcagaccctcgtctctactaattagttcgttggaaaacgtgagtccgggcattaggccacgctttttaagccaaaatatggaagcgaatgatccggaaaagaagattccttctactgcagcaaaggcaataagtctctctccataaccggcgctgtcatgtatccacttttgagcccaatcggccttcttttttacacaaggcatcgtttctatggcattaaagagatagtttttttcattactatctttaacataagtatcgatcaaaagactatacatttccgaatgaatgttttcaatggccatctgaaatccgtagaaacatctagcctcggtaatctgtacttctgtacaaaatcgttccgccaaattttcattcactattccgtcactggctgcaaaaaacgccaatacatgttttataaaatatttttcgtctggtgttagtttattccaatcattgatatctttagatatatctacttcttccactgtccaaaatgatgcctctgcctttttatacatgttccagatgtcatgatattggattgggaaaataacaaatctatttggatttggtgcaaggatgggttccataactaaattaacaataacaataaattttttttcagttatctatatgcctgtacttggattttttgtacatcgatatcgccgcaatcactacaataattacaagtattattgatagcattgttattagtactatcataattaaattatctacattcatgggtgctgaataatcgttattatcatcattatcattttgtaattgtgacatcatactagataaatcgtttgcgagattgttgtgggaagcgggcatggaggatgcattatcattattatttaacgccttccatttggattcacaaatgttacgcacattcaacattttatggaaactataattttgtgaaaacaaataacaagaaaactcgtcatcgttcaaatttttaacgatagtaaaccgattaaacgtcgagctaatttctaacgctagcgactctgttggatatgggtttccagatatatatcttttcagttcccctacgtatctataatcatctgtaggaaatggaagatatttccatttatctactgttcctaatatcatatgtggtggtgtagtagaaccattaagcgcgaaagatgttatttcgcatcgtattttaacttcgcaataatttctggttagataacgcactctaccagtcaagtcaatgatattagcctttacagatatattcatagtagtcgtaacgatgactccatcttttagatgcgatactcctttgtatgtaccagaatcttcgtacctcaaactcgatatatttaaacaagttaatgagatattaacgcgttttatgaatgatgatatataaccagaagttttatcctcggtggctagcgctataaccttatcattataataccaactagtgtgattaatatgtgacacgtcagtgtgggtacaaatatgtacattatcgtctacgtcgtattcgatacatccgcatacagccaacaaatataaaatgacaaatactctaacgccgttcgtacccatcttgatgcggtttaataaatgttttgatttcaatttattgtaaaaaaagattcggttttatactgttcgatattctcattgcttatattttcatctatcatctccacacagtcaaatccgtggttagcatgcacctcatcaaccggtaaaagactatcggactcttctatcattataactctagaatatttaatttggtcattattaatcaagtcaattatcttatttttaacaaacgtgagtattttactcattttttataaaaacttttagaaatatacagactctatcgtgtgtctatatcttctttttatatccaatgtatttatgtctgatttttcttcatttatcatatataatggtccaaattctacacgtgcttcggattcatccagatcattaaggttcttataattgtaacatccttctcttccctcttctacatcttccttcttattcttattcttagcgtcacagaatctaccacagcaggatcccatgacgagcgtcatattaaactaatccattttcaattataatatatgattagtaatgaccattaaaataaaaaatattcttcataaccggcaagaaagtgaaaagttcacattgaaactatgtcagtagtatacatcatgaaatgatgatatatatatactctattttggtggaggattatatgatataattcgtggataatcatttttaagacacatttctttattcgtaaatcttttcacgttaaatgagtgtccatattttgcaatttcttcatatgatggcggtgtacgtggacgaggctgctcctgttcttgttgtggtcgccgactgtcgtgtctgcgtttagatccctccattatcgcgattgcgtagatggagtactattttataccttgtaattaaatttttttattaattaaacgtataaaaacgttccgtatctgtatttaagagccagatttcgtctaatagaacaaatagctacagtaaaaataactagaataattgctacacccactagaaaccacggatcgtaatacggcaatcggttttcgataataggtggaacgtatattttatttaaggacttaacaattgtctgtaaaccacaatttgcttccgcggatcctgtattaactatctgtaaaagcatatgttgaccgggcggagccgaacattctccgatatctaatttctgtatatctataatattattaacctccgcatacgcattacagttcttttctagcttggataccgcactaggtacatcgtctagatctattcctatttcctcagcgatagctcttctatccttttccggaagcaatgaaatcacttcaataaatgattcaaccatgagtgtgaaactaagtcgagaattactcatgcatttgttagttattcggagcgcgcaatttttaaactgtcctataacctctcctatatgaatagcacaagtgacattagtagggatagaatgttgagctaatttttgtaaataactatctataaaaagattatacaaagttttaaactctttagtttccgccatttatccagtctgagaaaatgtctctcataataaatttttccaagaaactaattgggtgaagaatggaaacctttaatctatatttatcacagtctgttttggtacacatgatgaattcttccaatgccgtactaaattcgatatctttttcgatttctggatatgtttttaataaagtatgaacaaagaaatggaaatcgtaataccagttatgtttaactttgaaattgttttttattttcttgttaatgattccagccacttgggaaaagtcaaagtcgtttaatgccgatttaatacgttcattaaaaacaaactttttatcctttagatgaattattattggttcattggaatcaaaaagtaagatattatcgggtttaagatctgcgtgtaaaaagttgtcgcaacagggtagttcgtagattttaatgtataacagagccatctgtaaaaagataaactttatgtattgtaccaaagatttaaatcctaatttgatagctaactcggtatctactttatctgccgaatacagtgctaggggaaaaattataatgtttcctctttcatattcgtagttagttctcttttcatgttcgaaaaagtgaaacatgcggttaaaatagtttataacattaatattactgttaataactgccggataaaagtgggatagtaatttcacgaatttgatactgtcctttctctcgttaaacgcctttaaaaaaactttagaagaatatctcaatgagagttcctgaccatccatagtttgtatcaataatagcaacatatgaagaacccgtttatacagagtatgtaaaaatgttaatttatagtttaatcccatggcccacgcacacacgattaattttttttcatctccctttagattgttgtatagaaatttgggtactgtgaactccgccgtagtttccatgggactatataattttgtggcctcgaatacaaattttactacatagttatctatcttaaagactataccatatcctcctgtagatatgtgataaaaatcgtcgtttataggataaaatcgtttatccttttgttggaaaaaggatgaattaatgtaatcattctcttctatctttagtagtgtttccttattaaaattcttaaaataatttaacaatctaactgacggagcccaattttggtgtaaatctaattgggacattatattgttaaaatacaaacagtctcctaatataacagtatctgataatctatggggagacatccattgatattcaggggatgaatcattggcaacacccatttattgtacaaaaagccccaatttacaaacgaaagtccaggtttgatagagacaaactattaactattttgtctctgtttttaacacctccacagtttttaatttctttagtaatgaaattattcacaatatcagtatcttctttatctaccagagattttactaacttgataaccttggctgtctcattcaatagggtagtaatatttgtatgtgtgatattgatatctttttgaattgtttcttttagaagtgattctttgatggtgccagcatacgaattacaataatgcagaaactcggttaacatgcaggaattatagtaagccaattccaattgttgcctgtgttgtattagagtgtcaatatgagcaatggtgtccttgcgtttctctgatagaatgcgagcagcgattttggcgttatcatttgacgatatttctggaatgacgaatcctgtttctactaactttttggtaggacaaagtgaaacaatcaagaagatagcttctcctcctatttgtggaagaaattgaactcctctagatgatctactgacgatagtatctccttgacagatattggaccgaattacagaagtacctggaatgtaaagccctgaaaccccctcattttttaagcagattgttgccgtaaatcctgcactatgcccaagatagagagctcctttggtgaatccatctctatgtttcagtttaaccaagaaacagtcagctggtctaaaatttccatctctatctaatacagcatctaacttgatgtcaggaactatgaccggtttaatgttatatgtaacattgagtaaatccttaagttcataatcatcactgtcatcagttatgtacgatccaaacaatgtttctaccggcatagtggatacgaagatgctatccatcagaatgtttccctgattagtattttctatatagctattcttctttaaacgattttccaaatcagtaactatgttcatttttttaggagtaggacgcctagccagtatggaagaggattttctagatcctctcttcaacatctttgatctcgatggaatgcaaaaccccatagtgaaacaaccaacgataaaaataatattgtttttcactttttataattttaccatctgactcatggattcattaatatctttataagagctactaacgtataattctttataactgaactgagatatatacaccggatctatggtttccataattgagtaaatgaatgctcggcaataactaatggcaaatgtatagaacaacgaaattatactagagttgttaaagttaatattttctatgagctgttccaataaattatttgttgtgactgcgttcaagtcataaatcatcttgatactatccagtaaaccgtttttaagttctggaatattatcatcccattgtaaagcccctaattcgactatcgaatatcctgctctgatagcagtttcaatatcgacggacgtcaatactgtaataaaggtggtagtattgtcatcatcgtgataaactacgggaatatggtcgttagtaggtacggtaactttacacaacgcgatatataactttccttttgtaccatttttaacgtagttgggacgtcctgcagggtattgttttgaagaaatgatatcgagaacagatttgatacgatatttgttggattcctgattattcactataatataatctagacagatagatgattcgataaatagagaaggtatatcgttggtaggataatacatccccattccagtattctcggatactctattgatgacactagttaagaacatgtcttctattctagaaaacgaaaacatcctacatggactcattaaaacttctaacgctcctgattgtgtctcgaatgcctcgtacaaggatttcaaggatgccatagattctttgaccaacgatttagaattgcgtttagcatctgatttttttattaaatcgaatggtcggctctctggtttgctaccccaatgataacaatagtcttgtaaagataaaccgcaagaaaatttatacgcatccatccaaataaccctagcaccatcggatgatattaatgtattattatagattttccatccacaattattgggccagtatactgttagcaacggtatatcgaatagattactcatgtaacctactagaatgatagttcgtgtactagtcataatatctttaatccaatctaaaaaatttaaaattagattttttacactgttaaagttaacaaaagtattacccgggtacgtggatatcatatatggcattggtccattatcagtaatagctccataaactgatacggcgatggtttttatatgtgtttgatctaacgaggaagaaattcgcgcccacaattcatctctagatatgtatttaatatcaaacggtaacacatcaatttcgggacgcgtatatgtttctaaatttttaatccaaatataatgatgacctatatgccctattatcatactgtcaactatagtacacctagggaacttacgatacatctgtttcctataatcgttaaattttacaaatctataacatgctaaaccttttgacgacagccattcattaatttctgatatggaatctgtattctcgataccgtatcgttctaaagccagtgctatatctccctgttcgtgggaacgctttcgtataatatcgatcaacggataatctgaagtttttggagaataatatgactcatgatctatttcgtccataaacaatctagacataggaattggaggcgatgatcttaattttgtgcaatgagtcgtcaatcctataacttctaatcttgtaatattcatcatcgacataatactatctatgttatcatcgtatattagtataccatgaccttcttcatttcgtgccaaaatgatatacagtcttaaatagttacgcaatatctcaatagtttcataattgttagctgttttcatcaaggtttgtatcctgtttaacatgatggcgttctataacgtctctattttctatttttaattttttaaatttttaacgatttactgtggctagatacccaatctctctcaaatatttttttagcctcgcttacaagctgtttatctatactattaaaactgacgaatccgtgattttggtaatgggttccgtcgaaatttgccgaagtgatatgaacatattcgtcgtcgactatcaacaattttgtattattctgaatagtgaaaaccttcacagatagatcattttgaacacacaacgcatctagacttttggcggttgccatagaatatacgtcgttcttatcccaattaccaactagaagtctgatcttaactcctctattaatggctgcttctataatggagttgtaaatgtcgggccaatagtagctattaccgtcgacacgtgtagtgggaactatggccaaatgttcaatatctatactagtcttagctgacctgagtttatcaataactacatcggtatctagatctctagaatatcccaataggtgttccggagaatcagtaaagaacactccacctataggattcttaatatgatacgcagtgctaactggcaaacaacaagccgcagagcataaattcaaccatgaattttttgcgctattaaaggctttaaaagtatcaaatcttctacgaagatctgtggccagcgggggataatcagaatatacacctaacgttttaatcgtatgtatagatcctccagtaaatgacgcgtttcctacataacatctttcatcatctgacacccaaaaacaaccgagtagtagtcccacattattttttttatctatattaacggttataaaatttatatccgggcagtgactttgtagctctcccagatttcttttccctcgttcatctagcaaaactattattttaatccctttttcagatgcctcttttagtttatcaaaaataagcgctcccctagtcgtactcagaggattacaacaaaaagatgctatgtatatatatttcttagctagagtgataatttcgttaaaacattcaaatgttgttaaatgatcggatctaaaatccatattttctggtagtgtttctaccagcctacattttgctcccgcaggtaccgatgcaaatggccacatttagttaacataaaaacttatacatcctgttctatcaacgattctagaatatcatcggctatatcgctaaaattttcatcaaagtcgacatcacaacctaactcagtcaatatattaagaagttccatgatgtcatcttcgtctatttctatatccgtatccattgtagattgttgaccgattatcgagtttaaatcattactaatactcaatccttcagaatacaatctgtgtttcattgtaaatttataggcggtgtatttaagttggtagattttcaattatgtattaatatagcaacagtagttcttgctcctccttgattctagcatcctcttcattattttcttctacgtacataaacatgtccaatacgttagacaacacaccgacgatggcggccgctacagacacgaatatgactaaaccgatgaccatttaaaaacccctctctagctttcacttaaactgtatcgatcattcttttagcacatgtataatataaaaacattattctatttcgaatttaggcttccaaaaatttttcatccgtaaaccgataataatatatatagacttgttaatagtcggaataaatagattaatgcttaaactatcatcatctccacgattagagatacaatatttacattctttttgctgtttcgaaactttatcaatacacgttaatacaaacccaggaaggagatattgaaactgaggctgttgaaaatgaaacggtgaatacaataattcagataatgtaaaatcatgattccgtattctgatgatattagaactgctaatggatgtcgatggtatgtatctaggagtatctattttaacaaagcatcgatttgctaatatacaattatccttttgattaattgttattttattcatattcttaaaaggtttcatatttatcaattcttctacattaaaaatttccatttttaatttatgtagccccgcaatactcctcattacgtttcattttttgtctataatatccattttgttcatctcggtacatagattatccaattgagaagcgcatttagtagttttgtacattttaagtttattgacgaatcgtcgaaaactagttatagttaacattttattatttgataccctgatattaatacccctgccgttactattatttataactgatgtaatccacgtaacattggaattaactatcgatagtaatgcatcgacgcttccaaaattgtctattataaactcaccgataatttttttattgcatgttttcatattcattaggattatcaaatctttaatcttattacgattgtatgcgttgatattacaagacgtcattctaaaagacggaggatctccatcaaatgccagacaatcacgtacaaagtacatggaaataggttttgttctattgcgcatcatagatttatatagaacacccgtagaaatactaatttgttttactctataaaatactaatgcatctatttcatcgttttgtataacgtctttccaagtgtcaaattccaaatttttttcattgatagtaccaaattcttctatctctttaactacttgcatagataggtaattacagtgatgcctacatgccgttttttgaaactgaatagatgcgtctagaagcgatgctacgctagtcacaatcaccactttcatatttagaatatatatatgtaaaaatatagtagaatttcattttgtttttttctatgctataaatgaattctcattttgcatctgctcatactccgttttatatcaataccaaagaaggaagatatctggttctaaaagccgttaaagtatgcgatgttagaactgtagaatgcgaaggaagtaaagcttcctgcgtactcaaagtagataaaccctcatcgcccgcgtgtgagagaagaccttcgtccccgtccagatgcgagagaatgaataaccctggaaaacaagttccgtttatgaggacggacatgctacaaaatatgttcgcggctaatcgcgataatgtagcttctagacttttgtcctaaaatactattatatccttttcgatattaataaatccgtgtcgtccaggttttttatctctttcagtatgtgaatagataggtattttatctctattcatcatcgaatttaagagatccgataaacattgtttgtattctccagatgtcagcatctgatacaacaatatatgtgcacataaacctctggcacttatttcatgtaccttccccttatcactaaggagaatagtatttgagaaatatgtatacatgatattatcatgaattagatatacagaatttgtaacactctcgaaatcacacgatgtgtcggcgttaagatctaatatatcactcgataacacattttcatctagatacactagacattttttaaagctaaaatagtctttagtagtaacagtaactatgcgattattttcatcgatgatacatttcatcggcatattattacgcttaccatcaaagactataccatgtgtatatctaacgtattctagcatggttgccatacgcgcattaaacttttcaggatctttggatagatcttccaatctatctatttgagaaaacatttttatcatgttcaatagttgaaacgtcggatccactatatagatattatctataaagattttaggaactacgttcatggtatcctggcgaatattaaaactatcaatgatatgattatcgttttcatcttttatcaccatatagtttctaagatatgggattttacttaatataatattatttcccgtgataaattttattagaaaggccaaatctataagaaaagtcctagaattagtctgaagaatatctatatcgccgtatagtatatttggattaattagatatagagaatatgatccgtaacatatacaacttttattatggcgtctaagatattcttccatcaacttattaacatttttgactagggaagatacattatgacgtcccattacttttgccttgtctattactgcgacgttcatagaatttagcatatctcttgccaattcttccattgatgttacattataagaaattttagatgaaattacatttggagctttaatagtaagaactcctaatatgtccgtgtatgtggtcactaatacagattgtagttctataatcgtaaataatttacctatattatatgtttgagtctgtttagaaaagtagctaagtatacgatcttttatttctgatgcagatgtattaacatcggaaaaaaatctttttttattcttttttactaaagatacaaatatgtctttgttaaaaacagttattttctgaatatttctagcttgtaattttaacatatgatattcgttcacactaggtactctgcctaaataggtttctataatctttaatgtaatattaggaaaagtattctgatcaggattcctattcattttgaggatttaaaactctgattattgtctaatatggtctctacgcaaactttttcacagagcgatagagtttttgataactcgtttttcttaagaaatataaaactactgtttccagagctcgctctatcttttattttatctaattcgatacaaactcctgatactggttcagaaagtaattcattaattttcagtcctttatagaagatatttaatatagataatacaaaatcttcagtttttgatatcgatctgattgatcctagaactagatatattaataacgtgctcattaggcagtttatggcagcttgataattagatatagtatattccagttcatatttattagataccgcattgcccagattttgatattctatgaattcctctgaaaataaatccaaaataactagacattctattttttgtggattagtgtactctcttccctctatcatgttcactactggtgtccacgatgataaatatctagagggaatataatatagtccataggatgccaatctagcaatgtcgaataactgtaatttgattcttcgttcttcattatgaattgattcttgaggtataaacctaacacaaattatattattagacttttcgtatgtaatgtctttcatgttataagtttttaatcctggaatagaatctattttaatgaggcttttaaacgcagagttctccaacgagtcaaaacataatactctgttgtttttcttatatacgatgttacgattttcttctttgaatggaataggtttttgaattagtttataattacaacataatagataaggaagtgtgcaaatagtacgcggaaaaaacataatagctcccctgttttcatccatggttttaagtaaatgatcactggcttctttagtcaatggatattcgaacattaaccgtttcatcatcattggacagaatccatatttcttaatgtaaagagtgatcaaatcattgtgtttattgtaccatcttgttgtaaatgtgtattcggttatcggatctgctcctttttctattaaagtatcgatgtcaatctcgtctaagaattcaactatatcgacatatttcatttgtatacacataaccattactaacgtagaatgtataggaagagatgtaacgggaacagggtttgttgattcgcaaactattctaatacataattcttctgttaatacgtcttgcacgtaatctattatagatgccaagatatctatataattattttgtaagatgatgttaactatgtgatctatataagtagtgtaataattcatgtattttgatatatgttccaactctgtctttgtgatgtctagtttcgtaatatctatagcatcctcaaaaaatatattcgcatatattcccaagtcttcagttctatcttctaaaaaatcttcaacgtatggaatataataatctattttacctcttctgatatcattaatgatatagtttttgacactatcttctgtcaattgattcttattcactatatctaagaaacggatagcgtccctaggacgaactactgccattaatatctctattatagcttctggacataattcatctattataccagaattaatgggaactattccgtatctatctaacatagttttaagaaagtcagaatctaagacttgatgttcatatattggttcatacatgaaatgatctctattgatgatagtgactatttcattctctgaaaattggtaactcattctatatatgctttccttgttgatgaaggatagaatatactcaatagaatttgtaccaacaaactgttctcttatgaatcgtatatcatcatctgaaataatcatgtaaggcatacatttaacaattagagacttgtctcctgttatcaatatactattcttgtgataatttatgtgtgaggcaaatttgtccacgttctttaattttgttatagtagatatcaaatccaatggagctacagttcttggcttaaacagatatagtttttctggaacaaattctacaacattattataaaggactttgggtaaataagtgggatgaaatcctattttaattaatgcgatagccttgtcctcgtgcagatatccaaacgcttttgtgatagtatggcattcattgtctagaaacgctctacgaatatctgtgacagatatcatctttagagaatatactagtcgcgttaatagtactacaatttgtattttttaatctatctcaataaaaaaattaatatgtatgattcaatgtataactaaactactaactgttattgataactagaatcagaatctaatgatgacgtacccaagaagtttatctactgccaatttagctgcattatttttagcatctcgtttagattttccatctgccttatcgaatactcttccgtcgatatctacacaggcataaaatgtaggagagttactaggcccaactgattcaatacgaaaagaccaatctctcttagttatttggcagtactcattaataacggtgacagggttagcatctttccaatcaataatttttttagccggaataacatcatcaaaagacttatgatcctctctcattgatttttcgcgggatacatcatctattatgacgtcagccataacatcagcatccggcttatccgcctccgttgtcataaaccaacgaggaggaatatcgtcggagctgtacaccatagcactacgttgaagatcgtacagagctttattaacttctcgcttctccatattaagttgtctagttagttgtgcagcagtagctccttcgattccaatggttttaatagcctcacacacaatctctgcgttagaacgttcgtcgatatagattttagacatttttagagagaactaacacaaccagcaataaaactgaacctactttatcatttttttattcatcatcctctggtggttcgtcgttcctatcaaatgtagctctgattaacccgtcatctataggtgatgctggttctggagattctggaggagatggattattatctggaagaatctctgttatttccttgttttcatgtatcgattgcgttgtaacattaagattgcgaaatgctctaaatttgggaggcttaaagtgttgtttgcaatctctacacgcgtgtctaactagtggaggttcgtcagctgctctagtttgaatcatcatcggcgtagtattcctacttttacagttaggacacggtgtattgtatttctcgtcgagaacgttaaaataatcgttgtaactcacatcctttattttatctatattgtattctactcctttcttaatgcattttataccgaataagagatagcgaaggaattctttttcggtgccgctagtacccttaatcatatcacatagtgttttatattccaaatttgtggcaatagacggtttatttctatacgatagtttgtttctggaatcctttgagtattctataccaatattattctttgattcgaatttagtttcttcgatattagattttgtattacctatattcttgatgtagtactttgatgatttttccatggcccattctattaagtcttccaagttggcatcatccacatattgtgatagtaattctcggatatcagtagcggctaccgccattgatgtttgttcattggatgagtaactactaatgtatacattttccatttataacacttatgtattaactttgttcatttatattttttcattattatgttgatattaacaaaagtgaatatatatatgttaataattgtattgtggttatacggctacaattttataatgagtgaaagtcagtgtccgatgatcaatgacgatagctttactctgaaaagaaagtatcaaatcgatagtgcggagtcaacaataaaaatggataagaagaggataaagtttcagaatagagccaaaatggtaaaagaaataaatcagacaataagagcagcacaaactcattacgagacattgaaactaggatacataaaatttaagagaatgattaggactactactctagaagatatagcaccatctattccaaataatcagaaaacttataaactattctcggacatttcagccatcggcaaagcatcacagaatccgagtaagatggtatatgctctgctgctttacatgtttcccaatttgtttggagatgatcatagattcattcgttatagaatgcatccaatgagtaaaatcaaacacaagatcttctctcctttcaaacttaatcttattagaatattagtggaagaaagattctataataatgaatgcagatctaataaatggaaaataattggaacacaagttgataaaatgttgatagctgaatctgataaatatacaatagatgcaaggtataacctaaaacccatgtatagaatcaagggagaatctgaagaagataccctcttcatcaaacagatggtagaacaatgtgtgacatcccaggaattggtggaaaaagtgttgaagatactgtttagagatttgttcaagagtggagaatacaaagcgtacagatacgatgatgatgtagaaaatggattcattggattggatacactaaaattaaacattgttcatgatatagttgaaccatgtatgcctgttcgtaggccagtggctaagatactgtgtaaagaaatggtaaataaatactttgagaatccgctacatattattggtaaaaatcttcaagagtgcattgactttgttagtgaataggcatttcatctttctccaatactaattcaaattgttaaattaataatggatagtataaatagttattagttataagatagtaaaaataattattagaataagagtgtagtatcatagataactctcttctataaaaatggattttattcgtagaaagtatcttatatacacagtagaaaataatatagattttttaaaggatgatacattaagtaaagtaaacaattttaccctcaatcatgtactagctctcaagtatctagttagcaattttcctcaacatgttattactaaggatgtattagctaataccaatttttttgttttcatacatatggtacgatgttgtaaagtgtacgaagcggttttacgacacgcatttgatgcacccacgttgtacgttaaagcattgactaagaattatttatcgtttagtaacgcaatacaatcgtacaaggaaaccgtgcataaactaacacaagatgaaaaatttttagaggttgccgaatacatggacgaattaggagaacttataggcgtaaattatgacttagttcttaatccattatttcacggaggggaacccatcaaagatatggaaatcatttttttaaaactgtttaagaaaacagacttcaaagttgttaaaaaattaagtgttataagattacttatttgggcatacctaagcaagaaagatacaggcatagagtttgcggataatgatagacaagatatatatactctatttcaacaaactggtagaatcgtccatagcaatctaacagaaacgtttagagattatatctttcccggagataagactagctattgggtgtggttaaacgaaagtatagctaatgatgcggatatcgttcttaatagacccgccattaccatgtatgataaaattcttagttatatatactctgagataaaacaaggacgcgttaataaaaacatgcttaagttagtttatatctttgagcctgaaaaagatatcagagaacttctgctagaaatcatatatgatattcctggagatatcctatctattattgatgcaaaaaacgacgattggaaaaaatattttattagtttttataaagctaattttattaacggtaatacatttattagtgatagaacgtttaacgaggacttattcagagttgttgttcaaatagatcccgaatatttcgataatgaacgaattatgtctttattctctacgagtgctgcggacattaaacgatttgatgagttagatattaataacagttatatatctaatataatttatgaggtgaacgatatcacattagatacaatggatgatatgaagaagtgtcaaatctttaacgaggatacgtcgtattatgttaaggaatacaatacatacctgtttttgcacgagtcggatcccatggtcatagagaacggaatactaaagaaactgtcatctataaaatccaagagtagacggctgaacttgtttagcaaaaacattttaaaatattatttagacggacaattggctcgtctaggtcttgtgttagatgattataaaggagacttgttagttaaaatgataaaccatcttaagtctgtggaggatgtatccgcattcgttcgattttctacagataaaaaccctagtattcttccatcgctaatcaaaactattttagctagttataatatttccatcatcgtcttatttcaaaggtttttgagagataatctatatcatgtagaagaattcttggataaaagcatccatctaaccaagacggataagaaatatatacttcaattgataagacacggtagatcatagaacagaccaaatatattattaataatttgtatatacatagatataattatcacacatttttgataaatgggaactgctgcaacaattcagactcccaccaaattaatgaataaagaaaatgcagaaatgattttggaaaaaattgttgatcatatagttatgtatattagtgacgaatcaagtgattcagaaaataatcctgaatatattgattttcgtaacagatacgaagactatagatctctcattataaaaagtgatcacgagtttgtaaagctatgtaaaaatcatgcggagaaaagttctccagaaacgcaacaaatgattatcaaacacatatacgaacaatatcttattccagtatctgaagtactattaaaacctataatgtccatgggtgacataattacatataacggatgtaaagacaatgaatggatgctagaacaactctctaccctaaactttaacaatctccgcacatggaactcatgtagcataggcaatgtaacgcgtctgttttatacattttttagttatctgatgaaagataaactaaatatataagtataatcccattctaatactttaacctgatgtattagcatcttattagaatattaacctaactaaaagacataacataaaaactcattacatagttgataaaaagcggtaggatataaatattatggctgccaccgttccgcgttttgacgacgtgtacaaaaatgcacaaagaagaattctagatcaagaaacattttttagtagaggtctaagtagaccgttaatgaaaaacacatatctatttgataattacgcgtatggatggataccagaaactgcaatttggagtagtagatacgcaaacttagatgcaagtgactattatcccatttcgttgggattacttaaaaagttcgagtttctcatgtctctatataaaggtcctattccagtatacgaagaaaaagtaaatactgaattcattgctaatggatctttctccggtagatacgtatcatatcttagaaagttttctgctcttccaacaaacgagtttattagttttttgttactgacttccattccaatctataatatcttgttctggtttaaaaatactcagtttgatattactaaacacacattattcagatacgtctatacagataatgccaaacacctggcgttggctaggtatatgtatcaaacaggagactataagcctttgtttagtcgtctcaaagagaattatatatttaccggtcccgttccaatatgtatcaaagatatagatcaccctaatcttagtagagcaagaagtccatccgattatgagacattagctaatattagtactatattgtactttaccaagtatgatccggtattaatgtttttattgttttacgtacctgggtattcaattactacaaaaattactccagccgtagaatatctaatggataaactgaatctaacaaagagcgacgtacaactgttgtaaattattttatgcttcgtaaaatgtaggttttgaaccaaacattctttcaaagaatgagatgcataaaactttattatccaatagattgactatttcggacgtcaatcgtttaaagtaaacttcgtaaaatattctttgatcactgccgagtttaaaacttctatcgataattgtttcatatgttttaatatttacaagttttttggtccatggtccattaggacaaatatatgcaaaataatatcgttctccaagttctatagtctctggattatttttattatattcagtaaccaaatacatattagggttatctgcggatttataatttgagtgatgcattcgactcaacataaataattctagaggagacgatctactatcaaattcggatcgtaaatctgtttctaaagaacggagaatatctatacatacctgattagaattcatccgtccttcagacaacatctcagacagtctggttttgtacatcttaatcatattcttatgaaacttggaaacatctcttctagtttcactagtacctttattaattctctcaggtacagattttgaattcgacgatgctgagtatttcatcgttgtatatttcttcttcgattgcataatcagattcttatataccgcctcaaactctattttaaaattattaaacaatactctattattaatcagtcgttctaactctttcgctatttctatagacttatctacatcttgactgtctatctctgtaaacacggagtcggtatctccatacacgctacgaaaacgaaatctgtaatctataggcaacgatgttttcacaatcggattaatatctctatcgtccatataaaatggattacttaatggattggcaaaccgtaacataccgttagataactctgctccatttagtaccgattctagatacaagatcattctacgtcctatggatgtgcaactcttagccgaagcgtatgagtatagagcactatttctaaatcccatcagaccatatactgagttggctactatcttgtacgtatattgcatggaatcatagatggccttttcagttgaactggtagcctgttttagcatctttttatatctggctctctctgccaaaaatgttcttaatagtctaggaatggttccttctatcgatctatcgaaaattgctatttcagagatgaggttcggtagtctaggttcacaatgaaccgtaatatatctaggaggtggatatttctgaagcaatagctgattatttatttcttcttccaatctattggtactaacaacgacaccgactaatgtttccggagatagatttccaaagatacacacattaggatacagactgttataatcaaagattaatacattattactaaacattttttgttttggagcaaataccttaccgccttcataaggaaacttttgttttgtttctgatctaactaagatagttttagtttccaacaatagctttaacagtggacccttgatgactgtactcgctctatattcgaataccatggattgaggaagcacatatgttgacgcacccgcgtctgtttttgtttctactccataatactcccacaaatactgacacaaacaagcatcatgaatacagtatctagccatatctaaagctatgtttagattataatccttatacatctgagctaaatcaacgtcatcctttccgaaagataatttatatgtatcattaggtaaagtaggacataatagtacgactttaaatccattttcccaaatatctttacgaattactttacatataatatcctcatcaacagtcacataattacctgtggttaaaacctttgcaaatgcagcggctttgcctttcgcgtctgtagtatcgtcaccgatgaacgtcatttctctaactcctctatttaatactttacccatgcaactgaacgcgttcttggatatagaatccaatttgtacgaatccaatttttcaaatttttgaatgaatgaatatagatcgaaaaatatagttccattattgttattaacgtgaaacgtagtattggccatgccgcctactcccttatgactagactgatttctctcataaatacagagatgtacagcttcctttttgtccggagatctaaagataattttctctcctgttaataactctagacgattagtaatatatctcagatcaaagttatgtccgttaaaggtaacgacgtagtcgaacgttagttccaacaattgtttagctattcgtaacaaaactatttcagaacatagaactagttctcgttcgtaatccatttccattagtgactgtatcctcaaacatcctctatcgacggcttcttgtatttcctgttccgttaacatctcttcattaatgagcgtaaacaataatcgtttaccacttaaatcgatataacagtaacttgtatgcgagattgggttaataaatacagaaggaaacttcttatcgaagtgacactctatatctagaaataagtacgatcttgggatatcgaatctaggtatttttttagcgaaacagttacgtggatcgtcacaatgataacatccattgttaatctttgtcaaatattgctcgtccaacgagtaacatccgtctggagatatcccgttagaaatataaaaccaactaatattgagaaattcatccatggtggcattttgtatgctgcgtttctttggctcttctatcaaccacatatctgcgacggagcattttctatctttaatatctagattataacttattgtctcgtcaatgtctatagttctcatctttcccaacggcctcgcattaaatggaggaggagacaatgactgatatatttcgtccgtcactacgtaataaaagtaatgaggaaatcgtataaatacggtctcaccatttcgacatctggatttcagatataaaaatctgttttcaccgtgactttcaaaccaattaatgcaccgaacatccatttatagaatttagaaatatattttcatttaaatgaatcccaaacattggggaagagccgtatggaccattatttttatagtactttcgcaagcgggtttagacggcaacatagaagcgtgtaaacgaaaactatatactatagttagcactcttccatgtcctgcatgtagacggcacgcgactatcgctatagaggacaataatgtcatgtctagcgatgatctgaattatatttattattttttcatcagattatttaacaatttggcatctgatcccaaatacgcgatcgatgtgacaaaggttaaccctttataaacttaacccattataaaacttatgattagtcacaactgaaataaccgcgtgattattttttggtataattctacacggcatggtttctgtgactatgaattcaacccccgttacattagtgaaatctttaacaaacagcaagggttcgtcaaagacataaaactcattgtttacaatcgaaatagaccccctatcacacttaaaataaaaaatatccttatcctttaccaccaaataaaattctgattggtcaatgtgaatgtattcacttaacagttccacaaatttatttattaactccgaggcacatacatcgtcggtattttttatggcaaactttactcttccagcatccgtttctaaaaaaatattaacgagttccatttatatcatccaatattattgaaatgacgttgatggacagatgatacaaataagaaggtacggtacctttgtccaccatctcctccaattcatgctctattttgtcattaactttaatgtatgaaaacagtacgccacatgcttccatgacagtgtgtaacactttggatacaaaatgtttgacattagtataattgttcaagactgtcaatctataatagatagtagctataatatattctatgatggtattgaagaagatgacaaccttggcatattgatcatttaacacagacatggtatcaacagatagcttgaatgaaagagaatcagtaattggaataagcgtcttctcgatagagtgtccgtataccaacatgtctgatattttgatgtattccattaaattatttagttttttctttttattctcgttaaacagcatttctgtcaacggaccccaacatcgttgaccgattaagttttgattgatttttccgtgtaaggcgtatctagtcagatcgtatagcctatccaataatccatcatctgtgcgtagatcacatcgtacactttttaattctctatagaagagcgacagacatctggagcaattacagacagcaatttctttattctctacagatgtaagatacttgaagacattcctatgatgatgcagaattttggataacacggtattgatggtatctgttaccataattcctttgatggctgatagtgtcagagcacaagatttccaatctttgacaatttttagcaccattatctttgttttgatatctatatcagacagcatggtgcgtctgacaacacagggattaagacggaaagatgaaatgattctctcaacatcttcaatagataccttgctattttttctggcattatctatatgtgcgagaatatcctctagagaatcagtatcctttttgatgatagtggatctcaatgacatgggacgtctaaaccttcttattctatcaccagattgcatggtgatttgtcttctttcttttatcataatgtaatctctaaattcatcggcaaattgtctatatctaaaatcataatatgagatgtttacctctacaaatatctgttcgtccaatgttagagtatttacatcagttttgtattccaaattaaacatggcaacggatttaattttatattcctctattaagtcctcgtcgataataacagaatgtagataatcatttaatccatcgtacatggttggaagatgcttgttgacaaaatctttaattgtcttgatgaaggtgggactatatctaacatcttgattaataaaatttataacattgtccataggatactttgtaactagttttatacacatctcttcatcggtaagtttagacagaatatcgtgaacaggtggtatattatattcatcagatatacgaagaacaatgtccaaatctatattgtttaatatattatataaatgtagcgtagctcctacaggaatatctttaactaagtcaatgatttcatcaaccgttagatctattttaaagttaatcatataggcattgatttttaaaaggtatgtagccttgactacattctcattaattaaccattccaagtcactgtgtgtaagaagattatattctatcataagcttgactacatttggtcccgataccattaaagaattcttatgatataaggaaacagcttttaggtactcatctactctacaagaattttggagagccttaacgatatcagtgacgtttattatttcaggaggaaaaaacctaacattgagaatatcggaattaatagcttccagatacagtgattttggcaatagtccgtgtaatccataatccagtaacacgagctggtgcttgctagacaccttttcaatgtttaatttttttgaaataagctttgataaagccttcctcgcaaattccggatacatgaacatgtcggcgacatgattaagtattgttttttcattattttctcaataccccaatagatgatagaatatcacccaatgcgtccatgttgtctatttccaacaggtcgctatatccaccaatagaagtttttccaaaaaagattctaggaacagttctaccaccagtaatttgttcaaaatagtcacgcaattcattttcgggtttaaattctttaatatcgacaatttcatacgctcctcttttgaaactaaacttatttagaatatccagtgcatttctacaaaaaggacatgtatacttgacaaaaattgtcactttgttattggccaacctttgttgtacaaattcctcggccattttaatatttaagtgatataaaactatctcgacttatttaactctttagtcgagatatatggacgcagatagctatatgatagccaactacagaaggcaaacgctataaaaaacataattacgacgagcatatttataaatatttttattcagcattacttgatatagtaatattaggcacagtcaaacattcaaccactctcgatacattaactctctcattttctttaacaaattctgcaatatcttcgtaaaaagattcttgaaactttttagaatatctatcgactctagatgaaatagcgttcgtcaacatactatgttttgtatacataaaggcgcctattttaacagtttctagtgacaaaatgctagcgatcctaggatcctttagaatcacatagattgacgattcgtctctcttagtaactctagtaaaataatcatacaatctagtacgcgaaataatattatccttgacttgaggagatctaaacaatctagttttgagaacatcgataagttcatcgggaatgacatacatactatctttaatagaactcttttcatccagttgaatggattcgtccttaaccaactgattaatgagatcttctattttatcattttccagatgatatgtatgtccattaaagttaaattgtgtagcgcttttttttagtctagcagccaatactttaacatcactaatatcgatatacaaaggagatgatttatctatggtattaagaattcgtttttcgacatccgtcaaaaccaattcctttttgcctgtatcatccagttttccatcctttgtaaagaaattattttctactagactattaataagactgataaggattcctccataattgcacaatccaaactttttcacaaaactagactttacaagatctacaggaatgcgtacttcaggtttcttagcttgtgattttttcttttgcggacattttctagtaaccaactcatctaccatttcattgattttagcagtgaaataagctttcaatgcacgggcactgatactattgaaaacgagttgatcttcaaattccgccatttaagttcaccaaacaacttttaaatacaaatatatcaatagtagtagaataagaactataaaaaaaataataattaaccaataccaaccccaacaaccggtattattagttgatgtgactgttttctcatcacttagaacagatttaacaatttctataaagtctgtcaaatcatcttccggagaccccataaatacaccaaatatagcggcgtacaacttatccatttatacattgaatattggcttttctttatcgctatcttcatcatattcatcatcaatatcaacaagtcccagattacgagccagatcttcttctacattttcagtcattgatacacgttcactatctccagagagtccgataacgttagccaccacttctctatcaatgattagtttcttgagcgcgaaagtaatttttgtttccgttccggatctatagaagacgataggtgtgataattgccttggccaattgtctttctcttttactgagtgattctagttcaccttctatagatctgagaatggatgattctccagtcgaaacatattctaccatggatccgtttaatttgttgatgaagatggattcatccttaaatgttttctctgtaatagtttccaccgaaagactatgcaaagaatttggaatgcgttccttgtgcttaatgtttccatagacggcttctagaagttgatacaacataggactagccgcggtaacttttatttttagaaagtatccatcgcttctatcttgtttagatttatttttataaagtttagtctctccttccaacataataaaagtggaagtcatttgactagataaactatcagtaagttttatagagatagacgaacaattagcgtattgagaagcatttagtgtaacgtattcgatacattttgcattagatttactaatcgattttgcatactctataacacccgcacaagtctgtagagaatcgctagatgcagtaggtcttggtgaagtttcaactctcttcttgattaccttactcatgattaaacctaaataattgtactttgtaatataatgatatatattttcactttatctcatttgagaataaaaatgtttttgtttaaccactgcatgatgtacagatttcggaatcgcaaaccaccagtggttttattttatccttgtccaatgtgaattgaatgggagcggatgcgggtttcgtacgtagatagtacattcccgtttttagaccgagactccatccgtaaaaatgcatactcgttagtttggaataactcggatctgctatatggatattcatagattgactttgatcgatgaaggctcccctgtctgcagccatttttatgatcgtcttttgtggaatttcccaaatagttttataaactcgcttaatatcttctggaaggtttgtattctgaatggatccaccatctgccataatcctattcttgatctcatcattccataattttctctcggttaaaactctaaggagatgcggattaactacttgaaattctccagacaatactctccgagtgtaaatattactggtatacggttccaccgactcattatttcccaaaatttgagcagttgatgcagtcggcataggtgccaccaataaactatttctaagaccgtatgttctgattttatcttttagaggttcccaattccaaagatccgacggtacaacattccaaagatcatattgtagaataccgttactggcgtacgatcctacatatgtatcgtatggtccttccttctcagctagttcacaactcgcctctaatgcaccgtaataaatggtttcgaagatcttcttatttagatcttgtgcttccaggctatcaaatggataatttaagagaataaacgcgtccgctaatccttgaacaccaataccgataggtctatgtctcttattagagatttcagcttctggaataggataataattaatatctataattttattgagatttctgacaattactttgaccacatccttcagtttgagaaaatcaaatcgcccatctattacaaacatgttcaaggcaacagatgccagattacaaacggctacctcattagcatccgcatattgtattatctcagtgcaaagattactacacttgatagttcctaaattttgttgattactctttttgttacacgcatccttataaagaatgaatggagtaccagtttcaatctgagattctataatcgctttccagacgactcgagcctttattatagatttgtatctcctttctctttcgtatagtgtatacaatcgttcgaactcgtctccccaaacattgtccaatccaggacattcatccggacacatcaacgaccactctccgtcatccttcactcgtttcataaagagatcaggaatccaaagagctataaatagatctctggttctatgttcctcgtttcctgtattctttttaagatcgaggaacgccataatatcagaatgccacggttccaagtatatggccataactccaggccgtttgtttcctccctgatctatgtatctagcggtgttattataaactctcaacattggaataataccgtttgatataccattggtaccggagatatagcttccactggcacgaatattactaattgatagacctattccccctgccattttagagattaatgcgcatcgttttaacgtgtcatagataccctctatgctatcatcgatcatgttaagtagaaaacagctagacatttggtgacgactagttcccgcattaaataaggtaggagaagcgtgcgtaaaccatttttcagaaagtagattgtacgtctcaatagctgagtctatatcccattgatgaattcctactgcgacacgcattaacatgtgctgaggtctttcaacgatcttgttgtttattttcaacaagtaggatttttccaaagttttaaaaccaaaatagttgtatgaaaagtctcgttcgtaaataataaccgagttgagtttatccttatatttgttaactatatccatggtgatacttgaaataatcggagaatgtttcccatttttaggattaacatagttgaataaatcctccatcacttcactaaatagtttttttgtttccttgtgtagatttgatacggctattctggcggctagaatggcataatccggatgttgtgtagtacaagtggctgctatttcggctgccagagtgtccaattctaccgttgttactccattatatattccttgaataaccttcatagctattttaataggatctatatgatccgtgtttaagccataacataattttctaatacgagacgtgattttatcaaacatgacattttccttgtatccatttcgtttaatgacaaacatttttgttggtgtaataaaaaaattatttaacttttcattaatagggatttgacgtatgtagcgtacaaaattatcgttcctggtatatagataaagagtcctatatatttgaaaatcgttacggctcgattaaactttaatgattgcatagtgaatatatcattaggatttaactccttgactatcatggcggcgccagaaattaccatcaaaagcattaatacagttatgccgatcgcagttagaacggttatagcatccaccatttatatctaaaaattagatcaaagaatatgtgacaaagtcctagttgtatactgagaattgacgaaacaatgtttcttacatatttttttcttattagtaactgacttaatagtaggaactggaaagctagacttgattattctataagtatagatacccttccagataatgttctctttgataaaagttccagaaaatgtagaattttttaaaaagttatcttttgctattaccaagattgtgtttagacgcttattattaatatgagtgatgaaatccacaccgcctctagatatcgcctttatttccacattagatggtaaatccaatagtgaaactatctttttaggaatgtatggactcgcgtttagaggagtgaacgtcttaggcgtcggaaaggatgattcatcaaacgaataaacaatttcacaaatggatgttaatgtattagtaggaaattttttgacgctagtggaattgaagattctaatggatgatgttctacctatttcatccgataacatgttaatttccgacaccaacggttttaatatttcgatgatatacggtagtctctctttcggacttatatagcttattccacaatacgagtcattatatactccaaaaaacaaaataactagtataaaatctgtatcgaatgggaaaaacgaaattatcgacataggtatagaatccggaacattgaacgtattaatacttaattctttttctgtggtaagtactgataggttattgacattgtatggttttaaatattctataacttgagacttgatagatattagtgatgaattgaaaattatttttatcaccacgtgtgtttcaggatcatcgtcgacgcccgtcaaccaaccgaacggagtaaaataaatatcattaatatatgctctaaatattagtatttttatcaatcctttgattatcatcttctcgtaggcgaatgattccatgatcaagagtgatttgagaacatcctccggagtattaatgggcttagtaaacagtccatcgttgcaataataaaagttatccaagttaaaggatattatgcattcgtttaaagatatcacctcatctgacggagacaattttttggtaggttttagagactttgaagctacttgtttaacaaagttattcatcgtcgtctactattctatttaattttgtagttaatttatcacatatcacattaattgactttttggtccacttttccatacgtttatattcttttaatcctgcgttatccgtttccgttatatccagggatagatcttgcaagttaaatagaatgctcttaaataatgtcattttcttatccgctaaaaatttaaagaatgtataaacctttttcagagatttgaaactcttaggtggtgtcctagtacacaatatcataaacaaactaataaacattccacattcagattccaacagctgattaacttccacattaatacagcctattttcgctccaaatgtacattcgaaaaatctgaataaaacatcgatgtcacaatttgtattatccaatacagaatgtttgtgattcgtgttaaaaccatcggagaaggaatagaaataaaaattattatagtggtggaattcagttggaatattgcctccggagtcataaaaggatactaaacattgttttttatcataaattacacatttccaatgagacaaataacaaaatccaaacattacaaatctagaggtagaacttttaattttgtctttaagtatatacgataagatatgtttattcataaacgcgtcaaatttttcatgaatcgctaaggagtttaagaatctcatgtcaaattgtcctatataatccacttcggatccataagcaaactgagagactaagttcttaatacttcgattgctcatccaggctcctctctcaggctctattttcatcttgacgacctttggattttcaccagtatgtattcctttacgtgataaatcatcgattttcaaatccatttgtgagaagtctatcgccttagatactttttcccgtagtcgaggtttaaaaaaatacgctaacggtatactagtaggtaactcaaagacatcatatatagaatggtaacgcgtctttaactcgtcggttaactctttcttttgatcgagttcgtcgctactattgggtctgctcaggtgccccgactctactagttccaacatcataccgataggaatacaagacactttgccggcggttgtagatttatcatatttttccactacatatccgttacaatttgttaaaaatttagatacatctatattgctacataatccagctagtgaatatatatgacataataaattggtaaatcctagttctggtattttactaattactaaatctgtatatctttccatttatcatggaaaagaatttaccagatatcttcttttttccaaactgcgttaatgtattctcttacaaatattcacaagatgaattcagtaatatgagtaaaacggaacgtgatagtttctcattggccgtgtttccagttataaaacatagatggcataacgcacacgttgtaaaacataaaggaatatacaaagttagtacagaagcacgtggaaaaaaagtatctcctccatcactaggaaaacccgcacacataaacctaaccgcgaagcaatatatatacagtgaacacacaataagctttgaatgttatagttttctaaaatgtataacaaatacagaaatcaattcgttcgatgagtatatattaagaggactattagaagctggtaatagtttacagatattttccaattccgtaggtaaacgaacagatactataggtgtactagggaataagtatccatttagcaaaattccattggcctcattaactcctaaagcacaacgagagatattttcagcgtggatttctcatagacctgtagttttaactggaggaactggagtgggtaagacgtcacaggtacccaagttattgctttggtttaattatttatttggtggattctctactctagataaaatcactgactttcacgaaagaccagtcattctatctcttcctaggatagctttagttagattgcatagcaataccattttaaaatcattgggatttaaggtactagatggatctcctatttctttacggtacggatctataccggaagaattaataaacaaacaaccaaaaaaatatggaattgtattttctacccataagttatctctaacaaaactatttagttatggcactcttattatagacgaagttcatgagcatgatcaaataggagatattattatagcagtagcgagaaagcatcatacgaaaatagattctatgtttttaatgactgccacgttagaggatgacagggaacggctaaaagtatttttacctaatcccgcatttatacatattcctggagatacactgtttaaaattagcgaggtatttattcataataagataaatccatcttccagaatggcatacatagaagaagaaaagagaaatttagttactgctatacagatgtatactcctcctgatggatcatccggtatagtctttgtggcatccgttgcacagtgtcacgaatataaatcatatttagaaaaaagattaccgtatgatatgtatattattcatggtaaggtcttagatatagacgaaatattagaaaaagtgtattcatcacctaatgtatcgataattatttctactccttatttggaatccagcgttactatacgcaatgttacacacatttatgatatgggtagagtttttgtccccgctccttttggaggatcgcaacaatttatttctaaatctatgagagatcaacgaaaaggaagagtaggaagagttaatcctggtacatacgtctatttctatgatctgtcttatatgaagtctatacagcgaatagattcagaatttctacataattatatattgtacgctaataagtttaatctaacactccccgaagatttgtttataatccctacaaatttggatattctatggcgtacaaaggaatatatagactcgttcgatattagtacagaaacatggaataaattattatccaattattatatgaagatgatagagtatgctaaactttatgtactaagtcctattctcgctgaggagttggataactttgagaggacgggagaattaactagtattgtacgagaagccattttatctctaaatttacaaattaagattttaaattttaaacataaagatgatgatacgtatatacacttttgtaaaatattattcggtgtctataacggaacaaacgctactatatattatcatagacctctaacgggatatatgaatatgatttcagatactatatttgttcctgtagataataactaaaaatcaaactctaatgaccacatctttttttagagatgaaaaattttccacatctccttttgtagacacgactaaacattttgcagaaaaaagtttattagtgtttagataatcgtatacttcatcagtgtagatagtaaatgtgaacagataaaaggtattcttgctcaatagattggtaaattccatagaatatattaatcctttcttcttgagatcccacatcatttcaaccagagacgttttatccaatgatttacctcgtactataccacatacaaaactagattttgcagtgacgtcgtacctggtattcctaccaaacaaaattttacttttagttcttttagaaaattctaaggtagaatctctatttgccaatatgtcatctatggaattaccactagcaaaaaatgatagaaatatatattgatacatcgcagctggttttgatctactatactttaaaaacgaatcagattccataattgcctgtatatcatcagctgaaaaactatgttttacacgtattccttcggcatttctttttaatgatatatcttgtttagacaatgataaagttatcatgtccatgagagacgcgtctccgtatcgtataaatatttcattagatgttagacgcttcattaggggtatacttctataaggtttcttaatcagtccatcattggttgcgtcaagaactactatcggatgttgttgggtatctctagtgttacacatggccttactaaagtttgggtaaataactatgatatctctattaattatagatgcatatatttcattcgtcaaggatattagtatcgacttgctatcgtcattaatacgtgtaatgtaatcatataaatcatgcgatagccaaggaaaatttaaatagatgttcatcatataatcgtcgctataattcatattaatacgttgacattgactaatttgtaatatagcctcgccacgaagaaagctctcgtattcagtttcatcgataaaggataccgttaaatataactggttgccgatagtctcatagtctattaagtggtaagtttcgtacaaatacagaatccctaaaatattatctaatgttggattaatctttaccataactgtataaaatggagacggagtcataactattttaccgtttgtacttactggaatagatgaaggaataatctccggacatgctggtaaagacccaaatgtctgtttgaagaaatccaatgttccaggtcctaatctcttaacaaaaattacgatattcgatcccgatatcctttgcattctatttaccagcatatcacgaactatattaagattatctatcatgtctattctcccaccgttatataaatcgcctccgctaagaaacgttagtatatccatacaatggaatacttcatttctaaaatagtattcgttttctaattctttaatgtgaaatcgtatactagaaagggaaaaattatctttgagttttccgttagaaaagaaccacgaaactaatgttctgattgcgtccgattccgttgctgaattaatggatttacaccaaaaactcatataacttctagatgtagaagcattcgctaaaaaattagtagaatcaaaggatataagtagatgttccaacaagtgagcaattcccaagatttcatctatatcattctcgaatccgaaattagaaattcccaagtagatatcctttttcatccgatcgttgatgaaaatacgaactttattcggtaagacaatcatttactaaggagtaaaataggaagtaatgttcgtatgtcgttatcatcgtataaattaaaggtgtgttttttaccattaagtgacattataattttaccaatattggaattataatataggtgtatttgcgcactcgcgacggttgatgcatcggtaaatatagctgtatctaatgttctagtcggtatttcatcatttcgctgtctaataatagcgttttctctatctgtttccattacagctgcctgaagtttattggtcggataatatgtaaaataataagaaatacatacgaataacaaaaataaaataagatataataaagatgccatttagagatctaattttgtttaacttgtccaaattcctacttacagaagatgaggaatcgttggagatagtgtcttccttatgtagaggatttgaaatatcttataatgacttgataacttactttccagataggaaataccataaatatatttataaagtatttgaacatgtagatttatcggaggaattaagtatggaattccatgatacaactctgagagatttagtctatcttagattgtacaagtattccaagtgtatacggccgtgttataaattaggagataatctaaaaggcatagttgttataaaggacaggaatatttatattagggaagcaaatgatgacttgatagaatatctcctcaaggaatacactcctcagatttatacatattctaatgagcgcgtccccataactggttcaaaattaattctttgtggattttctcaagttacatttatggcgtatacaacgtcgcatataacaacaaataaaaaggtagatgttctcgtttccaaaaaatgtatagatgaactagtcgatccaataaattatcaaatacttcaaaatttatttgataaaggaagcggaacaataaacaaaatactcaggaagatattttattcggtaacaggtggccaaactccataggtagctttttctatttcggattttagaatttccaaattcaccagcgatttatcggttttggtgaaatccaaggatttattaatgtccacaaatgccatttgttttgtctgtggattgtatttgaaaatggaaacgatgtagttagatagatgcgctgcgaagtttcctattagggttccgcgcttcacgtcacccagcatacttgaatcaccatcctttaaaaaaaatgataagatatcaacatggagtatatcatactcggattttaattcttctactgcatcactgacattttcacaaatactacaatacggtttaccgaaaataatcagtacgttcttcatttatgggtatcaaaaacttaaaatcgttactgctggaaaataaatcactgacgatattagatgataatttatacaaagtatacaatggaatatttgtggatacaatgagtatttatatagccgtcgccaattgtgtcagaaacttagaagagttaactacggtattcataaaatacgtaaacggatgggtaaaaaagggagggcatgtaaccctttttatcgatagaggaagtataaaaattaaacaagacgttagagacaagagacgtaaatattctaaattaaccaaggacagaaaaatgttagaattagaaaagtgtacatccgaaatacaaaatgttaccggatttatggaagaagaaataaaggcagaaatgcaattaaaaatcgataaactcacatttcaaatatatttatctgattctgataacataaaaatatcattgaatgagatactaacacatttcaacaataatgagaatgttacattattttattgtgatgaacgagacgcagaattcgttatgtgtctcgaggctaaaacacatttctctaccacaggagaatggccgttgataataagtaccgatcaggatactatgctatttgcatctgctgataatcatcctaagatgataaaaaacttaactcaactgtttaaatttgttccctcggcagaggataactatttagcaaaattaacggcgttagtgaatggatgtgatttctttcctggactctatggggcatctataacacccaccaacttaaacaaaatacaattgtttagtgattttacaatcgataatatagtcactagtttggcaattaaaaattattatagaaagactaactctaccgtagacgtgcgtaatattgttacgtttataaacgattacgctaatttagacgatgtctactcgtatattcctccttgtcaatgcactgttcaagaatttatattttccgcattagatgaaaaatggaatgaatttaaatcatcttatttagaaagcgtgccgttaccctgccaattaatgtacgcgttagaaccacgcaaggagattgatgtttcagaagttaaaactttatcatcttatatagatttcgaaaatactaaatcagatatcgatgttataaaatctatatcctcgatcttcggatattctaacgaaaactgtaacacgatagtattcggcatctataaggataatttactactgagtataaataattcattttactttaacgatagtctgttaataaccaatactaaaagtgataatataataaatataggttactagattaaaaatggtgttccaactcgtgtgctctacatgcggtaaagatatttctcacgaacgatataaattgattatacgaaaaaaatcattaaaggatgtactcgtcagtgtaaagaacgaatgttgtaggttaaaattatctacacaaatagaacctcaacgtaacttaacagtgcaacctctattggatataaactaatatggatccggttaattttatcaagacatatgcgcctagaggttctattatttttattaattataccatgtcattaacaagtcatttgaatccatcgatagaaaaacatgtgggtatttattatggtacgttattatcggaacacttggtagttgaatctacctatagaaaaggagttcgaatagtcccattggatagtttttttgaaggatatcttagtgcaaaagtatacatgttagagaatattcaagttatgaaaatagcagctgatacgtcattaactttattgggtattccgtatggatttggtcataatagaatgtattgttttaaattggtagctgactgttataaaaatgccggtattgatacatcgtctaaacgaatattgggcaaagatatttttctgagccaaaacttcacagacgataatagatggataaagatatatgattctaataatttaacattttggcaaattgattaccttaaagggtgagttaatatgcataactactcctccgttgttttttccctcgttctttttcttaacgttgtttgccatcactctcataatgtaaagatattctaaaatggtaaacttttgcatatcggacgcagaaattggtataaatgttgtaattgtattatttcccgtcaatggactagtcacagctccatcagttttatatcctttagagtatttctcactcgtgtctaacattctagagcattccatgatctgtttatcgttgatattggccggaaagatagattttttattttttattatattactattggcaattgtagatataacttctggtaaatatttttctaccttttcaatctcttctattttcaagccggctatatattctgctatattgttgctagtatcaataccttttctggctaagaagtcatatgtggtattcactatatcagttttaactggtagttccattagcctttccacttctgcagaataatcagaaattggttctttaccagaaaatccagctactataataggctcaccgatgatcattggcaaaatcctatattgtaccagattaatgagagcatatttcatttccaataattctgctagttcttgagacattgatttatttgatgaatctagttggttctctagatactctaccatttctgccgcatacaataacttgttagataaaatcagggttatcaaagtgtttagcgtggctagaatagtgggcttgcatgtattaaagaatgcggtagtatgagtaaaccgttttaacgaattatatagtctccagaaatctgtggcgttacatacatgagccgaatgacatcgaagattgtccaatatttttaatagctgctctttgtccattatttctatatttgactcgcaacaattgtagataccattaatcaccgattcctttttcgatgccggacaatagcacaattgtttagctttggactctatgtattcagaattaatagatatatctctcaatacagattgcactatacattttgaaactatgtcaaaaattgtagaacgacgctgttctgcagccatttaactttaaataatttacaaaaatttaaaatgagcatccgtataaaaatcgataaactgcgccaaattgtggcatatttttcagagttcagtgaagaagtgtctataaatgtagactcgacggatgagttaatgtatatttttgccgccttgggcggatctgtaaacatttgggccattatacctctcagtgcatcagtgttttaccgaggagccgaaaacattgtgtttaatcttccggtgtccaaggtaaaatcgtgtttgtgtagttttcacaatgatgccatcatagatatagaacctgatctggaaaataatctagtaaaactttctagttatcatgtagtaagtgtcgattgtaataaggaactgatgcctattaggacagatactactatttgtctaagtatagatcaaaagaaatcttacgtgtttaattttcacaagtatgaagaaaaatgttgtggtagaaccgtcattcatttagaatggttgttgggctttatcaagtgtattagtcagcatcagcatttggctattatgtttaaagatgacaatattattatgaagactcctggtaatactgatgcattttccagggaatattctatgactgaatgttctcaagaactacaaaagttttctttcaaaatagctatctcgtctctcaacaaactacgaggattcaaaaagagagtcaatgtttttgaaactagaatcgtaatggataatgacgataacattttaggaatgttgttttcggatagagttcaatcctttaagatcaacatctttatggcgtttttagattaatactttcaatgagataaatatgggtggcggagtaagtgttgagctccctaaacgggatccgcctccgggagtacccactgatgagatgttattaaacgtggataaaatgcatgacgtgatagctcccgctaagcttttagaatatgtgcatataggaccactagcaaaagataaagaggataaagtaaagaaaagatatccagagtttagattagttaacacaggacccggtggtctttcggcattgttaagacaatcgtataatggaaccgcacccaattgctgtcgcacttttaatcgtactcattattggaagaaggatggaaagatatcagataagtatgaagagggtgcagtattagaatcgtgttggccagacgttcacgacactggaaaatgcgatgttgatttattcgactggtgtcagggggatacgttcgatagaaacatatgccatcagtggatcggttcagcctttaataggagtaatagaactgtagagggtcaacaatcgttaataaatctgtataataagatgcaaacattatgtagtaaagatgctagtgtaccaatatgcgaatcatttttgcattatttacgcgcacacaatacagaagatagcaaagagatgatcgattatattctaagacaacagtctgcggactttaaacagaaatatatgagatgtagttatcccactagagataagttagaagagtcattaaaatatgcggaacctcgagaatgttgggatccagagtgttcgaatgccaatgttaatttcttactaacacgtaattataataatttaggactttgcaatattgtacgatgtaatactagcgtgaacaacttacagatggataaaacttcctcattaagattgtcatgtggattaagcaatagtgatagattttctactgttcccgtcaatagagcaaaagtagttcaacataatattaaacactcgttcgacctaaaattgcatttgatcagtttattatctctcttggtaatatggatactaattgtagctatttaaatgggtgccgcggcaagcatacagacgacggtgaatacactcagcgaacgtatctcgtctaaattagaacaagaagcgaacgctagtgctcaaacaaaatgtgatatagaaatcggaaatttttatatccgacaaaaccatggatgtaacctcactgttaaaaatatgtgctctgcggacgcggatgctcagttggatgctgtgttatcagccgctacagaaacatatagtggattaacaccggaacaaaaagcatacgtgccagctatgtttactgctgcgttaaacattcagacgagtgtaaacactgttgttagagattttgaaaattatgtgaaacagacttgtaattctagcgcggtcgtcgataacaaattaaagatacaaaacgtaatcatagatgaatgttacggagccccaggatctccaacaaatttggaatttattaatacaggatctagcaaaggaaattgtgccattaaggcgttgatgcaattgactactaaggccactactcaaatagcacctaaacaagttgctggtacaggagttcagttttatatgattgttatcggtgttataatattggcagcgttgtttatgtactatgccaagcgtatgttgttcacatccaccaatgataaaatcaaacttattttagccaataaggaaaacgtccattggactacttacatggacacattctttagaacttctccgatggttattgctaccacggatatgcaaaactgaaaatatattgataatattttaatagattaacatggaagttatcgctgatcgtctagacgatatagtgaaacaaaatatagcggatgaaaaatttgtagattttgttatacacggtctagagcatcaatgtcctgctatacttcgaccattaattaggttgtttattgatatactattatttgttatagtaatttatatttttacggtacgtctagtaagtagaaattatcaaatgttgttggtgttggtggcgctagtcatcacattaactattttttattactttatactataatagtactagactgacttctaacaaacatctcacctgccataaataaatgcttgatattaaagtcttctatttctaacactattccatctgtggaaaataatactctgacattatcgctaattgacacatcggtgagtgatatgcctataaagtaataatcttctttgggcacatataccagtgtaccaggttctaacaacctatttactggtgctcctgtagcatactttttctttaccttgagaatatccatcgtttgcttggtcaatagcgatatgtgattttttatcaaccactcgaaaaagtaattggagtgttcatatcctctacgggctattgtctcatggccgtgtatgaaatttaagtaacacgactgtggtagatttgttctatagagccggttgccgcaaatagatagaactaccaatatgtctgtacaaatgttaaacattaattgattaacagaaaaaacaatgttcgttctgggaatagaaaccagatcaaaacaaaattcgttagaatatatgccacgtttatacatggaatataaaataactacagtttgaaaaataacagtatcatttaaacatttaacttgcggggttaatctcacaactttactgtttttgaactgttcaaaatatagcatcgatccgtgagaaatacgtttagccgcctttaatagaggaaatcccaccgcctttctggatctcaccaacgacgatagttctgaccagcaactcatttcttcatcatccacctgttttaacatataataggcaggagatagatatccgtcattgcaatattccttctcgtaggcacacaatctaatattgataaaatctccattctcttctctgcatttattatcttgtctcggtggctgattaggctgtggtcttggtttaggccttggtctatcgttgttgaatctattttggtcattaaatctttcatttcttcctggtatatttctatcacctcgtttggttggatttttgtctatattatcgtttgtaacatcggtacgggtattcatttatcacaaaaaaaacttctctaaatgagtctactgctagaaaacctcatcgaagaagataccatattttttgcaggaagtatatctgagtatgatgatttacaaatggttattgccggcgcaaaatccaaatttccaagatctatgctttctatttttaatatagtacctagaacgatgtcaaaatatgagttggagttgattcataacgaaaatatcacaggagcaatgtttaccacaatgtataatataagaaacaatttgggtctaggagatgataaactaactattgaagccattgaaaactatttcttggatcctaacaatgaagttatgcctcttattattaataatacggatatgactgccgtcattcctaaaaaaagtggtaggagaaagaataagaacatggttatcttccgtcaaggatcatcacctatcttgtgcattttcgaaactcgtaaaaagattaatatttataaagaaaatatggaatccgcgtcgactgagtatacacctatcggagacaacaaggctttgatatctaaatatgcgggaattaatgtcctgaatgtgtattctccttccacatccataagattgaatgccatttacggattcaccaataaaaataaactagagaaacttagtactaataaggaactagaatcgtatagttctagccctcttcaagaacccattaggttaaatgattttctgggactattggaatgtgttaaaaagaatattcctctaacagatattccgacaaaggattgattactataaatggagaatgttcctaatgtatactttaatcctgtgtttatagagcccacgtttaaacattctttattaagtgtttataaacacagattaatagttttatttgaagtattcgttgtattcattctaatatatgtattttttagatctgaattaaatatgttcttcatgcctaaacgaaaaatacccgatcctattgatagattacgacgtgctaatctagcgtgtgaagacgataaattaatgatctatggattaccatggatgacaactcaaacatctgcgttatcaataaatagtaaaccgatagtgtataaagattgtgcaaagcttttgcgatcaataaatggatcacaaccagtatctcttaacgatgttcttcgcagatgatgattcattttttaagtatttggctagtcaagatgatgaatcttcattatctgatatattgcaaatcactcaatatctagactttctgttattattattgatccaatcaaaaaataaattagaagccgtgggtcattgttatgaatctctttcagaggaatacagacaattgacaaaattcacagactctcaagattttaaaaaactgtttaacaaggtccctattgttacagatggaagggtcaaacttaataaaggatatttgttcgactttgtgattagtttgatgcgattcaaaaaagaatcctctctagctaccaccgcaatagatcctattagatacatagatcctcgtcgcgatatcgcattttctaacgtgatggatatattaaagtcgaataaagtgaacaataattaattctttattgtcatcatgaacggcggacatattcagttgataatcggccccatgttttcaggtaaaagtacagaattaattagacgagttagacgttatcaaatagctcaatataaatgcgtgactataaaatattctaacgataatagatacggaacgggactatggacgcatgataagaataattttgaagcattggaagcaactaaactatgtgatgtcttggaatcaattacagatttctccgtgataggtatcgatgaaggacagttctttccagacattgttgaattctgtgagcgtatggcaaacgaaggaaaaatagttatagtagccgcactcgatgggacatttcaacgtaaaccgtttaataatattttgaatcttattccattatctgaaatggtggtaaaactaactgctgtgtgtatgaaatgctttaaggaggcttccttttctaaacgattgggtgaggaaaccgagatagagataataggaggtaatgatatgtatcaatcggtgtgtagaaagtgttacgtcggctcataatattatattttttatctaaaaaactaaaaataaacattgattaaattttaatataatacttaaaaatggatgttgtgtcgttagataaaccgtttatgtattttgaggaaattgataatgagttagattacgaaccagaaagtgcaaatgaggtcgcaaaaaaactgccgtatcaaggacagttaaaactattactaggagaattattttttcttagtaagttacagcgacacggtatattagatggtgccaccgtagtgtatataggatcggctcctggtacacatatacgttatttgagagatcatttctataatttaggagtgatcatcaaatggatgctaattgacggccgccatcatgatcctattttaaatggattgcgtgatgtgactctagtgactcggttcgttgatgaggaatatctacgatccatcaaaaaacaactgcatccttctaagattattttaatttctgatgtgagatccaaacgaggaggaaatgaacctagtacggcggatttactaagtaattacgctctacaaaatgtcatgattagtattttaaaccccgtggcatctagtcttaaatggagatgcccgtttccagatcaatggatcaaggacttttatatcccacacggtaataaaatgttacaaccttttgctccttcatattcagctgaaatgagattattaagtatttataccggtgagaacatgagactgactcgagttaccaaattagacgctgtaaattatgaaaaaaagatgtactaccttaataagatcgtccgtaacaaagtagttgttaactttgattatcctaatcaggaatatgactattttcacatgtactttatgctgaggaccgtgtactgcaataaaacatttcctactactaaagcaaaggtactatttctacaacaatctatatttcgtttcttaaatattccaacaacatcaactgaaaaagttagtcatgaaccaatacaacgtaaaatatctagcaaaaattctatgtctaaaaacagaaatagcaagagatccgtacgcggtaataaatagaaacgtactactgagatatactaccgatatagagtataatgatttagttactttaataaccgttagacataaaattgattctatgaaaactgtgtttcaggtatttaacgaatcatccataaattatactccggttgatgatgattatggagaaccaatcattataacatcgtatcttcaaaaaggtcataacaagtttcctgtaaattttctatacatagatgtggtaatatctgacttatttcctagctttgttagactagatactacagaaactaatatagttaatagtgtactacaaacaggcgatggtaaaaagactcttcgtcttcccaaaatgttagagacggaaatagttgtcaagattctctatcgccctaatataccattaaaaattgttagatttttccgcaataacatggtaactggagtagagatagccgatagatctgttatttcagtcgctgattaatcaattagtagagatgagataagaacattataataatcaataatatatcttatatcttatatcttatatcttatatcttgtttagaaaaatgctaatattaaaatagctaacgctagtaatccaatcggaagccatttgatatctataatagggtatctaatttcctgatttaaatagcggacagctatattctcggtagctactcgtttggaatcacaaacattatttacatctaatttactatctgtaatggaaacgtttcccaatgaaatggtacaatccgatacattgcattttgttatatttttttttaaagaggctggtaacaacgcatcgcttcgtttacatggctcgtaccaacaataatagggtaatcttgtatctattcctatccgtactatgcttttatcaggataaatacatttacatcgtatatcgtctttgttagcatcacagaatgcataaatttgttcgtccgtcatgataaaaatttaaagtgtaaatataactattatttttatagttgtaataaaaagggaaatttgattgtatactttcggttctttaaaagaaactgacttgataaaaatggctgtaatctctaaggttacgtatagtctatatgatcaaaaagagattaatgctacagatattatcattagtcatgttaaaaatgacgacgatatcggtaccgttaaagatggtagactaggtgctatggatggggcattatgtaagacttgtgggaaaacggaattggaatgtttcggtcactggggtaaagtaagtatttataaaactcatatagttaagcctgaatttatttcagaaattattcgtttactgaatcatatatgtattcactgcggattattgcgttcacgagaaccgtattccgacgatattaacctaaaagagttatcgggacacgctcttaggagattaaaggataaaatattatccaagaaaaagtcatgttggaacagtgaatgtatgcaaccgtatcaaaaaattactttttcaaagaaaaaggtttgtttcgtcaacaagttggatgatattaacgttcctaattctctcatctatcaaaagttaatttctattcatgaaaagttttggccattattagaaattcatcaatatccagctaacttattttatacagactactttcccatccctccgttgattattagaccggctattagtttttggatagatagtatacccaaagagaccaatgaattaacttacttattaggtatgatcgttaagaattgtaacttgaatgctgatgaacaggttatccagaaggcggtaatagaatacgatgatattaaaattatttctaataacactaccagtatcaatttatcatatattacatccggcaaaaataatatgattagaagttatatcgtcgcccgacgaaaagatcagaccgctagatctgtaattggtcccagtacatctatcaccgttaatgaggtaggaatgcccgcatatattagaaatacacttacagaaaagatatttgttaatgcctttacagtggataaagttaaacaactattagcgtcaaaccaagttaaattttactttaataaacgattaaaccaattaacaagaatacgccaaggaaagtttattaaaaataaaatacatttattgcctggtgattgggtagaagtagctgttcaagaatatacaagtattatttttggaagacagccgtctctacatagatacaacgtcatcgcttcatctatcagagctaccgaaggagatactatcaaaatatctcccggaattgccaactctcaaaatgctgatttcgacggggatgaggaatggatgatattagaacaaaatcctaaagctgtaattgaacaaagtattcttatgtatccgacgacgttactcaaacacgatattcatggagcccccgtttatggatctattcaagatgaaatcgtagcagcgtattcattgtttaggatacaagatctttgtttagatgaagtattgaacatcttggggaaatatggaagagagttcgatcctaaaggtaaatgtaaattcagcggtaaagatatctatacttacttgataggtgaaaagattaattatccgggtctcttaaaggatggtgaaattattgcaaacgacgtagatagtaattttgttgtggctatgaggcatctgtcattggctggactcttatccgatcataagtcgaacgtggaaggtatcaactttattatcaagtcatcttatgtttttaagagatatctatctatttacggttttggggtgacattcaaagatctgagaccaaattcgacgttcactaataaattggaggccatcaacgtagaaaaaatagaacttatcaaagaagcatacgccaaatatctcaacgatgtaagagacgggaaaatagttccattatctaaagctttagaggcggactatgtggaatccatgttatccaacttgacaaatcttaatatccgagagatagaagaacatatgagacaaacgctgatagatgatccagataataacctcctgaaaatggccaaagcgggttataaagtaaatcccacagaactaatgtatattctaggtacgtatggacaacaaaggattgatggtgaaccagcagagactcgagtattgggtagagttttaccttactatcttccagactctaaggatccagaaggaagaggttatattcttaattctttaacaaaaggattaacgggttctcaatattacttttcgatgctggttgcaagatctcaatctactgatatcgtctgtgaaacatcacgtaccggaacactggctagaaaaatcattaaaaagatggaggatatggtggtcgacggatacggacaagtagttataggtaatacgctcatcaagtacgccgccaattataccaaaattctaggctcagtatgtaaacctgtagatcttatctatccagatgagtccatgacttggtatttggaaattagtgctctgtggaataaaataaaacagggattcgtttactctcagaaacagaaacttgcaaagaagacattggcgccgtttaatttcctagtattcgtcaaacccaccactgaggataatgctattaaggttaaggatctgtacgatatgattcataacgtcattgatgatgtgagagagaaatacttctttacggtatctaatatagattttatggagtatatattcttgacgcatcttaatccttctagaattagaattacaaaagaaacggctatcactatctttgaaaagttctatgaaaaactcaattatactctaggtggtggaactcctattggaattatttctgcacaggtattgtctgagaagtttacacaacaagccctgtccagttttcacactactgaaaaaagtggtgccgtcaaacaaaaacttggtttcaacgagtttaataacttgactaatttgagtaagaataagaccgaaattatcactctggtatccgatgatatctctaaacttcaatctgttaagattaatttcgaatttgtatgtttgggagaattaaatccagacatcactcttcgaaaagaaacagataggtatgtagtagatataatagtcaatagattatacatcaagagagcagaaataaccgaattagtcgtcgaatatatgattgaacgatttatctcctttagcgtcattgtaaaggaatggggtatggaaacattcattgaggatgaggataatattagatttactgtctacctaaatttcgttgaaccggaagaattgaatcttagtaagtttatgatggttcttccgggtgccgccaacaagggaaagattagtaaattcaagattcctatctctgactatacgggatatgacgacttcaatcaaacaaaaaagctcaataagatgactgtagaactcatgaatctaaaagaattgggttctttcgatttggaaaacgtcaacgtgtatcctggagtatggaatacatacgatatcttcggtatcgaggccgctcgtgaatacttgtgcgaagccatgttaaacacctatggagaagggttcgattatctgtatcagccttgtgatcttctcgctagtttactatgtgctagttacgaaccagaatcagtgaataaattcaagttcggcgcagctagtactcttaagagagctacgttcggagacaataaagcattgttaaacgcggctcttcataaaaagtcagaacctattaacgataatagtagctgccacttttttagcaaggtccctaatataggaactggatattacaaatactttatcgacttgggtcttctcatgagaatggaaaggaaactatctgataagatatcttctcaaaagatcaaggaaatggaagaaacagaagacttttaattcttatcaataacatatttttctatgatctgtcttttaaacgatggattttccacaaatgcgcctctcaagtccctcatagaatgatacacgtataaaaaatatagcataggcgatgactccttatttttagacattagatatgccaaaatcatagccccgcttctatttactcccgcagcacaatgaaccaacacgggctcgtttcgttgatcacatttagataaaaaggcggttacgtcgtcaaaatatttactaatatcggtagttgtatcatctaccaacggtatatgaataatattaatattagagttaggtaatgtatatttatccatcgtcaaatttaaaacatatttgaacttaacttcagatgatggtgcatccatagcatttttataatttcccaaatacacattattggttacccttgtcattatagtgggagatttggctctgtgcatatctccagttgaacgtagtagtaagtatttatacaaacttttcttatccatttataacgtacaaatggataaaactactttatcggtaaacgcgtgtaatttagaatacgttagagaaaaggctatagtaggcgtacaagcagccaaaacatcaacacttatattctttgttattatattggcaattagtgcgctattactctggtttcagacgtctgataatccagtctttaatgaattaacgagatatatgcgaattaaaaatacggttaacgattggaaatcattaacggatagcaaaacaaaattagaaagtgatagaggtagacttctagccgctggtaaggatgatatattcgacttcaaatgtgtggatttcggcgcctattttatagctatgcgattggataagaaaacatatctgccgcaagctattaggcgaggtactggagacgcgtggatggttaaaaaggcggcaaaggtcgatccatctgctcaacaattttgtcagtatttgataaaacacaagtctaataatgttattacttgtggtaatgagatgttaaatgaattaggttatagcggttattttatgtcaccgcattggtgttccgattttagtaatatggaatagtgttagataaatgcggtaacgaatgttcctgtaaggaaccataacagcttagatttaacgttaaagatgagcataaacataataaacaaaattacaatcaaacttataacattaatatcaaacaatccaaaaaatgaaatcagtggagtagtaaacgcgtacataactcctggataacgtttagcagctgccgttcctattctagaccaaaaattcggtttcatgttttcgaaacggtattctgcaacaagtcgaggatcgtgttctacatatttggcggcgttatccagtatctgcctattgatcttcatttcgttttcgattctggctatttcaaaataaaatcccgatgatagacctccagactttataatttcatctacgatgttcagcgccgtagtaactttaataatataggctgataagctaacatcataccctcctgtatatgtgaatatggcatgatttttgtccattacaagctcggttttaactttattgcctgtaataatttctctcatctgtaggatatctatttttttgtcatgcattgccttcaagacgggacgaagaaacgtaatatcctcaataacgttatcgttttctacaataactacatattctacctttttattttctaactcagtaaaaaaattagaatcccatagggctaaatgtctagcgatatttcttttcgtttcctctgtacacatagtgttacaaaaccctgaaaagaagtgagtatacttgtcatcatttctaatgtttcctccagtccactgtataaacgcataatccttgtaatgatctggatcatccttgactaccacaacatttcttttttctggcataacttcgttgtcctttacatcatcgaacttctgatcattaatatgctcatgaacattaggaaatgtttctgatggaggtctatcaataactggcacaacaataacaggagttttcaccgccgccatttagttattgaaattaatcatatacaactctttaatacgagttatattttcgtctatccattgtttcacattgacatatttcgacaaaaagatataaaatgcgtattccaatgcttctctgtttaatgaattactaaaatatacaaacacgtcactgtctggcaataaatgatatcttagaatattgtaacaatttattttgtattgcacatgttcgtgatctatgagttcttcttcgaatggcataggatctccgaatctgaaaacgtataaataggagttagaataataatatttgagagtattggtaatatataaactctttagcggtataattagtttttttctctcaatttctatttttagatgtgatggaaaaatgactaattttgtagcattagtatcatgaactctaatcaaaatcttaatatcttcgtcacacgttagctctttgaagtttttaagagatgcatcagttggttctacagatggagtaggtgcaacaattttttgttctacacatgtatgtactggagccattgttttaactataatggtgcttgtatcgaaaaactttaatgcagatagcggaagctcttcgccgcgactttctacgtcgtaattgggttctaacgccgatctctgaatggatactagttttctaagttctaatgtgattctctgaaaatgtaaatccaattcctccggcattatagatgtgtatacatcggtaaataaaactatagtatccaacgatcccttctcgcaaattctagtcttaaccaaaaaatcgtatataaccacggagatggcgtatttaagagtggattcttctaccgttttgttcttggatgtcatataggaaactataaagtccgcactactgttaagaatgattactaacgcaactatatagtttaaattaagcattttggaaacataaaataactctgtagacgatacttgactttcgaataagtttgcagacaaacgaagaaagaacagacctctcttaatttcagaagaaaactttttttcgtattcctgacgtctagagtttatatcaataagaaagttaagaattagtcggttaatgttgtatttcattacccaagtttgagatttcataatattatcaaaagacatgataatattaaagataaagcgctgactatgaacgaaatagctatatggttcgctcaagaatatagtcttgttaaacgtggaaacgataactgtatttttaatcacgtcagcggcatctaaattaaatataggtatatttattccacacactctacaatatgccacaccatcttcataataaataaattcgttagcaaaattattaattttagtgaaatagttagcgtcaactttcatagcttccttcaatctaatttgatgctcacacggtgcgaattccactctaacatcccttttccatgcctcaggttcatcgatctctataatatctagttttttgcgtttcacaaacacaggctcgtctctcgcgatgagatctgtatagtaactatgtaaatgataactagatagaaagatgtagctatatagatgacgatcctttaagagaggtataataactttaccccaatcagatagactgttgttatggtcttcggaaaaagaatttttataaatttttccagtattttccaaatatacgtacttaacatctaaaaaatccttaatgataataggaatggataatccgtctattttataaagaaatacatatcgcacattatacttttttttggaaatgggaataccgatgtgtctacataaatatgcaaagtctaaatattttttagagaatcttagttggtccaaattcttttccaagtacggtaatagatttttcatattgaacggtatcttcttaatctctggttctagttccgcattaaatgatgaaactaagtcactatttttataactaacgattacatcacctctaacatcatcatttaccagaatactgatcttcttttgtcgtaaatacatgtctaatgtgttaaaaaaaagatcatacaagttatacgtcatttcatctgtggtattcttgtcattgaaggataaactcgtactaatctcttctttaacagcctgttcaaatttatatcctatatacgaaaaaatagcaaccagtgtttgatcatccgcgtcaatattctgttctatcgtagtgtataacaatcgtatatcttcttctgtgatagtcgatacgttataaaggttgataacgaaaatatttttatttcgtgaaataaagtcatcgtaggattttggacttatattcgcgtctagtagatatgcttttatttttggaatgatctcaattagaatagtctctttagagtccatttaaagttacaaacaactaggaaattggtttatgatgtataatttttttagtttttatagattctttattctatacttaaaaaatgaaaataaatacaaaggttcttgagggttgtgttaaattgaaagcgagaaataatcataaattatttcattatcgcgatatccgttaagtttgtatcgtaatggcgtggtcaattacgaataaagcggatactagtagcttcacaaagatggctgaaatcagagctcatctaaaaaatagcgctgaaaataaagataaaaacgaggatattttcccggaagatgtaataattccatctactaagcccaaaaccaaacgagccactactcctcgtaaaccagcggctactaaaagatcaaccaaaaaggaggaagtggaagaagaagtagttatagaggaatatcatcaaacaactgaaaaaaattctccatctcctggagtcagcgacattgtagaaagcgtggctgctgtagagctcgatgatagcgacggggatgatgaacctatggtacaagttgaagctggtaaagtaaatcatagtgctagaagcgatctctctgacctaaaggtggctaccgacaatatcgttaaagatcttaagaaaattattactagaatctctgcagtatcgacggttctagaggatgttcaagcagctggtatctctagacaatttacttctatgactaaagctattacaacactatctgatctagtcaccgagggaaaatctaaagttgttcgtaaaaaagttaaaacttgtaagaagtaaatgcgtgcacttttttataaagatggtaaactctttaccgataataattttttaaatcctgtatcagacgataatccagcgtatgaggttttgcaacatgttaaaattcctactcatttaacagatgtagtagtatatgaacaaacgtgggaggaggcgttaactagattaatttttgtgggaagcgattcaaaaggacgtagacaatacttttacggaaaaatgcatgtacagaatcgcaacgctaaaagagatcgtatttttgttagagtatataacgttatgaaacgaattaattgttttataaacaaaaatataaagaaatcgtccacagattccaattatcagttggcggtttttatgttaatggaaactatgttttttattagatttggtaaaatgaaatatcttaaggagaatgaaacagtagggttattaacactaaaaaataaacacatagaaataagtcccgatgaaatagttatcaagtttgtaggaaaggacaaagtttcacatgaatttgttgttcataagtctaatagactatataaaccgctattgaaactgacggatgattctagtcccgaagaatttctgttcaacaaactaagtgaacgaaaggtatacgaatgtatcaaacagtttggtattagaatcaaggatctccgaacgtatggagtcaattatacgtttttatataatttttggacaaatgtaaagtccatatctcctcttccgtcaccaaaaaagttaatagcgttaactatcaaacaaactgctgaagtggtaggtcatactccatcaatttcaaaaagagcttatatggcaacgactattttagaaatggtaaaggataaaaattttttagatgtagtatctaaaactacgttcgatgaattcctatctatagtcgtagatcacgttaaatcatctacggatggatgatatagatctttacacaaataattacaagaccgataaatggaaatggataagcgtatgaaatctctcgcaatgacagctttcttcggagagctaagcacattagatattatggcattgataatgtctatatttaaacgccatccaaacaataccattttttcagtggataaggatggtcagtttatgattgatttcgaatacgataattataaggcttctcaatatttggatctgaccctcactccgatatctggagatgaatgcaagactcacgcatcgagtatagccgaacaattggcgtgtgtggatattattaaagaggatattagcgaatatatcaaaactactccccgtcttaaacgatttataaaaaaataccgcaatagatcagatactcgcatcagtcgagatacagaaaagcttaaaatagctctagctaaaggcatagattacgaatatataaaagacgcttgttaataagtaaatgaaaaaaaactagtcgtttataataaaacacgatatggatgccaacgtagtatcatcttctactattgcgacgtatatagacgctttagcgaagaatgcttcagaattagaacagaggtctaccgcatacgaaataaataatgaattggaactagtatttattaagccgccattgattactttgacaaatgtagtgaatatctctacgattcaggaatcgtttattcgatttaccgttactaataaggaaggtgttaaaattagaactaagattccattatctaaggtacatggtctagatgtaaaaaatgtacagttagtagatgctatagataacatagtttgggaaaagaaatcattagtgacggaaaatcgtcttcacaaagaatgcttgttgagactatcgacagaggaacgtcatatatttttggattacaagaaatatggatcctctatccgactagaattagtcaatcttattcaagcaaaaacaaaaaactttacgatagactttaagctaaaatattttctaggatccggtgcccaatctaaaagttctttgttgcacgctattaatcatccaaagtcaaggcctaatacatctctggaaatagaattcacacctagagacaatgaaacagttccatatgatgaactaataaaggaattgacgactctctcgcgtcatatatttatggcttctccagagaatgtaattctttctccgcctattaacgcgcctataaaaacctttatgttgcctaaacaagatatagtaggtttggatctggaaaatctatatgccgtaactaagactgacggcattcctataactatcagagttacatcaaacgggttgtattgttattttacacatcttggttatattattagatatcctgttaagagaataatagattccgaagtagtagtctttggtgaggcagttaaggataagaactggaccgtatatctcattaagctaatagagcccgtgaatgctatcagtgatagactagaagaaagtaagtatgttgaatctaaactagtggatatttgtgatcggatagtattcaagtcaaagaaatacgaaggtccgtttactacaactagtgaagtcgtcgatatgttatctacatatttaccaaagcaaccagaaggtgttattctgttctattcaaagggacctaaatctaacattgattttaaaattaaaaaggaaaatactatagaccaaactgcaaatgtagtatttaggtacatgtccagtgaaccaattatctttggagaatcgtctatctttgtagagtataagaaatttagcaacgataaaggctttcctaaagaatatggttctggtaagattgtgttatataacggcgttaattatctaaataatatctattgtttggaatatattaatacacataatgaagtgggtattaagtccgtggttgtacctattaagtttatagcagaattcttagttaatggagaaatacttaaacctagaattgataaaaccatgaaatatattaactcagaagattattatggaaatcaacataatatcatagtcgaacatttaagagatcaaagcatcaaaataggagatatctttaacgaggataaactatcggatgtgggacatcaatacgccaataatgataaatttagattaaatccagaagttagttattttacgaataaacgaactagaggaccgttgggaattttatcaaactacgtcaagactcttcttatttctatgtattgttccaaaacatttttagacgattccaacaaacgaaaggtattggcgattgattttggaaacggtgctgacctggaaaaatacttttatggagagattgcgttattggtagcgacggatccggatgctgatgctatagctagaggaaatgaaagatacaacaaattaaactctggaattaaaaccaagtactacaaatttgactacattcaggaaactattcgatccgatacatttgtctctagtgtcagagaagtattctattttggaaagtttaatatcatcgactggcagtttgctatccattattcttttcatccgagacattatgctaccgtcatgaataacttatccgaactaactgcttctggaggcaaggtattaatcactaccatggacggagacaaattatcaaaattaacagataaaaagacttttataattcataagaatttacctagtagcgaaaactatatgtctgtagaaaaaatagctgatgatagaatagtggtatataatccatcaacaatgtctactccaatgactgaatacattatcaaaaagaacgatatagtcagagtgtttaacgaatacggatttgttcttgtagataacgttgatttcgctacaattatagaacgaagtaaaaagtttattaatggcgcatctacaatggaagatagaccgtctacaaaaaactttttcgaactaaatagaggagccattaaatgtgaaggtttagatgtcgaagacttacttagttactatgttgtttatgtcttttctaagcggtaaataataatatggtatgggttctgatatccccgttctaaatgcattaaataattccaatagagcgatttttgttcctataggaccttccaactgtggatactctgtattgttaatagatatattaatacttttgtcgggtaacagaggttctacgtcttctaaaaataaaagttttataacatctggcctgttcataaataaaaacttggcgattctatatatactcttattatcaaatctagccattgtcttatagatgtgagctactgtaggtgtaccatttgattttctttctaatactatatatttctctcgaagaagttcttgcacatcatctgggaataaaatactactgttgagtaaatcagttattttttttatatcgatattgatggacatttttatagttaaggataataagtatcccaaagtcgataacgacgataacgaagtatttatacttttaggaaatcacaatgactttatcagattaaaattaacaaaattaaaggagcatgtatttttttctgaatatattgtgactccagatacatatggatctttatgcgtcgaattaaatgggtctagttttcagcacggtggtagatatatagaggtggaggaatttatagatgctggaagacaagttagatggtgttctacatccaatcatatatctaaagatatacccgaagatatgcacactgataaatttgtcatttatgatatatacacttttgacgctttcaagaataaacgattggtattcgtacaggtacctccgtcgttaggagatgatagtcatttgactaatccgttattgtctccgtattatcgtaattcagtagccagacaaatggtcaataatatgatttttaatcaagattcatttttaaaatatttattagaacatctgattagaagccactatagagtttctaaacatataacaatagttagatacaaggataccgaagaattaaatctaacgagaatatgttataatagagataagtttaaggcgtttgtattcgcttggtttaacggcgtttcggaaaatgaaaaggtactagatacgtataaaaaggtatctaatttgatataatgaattcagtgactgtatcacacgcgccatatactattacttatcacgatgattgggaaccagtaatgagtcaattggtagagttttataacgaagtagccagttggctgctacgagacgagacgtcgcctattcctgataagttctttatacagttgaaacaaccgcttagaaataaacgagtatgtgtgtgcggtatagatccgtatccgaaagatggaactggtgtaccgttcgaatcaccaaattttacaaaaaaatcaattaaggagatagcttcatctatatctagattaaccggagtaattgattataaaggttataaccttaatataatagacggggttataccctggaattattacttaagttgtaaattaggagaaacaaaaagtcacgcgatctactgggataagatttccaagttactgctgcagcatataactaaacacgttagtgttctttattgtttgggtaaaacagatttctcgaatatacgggcaaagttagaatccccggtaactaccatagtcggatatcatccagcggctagagaccgccaattcgagaaagatagatcatttgaaattatcaacgttttactggaattagacaacaaggcacctataaattgggctcaagggtttatttattaatgctttagtgaaattttaacttgtgttctaaatggatgcggctattagaggtaatgatgttatctttgttcttaagactataggtgtcccgtcagcgtgcagacaaaatgaagatccaagatttgtagaagcatttaaatgcgacgagttagaaagatatattgagaataatccagaatgtacactattcgaaagtcttagggatgaggaagcatactctatagtcagaattttcatggatgtagatttagacgcgtgtctagacgaaatagattatttaacggctattcaagattttattatcgaggtgtcaaactgtgtagctagattcgcgtttacagaatgcggtgccattcatgaaaatgtaataaaatccatgagatctaatttttcattgactaagtctacaaatagagataaaacaagttttcatattatctttttagacacgtataccactatggatacattgatagctatgaaacgaacactattagaattaagtagatcatctgaaaatccactaacaagatcgatagacactgccgtatataggagaaaaacaactcttcgggttgtaggtactaggaaaaatccaaattgcgacactattcatgtaatgcaaccaccgcatgataatatagaagattacctattcacttacgtggatatgaacaacaatagttattacttttctctacaacaacgattggaggatttagttcctgataagttatgggaaccagggtttatttcattcgaagacgctataaaaagagtttcaaaaatattcattaattctataataaactttaatgatctcgatgaaaataattttacaacggtaccactggtcatagattacgtaacaccttgtgcattatgtaaaaaacgatcgcataaacatccgcatcaactatcgttggaaaatggtgctattagaatttacaaaactggtaatccacatagttgtaaagttaaaattgttccgttggatggtaataaactgtttaatattgcacaaagaattttagacactaactctgttttattaaccgaacgaggagaccatatagtttggattaataattcatggaaatttaacagcgaagaacccttgataacaaaactaattttgtcaataagacatcaactacctaaggaatattcaagcgaattactctgtccaagaaaacgaaagactgtagaagctaacatacgagacatgttagtagattcagtggagaccgatacctatccggataaacttccgtttaaaaatggtgtattggacctggtagacggaatgttttactctggagatgatgctaaaaaatatacgtgtactgtatcaaccggatttaaatttgacgatacaaagttcgtcgaagacagtccagaaatggaagagttaatgaatatcattaacgatatccaaccattaacggatgaaaataagaaaaatagagagctatatgaaaaaacattatctagttgtttatgtggtgctaccaaaggatgtttaacattcttttttggagaaactgcaactggaaagtcgacaaccaaacgtttgttaaagtctgctatcggtgacctgtttgttgagacgggtcaaacaattttaacagatgtattggataaaggacctaatccatttatcgctaacatgcatttgaaaagatctgtattctgtagcgaactacctgattttgcctgtagtggatcaaagaaaattagatctgacaatattaaaaagttgacagaaccttgtgtcattggaagaccgtgtttctccaataaaattaataatagaaaccatgcgacaatcattatcgatactaattacaaacctgtttttgataggatagataacgcattaatgagaagaattgccgtcgtgcgattcagaacacacttttctcaaccttctggtagagaggctgctgaaaataatgacgcgtacgataaagtcaaactattagacgaggggttagatggtaaaatacaaaataatagatatagattcgcatttctatacttgttggtgaaatggtacagaaaatatcatgttcctattatgaaactatatcctacaccggaagagattcctgactttgcattctatctcaaaataggtactctgttagtatctagctctgtaaagcatattccattaatgacggacctctccaaaaagggatatatattgtacgataatgtggttactcttccgttgactactttccaacagaaaatatccaagtattttaattctagactatttggacacgatatagagagcttcatcaatagacataagaaatttgccaatgttagtgatgaatatctgcaatatatattcatagaggatatttcatctccgtaaatatatgctcatatatttatagaagatatcacatatctaaatgaataccggaatcatagatttatttgataatcatgttgatagtataccaactatattacctcatcagttagctactctagattatctagttagaactatcatagatgagaacagaagcgtgttattgttccatattatgggatcaggtaaaacaataatcgctttgttgttcgccttggtagcttccagatttaaaaaggtttacattctagtgccgaacatcaacatcttaaaaattttcaattataatatgggtgtagctatgaacttgtttaatgacgaattcatagctgagaatatctttattcattccacaacaagtttttattctcttaattataacgataacgtcattaattataacggattatctcgctacaataactctatttttatcgttgatgaggcacataatatctttgggaataatactggagaacttatgaccgtgataaaaaataaaaacaagattccttttttactattgtctggatctcccattactaacacacctaatactctgggtcatattatagatttaatgtccgaagagacgatagattttggtgaaattattagtcgtggtaagaaagtaattcagacacttcttaacgaacgcggtgtgaatgtacttaaggatttgcttaaaggaagaatatcatattacgaaatgcctgataaagatctaccaacgataagatatcacggacgtaagtttctagatactagagtagtatattgtcacatgtctaaacttcaagagagagattatatgattactagacgacagctatgttatcatgaaatgtttgataaaaatatgtataacgtgtcaatggcagtattgggacaacttaatctgatgaataatttagatactttatttcaggaacaggataaggaattgtacccaaatctgaaaataaataatggcgtgttatacggagaagaattggtaacgttaaacattagttccaaatttaaatactttattaatcggatacagacactcaacggaaaacattttatatacttttctaattctacatatggcggattggtaattaaatatatcatgctcagtaatggatattctgaatataatggttctcagggaactaatccacatatgataaacggcaaaccaaaaacatttgctatcgttactagtaaaatgaaatcgtctttagaggatctattagatgtgtataattctcctgaaaacgatgatggtagtcaattgatgtttttgttttcatcaaacattatgtccgaatcctatactctaaaagaggtaaggcatatttggtttatgactatcccagatactttttctcaatacaaccaaattcttggacgatctattagaaaattctcttacgccgatatttctgaaccagttaatgtatatcttttagccgccgtatattccgatttcaatgacgaagtgacgtcattaaacgattacacacaggatgaattaattaatgttttaccatttgacatcaaaaagctgttgtatctaaaatttaagacgaaagaaacgaatagaatatactctattcttcaagagatgtctgaaacgtattctcttccaccacatccatcaattgtaaaagttttattgggagaattggtcagacaatttttttataataattctcgtattaagtataacgataccaagttacttaaaatggttacatcagttataaaaaataaagaagacgctaggaattacatagatgatattgtaaacggtcacttctttgtatcgaataaagtatttgataaatctcttttatacaaatacgaaaacgatattattacagtaccgtttagactttcctacgaaccatttgtttggggagttaactttcgtaaagaatataacgtggtatcttctccataaaactgatgagatatataaagaaataaatgtcgagctttgttaccaatggatacctttccgttacattggaaccacacgagctgacgttagacataaaaactaatattaggaatgccgtatataagacgtatctccatagagaaattagtggtaaaatggccaagaaaatagaaattcgtgaagacgtggaattacctctcggcgaaatagttaataattctgtagttataaacgttccgtgtgtaataacctacgcgtattatcacgttggggatatagtcagaggaacattaaacatcgaagatgaatcaaatgtaactattcaatgtggagatttaatctgtaaactaagtagagattcgggtactgtatcatttagcgattcaaagtactgcttttttcgaaatggtaatgcgtatgacaatggcagcgaagtcactgccgttctaatggaggctcaacaaggtatcgaatctagttttgtttttcttgcgaatatcgtcgattcataaaaaagagaatagcggtaagtataaacacgaatactatggcaataattgcgaatgttttattctcttcgatatatttttgataatatgaaaaacatgtctctctcaaatcggacaaccatctcataaaatagttctcgcgcgctggagaggtagttgccgctcgtataatctctccagaataatatacttgcgtgtcgtcgttcaatttatacggatttctatagttctctgttatataatgcggttttccatcatgattagacgacgacaatagtgttctaaatttagatagttgatcagaatgaatgtttattggcgttggaaaaattatccatacagcgtctgcagagtggttgatagttgttcctagatatgtaaaataatccaacttactaggcagcaaattgtctagataaaatactgaatcaaacggtgcagacgtattggcggatctaatggaatccaattgattaactatcttttgaaaatatacatttttatgatccaatacttgtaagaatatagaaataatgataagtccatcatcgtgtttttttgcctcttcataagaactatattttttcttattccaatgaacaagattaatctctccagagtatttgtacacatctatcaagtgattggatccataatcgtcttcctttccccaatatatatgtagtgatgataacacatattcattggggagaaaccctccacttatatatcctcctttaaaattaatccttactagttttccagtgttctggatagtggttggtttcgactcattataatgtatgtctaacggcttcaatcgcgcgttagaaattgcttttttagtttctatattaataggagatagttgttgcggcatagtaaaaatgaaatgataactgtttaaaaatagctcttagtatgggaattacaatggatgaggaagtgatatttgaaactcctagagaattaatatctattaaacgaataaaagatattccaagatcaaaagacacgcatgtgtttgctgcgtgtataacaagtgacggatatccgttaataggagctagaagaacttcattcgcgttccaggcgatattatctcaacaaaattcagattctatctttagagtatccactaaactattacggtttatgtactacaatgaactaagagaaatctttagacggttgagaaaaggttctatcaacaatatcgatcctcactttgaagagttaatattattgggtggtaaactagataaaaaggaatctattaaagattgtttaagaagagaattaaaagaggaaagtgatgaacgtataacagtaaaagaatttggaaatgtaattctaaaacttacaacacgggataaattatttaataaagtatatataagttattgcatggcgtgttttattaatcaatcgttggaggatttatcgcatactagtatttacaatgtagaaattagaaagattaaatcattaaatgattgtattaacgacgataaatacgaatatctgtcttatatttataatatgctagttaatagtaaatgaacttttacagatctagtataattagtcagattattaagtataatagacgactagctaagtctattatttgcgaggatgactctcaaattattacactcacggcattcgttaaccaatgcctatggtgtcataaacgagtatccgtgtccgctattttattaactactgataacaaaatattagtatgtaacagacgagatagttttctctattctgaaataattagaactagaaacatgtttagaaagaaacgattatttctgaattattccaattatttgaacaaacaggaaagaagtatactatcgtcatttttttctctagatccagctactactgataatgatagaatagacgctatttatccgggtggcatacccaaaaggggtgagaatgttccagagtgtttatccagggaaattaaagaagaagttaatatagacaattcttttgtattcatagacactcggttttttattcatggcatcatagaagataccattattaataaattttttgaggtaatcttctttgtcggaagaatatctctaacgagtgatcaaatcattgatacatttaaaagtaatcatgaaatcaaggatctaatatttttagatccgaattcaggtaatggactccaatacgaaattgcaaaatatgctctagatactgcaaaacttaaatgttacggccatagaggatgttattatgaatcattaaaaaaattaactgaggatgattgattaaaaaatataaattaatttaccatcgtgtatttttataacgggattgtccggcatatcatgtagatagttaccgtctacatcgtatactcgaccatctacgcctttaaatcctctatttattgacattaatctattagaattggaataccaaatattagtaccctcaattagtttattggtaatattttttttagacgatagatcgatggctcttgaaaccaaggttttccaaccggactcattgtcgatcggtgagaagtctttttcattagcatgaatccattctaatgatgtatgtttaaacactctaaacaattggacaaattcttttgatttgctttgaatgatttcaaataggtcttcgtctacagtaggcataccattagataatctagccattataaagtgcacgtttacatatctacgttctggaggagtaagaacgtgactattgagacgaatggctcttcctactatctgacgaagagacgcctcgttccatgtcatatctaaaatgaagatatcattaattgagaaaaaactaataccctcgcctccactagaagagaatacgcatgttttaatgcattctccgttagtgtttgattcttggttaaactcagccaccgccttgattctagtatcttttgttctagatgagaactctatattagagataccaaagactttgaaatatagtaataagatttctattcctgactgattaacaaatggttcaaagactagacatttaccatgggatgctaatattcccaaacatacatctataaatttgacgcttttctcttttaattcagtaaatagagagatatcagccgcactagcatcccctttcaatagttctccctttttaaaggtatctaatgcggatttagaaaactctctatctcttaatgaatttttaaaatcattatatagtgttgctatctcttgcgcgtattcgcccggatcacgattttgtctttcaggaaagctatcgaacgtaaacgtagtagccatacgtctcagaattctaaatgatgatatacctgtttttatttcagcgagtttagccttttgataaatttcttcttgctttttcgacatattaacgtatcgcattaatactgttttcttagcgaatgatgcagacccttctacgtcatcaaaaatagaaaactcgttattaactatatacgaacatagtcctcctagtttggagactaattctttttcatcgactagacgtttattctcaaatagtgattggtgttgtaaggatcctggtcgtagtaagttaaccaacatggtgaattcttgcacactattgacgataggtgtagccgataaacaaatcatcttatggttttttaacgcaatggtcttagataaaaaattatatactgaacgagtaggacggatcttaccatcttctttgattaatgatttagaaatgaagttatgacattcatcaatgatgacgcatattctactcttggaattaatagttttgatattagtaaaaaatttatttctaaaattttgatcatcgtaattaataaaaatacaatccttcgttatctctggagcgtatctgagtatagtgttcatccaaggatcttctatcaaagcctttttcaccaataagataatagcccaattcgtataaatatccttaagatgtttgagaatatatacagtagtcattgttttaccgacacccgtttcatggaacaataaaagagaatgcatactgtctaatcctaagaaaactcttgctacaaaatgttgataatccttgaggcgtactacgtccgaccccatcatttcaacgggcatattagtagttctgcgtaaggcataatcgatataggccgcgtgtgatttactcatttatgagtgataagtaataactatgttttaaaaatcacagcagtagtttaactagtcttctctgatgtttgttttcgatactttttgaatcagaagtcatactagaataaagcaacgagtgaacgtaatagagagcttcgtatactctattcgaaaactctaagaacttattaatgaattccgtatccactggattgtttaaaatactaaattgaacactgttcacatccttccaagaagaagacttagtgacggacttaacatgagacataaataaatccaaattttttttacaaacatcactagccaccataatggcgctatctttcaaccagctatcgcttacgcattttagcagtctaacatttttaaagagactacaatatattctcatagtatcgattacacctctaccgaataaagttggaagtttaataatacaatatttttcgtttacaaaatcaaataatggtcgaaacacgtcgaaggttaacatcttataatcgctaatgtatagattgttttcagtgagatgattattagatttaatagcatctcgttcacgtttgaacagtttattgcgtgcgctgaggtcggcaactacggcgtccgctttagtactcctcccataatactttacgctattaatctttaaaatttcatagactttatctagatcgctttctggtaacatgatatcatgtgtaaaaagttttaacatgtcggtcggcattctatttagatcattaactctagaaatctgaagaaagtaattagctccgtattccagactaggtaatgggcttttacctagagacagattaagttctggcaatgtttcataaaatggaagaaggacatgcgttccctcccggatattttttacaatttcatccatttacaactctatagtttgttttcattattattagttattatctcccataatcttggtaatacttaccccttgatcgtaagataccttatacaggtcattacatacaactaccaattgtttttgtacataatagattggatggttgacatccatggtggaataaactactcgaacagatagtttatctttccccctagatacattagccgtaatagttgtcggcctaaagaatatctttggtgtaaagttaaaagttagggttcttgttccattattgctttttgtcagtagttcattataaattctcgagatgggtccgttctctgaatatagaacatcatttccaaatctaacttctagtctagaaataatatcggtcttattcttaaaatctattcccttgatgaagggatcgttaatgaacaaatccttggcctttgattcggctgatctattatctccgttatagacgttacgttgactagtccaaagacttacaggaatagatgtatcgatgatgttgatactatgtgatatgtgagcaaagattgttctcttagtggcatcactatatgttccagtaatggcggaaaactttttagaaatgttatatataaaagaattttttcgtgttccaaacattagcagattagtatgaagataaacactcatattatcaggaacattatcaatttttacatacacatcagcatcttgaatagaaacgataccatcttctggaacctctacgatctcggcagactccggataaccagtcggtgggccatcgctaacaataactagatcatccaacaatctactcacatatgcatctatataatctttttcatcttgtgagtaccctggatacgaaataaatttattatccgtatttccataataaggtttagtataaacagagagagatgttgccgcatgaacttcagttacagtcgccgttggttggtttatttgacctattactctcctaggtttctctataaacgatggtttaatttgtacattcttaaccatatatccaataaagctcaattcaggaacataaacaaattctttgttgaacgtttcaaagtcgaacgaagagtcacgaataacgatatcggatactggattgaaggttaccgttacggtaatttttgaatcggatagtttaagactgctgaatgtatcttccacatcaaacggagttttaatataaacgtatactgtagatggttctttaatagtgtcattaggagttaggccaatagaaatatcattaagttcactagaatatccagagtgtttcaaagcaattgtattattgatacaattattatataattcttcgccctcaatttcccaaataacaccgttacacgaagagatagatacgtgattaatacatttatatccaacatatggtacgtaactgaatcttcccatacctttaacttctggaagttccaaactcagaaccaaatgattaagcgcagtaatatactgatccctaatttcgaagctagcgatagcctgattgtctggaccatcgtttgtcataactccggatagagaaatatattgcggcatatacaaagttggaatttgactatcgactgcgaagacattagaccgtttaatagagtcatccccaccgatcaaagaattaatgatagtattattcattttctatttaaaatggaaaaagcttacaataaactccgtagagaaatatctataatttgtgagttttccttaaagtaacagcttccgtaaacgccgtctttatctcttagtaggtttattgtatttatgaccttttccttatcttcatagaatactaaaggcaacaaagaaatttttggttcttctctaagagctacgtgagacttaaccatagacgccaacgaatccctacatattttagaacagaaatacccaacttcaccacccttgaatgtctcaatactaataggtttaaaaaccaaatcttgattacaaaaccaacacttatcaattacactatttgtcttaatagacacatctgccatagatttataatactttggtagtatacaagcgagtgcttcttctttagcgggcttaaagactgctttaggtgctgaaataaccacatctggaaggcttactcgcttagccatttaattacggaactatttttttatacttctaatgagcaagtagaaaacctctcatctacaaaaacgtactcgtgtccataatcctctaccatagttacacgttttttagatctcatatgtgctaaaaagttttcccatactaattggttactattatttttcgtataatttttaacagtttgaggttttagatttttagttacagaagtgatatcgaatattttatccaaaaagaatgaataattaattgtcttagaaggagtgttttcttggcaaaagaataccaagtgcttaaatatttctactacttcattaatcttttctgtactcagattcagtttctcatcttttacttgattgattatttcaaagactaacttataatcctttttatttattctctcgttagccttaagaaaactagatacaaaatttgcatctacatcatccgtggatatttgatttttttccatgatatccaagagttccgagataatttctccagaacattgatgagacaataatctccgcaatacatttctcaaatgaataagtttattagacacatggaagtttgactttttttgtacctttgtacatttttgaaataccgactcgcaaaaaatacaatattcatatccttgttcagatactataccgttatgtctacaaccgctacataatcgtagattcatgttaacactctacgtatctcgtcgtccaatattttatataaaaacattttatttctagacgttgccagaaaatcctgtaatatttttagttttttgggctgtgaataaagtatcgccctaatattgttaccgtcttccgccaatatagtagttaaattatccgcacatgcagaagaacaccgcttaggcggattcagtacaatgttatatttttcgtaccaactcatttaaatatcataatctaaaatagttctgtaatatgtctagcgctaatatattgatcataatcctgtgcataaattaagatacaacaatgtctcgaaatcatcgacatggcttcttccatagttagaagatcgtcgtcaaagttagcaacgtgattcatcaacatttgctgttttgaggcagcaaatactgaaccgtcgccattcaaccattcataaaaaccatcgtctgaatccattgataatttcttgtactggtttttgagagctcgcatcaatctagcatttctagctcccggattgaaaacagaaagaggatcgtacatccagggtccattttctgtaaatagaatcgtataatgtcccttcaagaagatatcagacgatccacaatcaaagaattggtctccgagtttgtaacaaactgcggactttaacctatacatgataccgtttagcataatttctggtgatacgtcaatcggagtatcatctattagagatctaaagccggtgtaacattctccaccaaacatattcttattctgacgtcgttctacataaaacatcattgctccattaacgataacaggggaatgaacagcactacccatcacattagttcccaatggatcaatgtgtgtaactccagaacatcttccatagcctatgttaggaggagcgaacaccactcttccactattgccatcgaatgccatagaataaatatccttggaattgatagaaatcggactgtcggatgttgtgatcatcttcataggattaacaactatgtatggtgccgcctgaagtttcatatcgtaactgatgccgtttataggtctagccacagaaaccaacgtaggtctaaatccaactatagacaaaatagaagccaatatctgttcctcatctgtcataacttgagagcatccagtatgaataatcttcattagatggggatctaccgcatcatcatcgttacaataaaaaattcccattctaatgttcataattgcttttctaatcatggtatgcatgtttgctctctgaatctctgtggaaattagatctgatacacctgtaatcactatcggattatcctccgtaagacgattaaccaacaacatataattataagactttacttttctaaattcataaagttgctggattaggctataggtgtctccatgtacatacgcgttctcgagcgcaggaagtttaataccgaatagtgccatcagaataggatgaatatagtaattagtttctggttttctataaataaaagacaaatcttgtgaactagacatatcggtaaaatgcatggattggaatcgtgtagtcgacagaagaatatgatgattagatggagagtatattttatctaactctttgagttggtcaccgattctaggactagctcgagaatgaataagtactaaaggatgagtacatttcacagaaacactagcattgttcaatgtgctctttacatgggtaaggagttgaaatagctcgtttctatttgttctgacaatatttagtttattcataatgttaagcatatcctgaatagtaaagttagatgtgtcatacttgttagtagttagatatttagcaattgcattcccatcatttctcaatctcgtactccaatcatgtgtagatgctacttcatctatagaaaccatacaatcctttttgataggctgttgagattgattatttcctgcacgtttaggtttggtacgttgatttctagcccctgcggatataaagtcatcgtctacaatttgggacaatgaattgcatacactacaagacaaagatttatcagaagtgtgaatatgatcttcatctaccaaagaaagagtttgattagtataactagattttagtcctgcgttagatgttaaaaaaacatcgctattgaccacggcttccattatttatattcgtagtttttactcgaaagcgtgattttaatatccaatcttattacttttggaatcgttcaaaacctttgactaattgtagaatttgatctattgccctacgcgtatactcccttgcatcatatacgttcgtcaccagatcgtttgtttcggcctgaagttggtgcatatctttttcaacactcgacatgagatccttaagggccatatcgtctagattttgttgagatgctgctcctggatttggattttgttgtgctgttgtacatactgtaccaccagtaggtgtaggagtacatacagtggccacaataggaggttgaggaggtgtaaccgttggagtagtacaagaaatacttccatccgattgttgtgtacatgtagttgttggtaacgtctgagaaggttgggtagatggcggtgtcgtcgtcttttgatctttattaaatttagagataatatcctgaacagcattgctcggcgtcaacgctggaaggagtgaactcgccggcgcatcagtatcttcagacagccaatcaaaaagattagacatatcagatgatgtattagtttgttgtcgtggttttggtgtaggagcagtactactaggtagaagaataggagccgatgtagctgttggaaccggctgtggagttatatgaatagttggttgtagcggttggataggctgtctgctggcggccatcatattatctctagctagttgttctcgcaactgtctttgataatacgactcttgagactttagtcctatttcaatcgcttcatcctttttcgtatccggatccttttcttcagaataatagattgacgactttggtgtagaggattctgccagcctctgtgagaacttgttaaagaagtccatttaaggctttaaaattgaattgcgattataagattaaatggcagacacagacgatattatcgactatgaatccgatgatctcaccgaatacgaggatgatgaagaagaggaagaagatggagagtcactagaaactagtgatatagatcccaaatcttcttataagattgtagaatcagcatccactcatatagaagatgcgcattccaatcttaaacatatagggaatcatatatctgctcttaaacgacgctatactagacgtataagtctatttgaaatagcgggtataatagcagaaagctataacttgcttcaacgaggaagattacctctagtttcagaattttctgacgaaacgatgaagcaaaatatgctacatgtaattatacaagagatagaggagggttcttgtcctatagtcatcgaaaagaacggagaattgttgtcggtaaacgattttgacaaagatggtctaaaattccatctagactatattatcaaaatttggaaacttcaaaaacgatattagaatttatacgaatatcgttctctaaatgtcacaatcaagtctcgcatgttcagcaatttattgtcgtactttatatcgtgttcattaacgatatcttgcaaaatagtaatgattctatcttccttcgatagatattcttcagagattattgtcttatattctttcttgttatcagatatgaatttgataagactttgaacattattgatacccgtctgtttaattttttctacagatattttagttttggcagattctatcgtatctgtcaatagacatccaacatcgacattcgacgtcaattgtctataaatcaacgtataaattttagaaataacattagcgaattgttgtgcattgatgtcgttattctgaaacagtatgattttaggtagcattttcttaacaaagagaacgtatttattgttactcagttgaacagatgatatatccagattactaacgcatctgattccgtataccaaactttcagaagaaatggtgtacaattgtttgtattcattcaatgtctctttttcagaaattagtttagagtcgaatactgcaataattttcaagagatagttttcatcagataagattttatttagtgtagatatgataaaactattgttttgttggagaacttgatacgccgcgttctctgtagtcgacgctctcaaatgggaaacaatctccattatttttttggaatcggatactatatcttcggtatcttgacgcagtctagtatacatagagttaagagagattagagtttgtacattaagcaacatgtctctaaatgtggctacaaacttttcctttttcacatcatctagtttattatataccgatttcacaacggcaccagatttaaggaaccagaatgaaaaactctgataactacaatatttcatcatagttacgattttatcatcttctatagttggtgtaatagcgcatacctttttctccaagactggaaccaacgtcataaaaatgtttaaatcaaaatccatatcaacatctgatgcgctaagaccagtctcgcgttcaagattatctttactaatggtgacgaactcatcgtatagaactctaagtttgtccattatttatttacagatttagttgtttaatttatttgtgctcttccagagttgggatagtatttttctaacgtcggtattatattattaggatctacgttcatatgtatcataatattaatcatccacgttttgataaatctatctttagcttctgaaataacgtatttaaacaaaggagaaaaatatttagctacggcatcagacgcaataacattttttgtaaatgtaacgtatttagacgacagatcttcgttaaaaagttttccatctatgtagaatccatcggttgttaacaccattcccgcgtcagattgaataggagtttgaatagtttgttttggaaatagatccttcaataacttatagttgggtgggaaaaaatcgattttatcactagactctttcttttttactatcattacctcatgaactatttcttgaatgagtatatgtattttctttcctatatcggacgcgttcattggaaaatataccatgtcgttaactataagaatatttttatcctcgtttacaaactgaataatatcagatgtagttcgtaaacgaactatatcatcaccagcacaacatctaactatatgatatccactagtttcctttagccgtttattatcttgttccatattagcagtcattccatcatttaagaaggcgtcaaaaataatagggagaaatgacattttggattctgttacaactttaccaaaattaaggatatacggacttactatctttttctcaacgtcgatttgatgaacacacgatgaaaatgtgcttctatgagattgatcatgtagaaaacaacaagggatacaatattttcgcatatcatgaaatatattaagaaatcccaccttattatatttccccaaaggatccatgcacgtaaacattatgccgttatcattaataaagacttctttctcatcggatctgtaaaagttgttactgatttttttcattccaggatctagataattaataatgatgggttttctattcttattctttgtattttggcatatcctagaccagtaaacagtttccactttggtaaaatcagcagacttttgaacgctattaaacatggcattaatggcaataactaaaaatgtaaaatatttttctatgttaggaatatggtttttcactttaatagatatatggtttttggccaaaatgatagatatttttttatccgaggatagtaaaatattattagtcgccgtctctataaaaatgaagctagtctcgatatccaattttattctagaattgataggagtcgccaaatgtaccttatacgttatatctcccttgatgcgttccatttgtgtatctatatcggacacaagatctgtaaatagttttacgttattaatcatcacggtatcgccgtcgctagataacgctaatgtaccatccaagtcccaaatggagagatttaactgttcatcgtttagaataaaatgattaccggtcatattaataaagtgttcatcgtatctagataacaacgacttataattaatgtccaagtcttgaactcgctgaatgatcttttttaacccagttagttttagattggtacgaaatatattgttaaactttgattctacagtaatgtccaaatctagttgtggaaatacttccatcaacattgtttcaaacttgataatattattatctacatcttcgtacgatccaaattccggaatagatgtatcgcacgctcttgccacccagataaccaaaaagtcacacgctccaggatatacattgtataaaaagctatcgttttttagtagtgtttttttctgcgtgtatacgaagggattaaaaatagtattatcaacgtaactatattccaaattattcttatgagaatagataataatatcgtccttaatatctaacaaatttcctaaatatccctttaattgagtcattcgaagcgtcaatagaatatgtctcttaactatttccggctgttgtatatttaaatgacttcgtaaaaaataatatatgggcgacttctcatctatgtaatcatatggagtgagatatagggctcgttctacctcctgccccttacccacctgtaataccaattgcggacttactatatatcgcatatttatatcgtggggtaaagtgaaaatctactaccgatgatgtaagtcttacaatgttcgaaccagtaccagatcttaatttggaggcctccgtagaactaggggaggtaaatatagatcaaacaacacctatgataaaggaaaatagcggttttatatcccgcagtagacgtctattcgcccatagatctaaggatgatgagagaaaactagcactacgattctttttacaaagactttattttttagatcatagagagattcattatttgttcagatgcgttgacgctgtaaaagacgtcactattaccaaaaaaaataacattatcgtggcgccttatatagcacttttaactatcgcatcaaaaggatgcaaacttacagaaacaatgattgaagcattctttccagaactatataatgaacatagtaagaaatttaaattcaactctcaagtatccatcatccaagaaaaactcggataccagtttggaaactatcacgtttatgattttgaaccgtattactctacagtagctctggctattcgagatgaacattcatctggcatttttaatatccgtcaagagagttatctggtaagttcattatctgaaataacatatagattttatctaattaatctaaaatctgatcttgttcaatggagtgctagtacgggcgctgtaattaatcaaatggtaaatactgtattgattacagtgtatgaaaagttacaactggtcatagaaaatgattcacaatttacatgttcattggctgtggaatcaaaacttccaataaaattacttaaagatagaaatgaattatttacaaaattcattaacgagttaaaaaagaccagttcattcaagataagcaaacgcgataaggatacgctattaaaatattttacttaggactggagttagaatttatagacgactcatttcgtttatcattgttactattattactattactatcattattagtgttggcattattagtattcttcttgtcatcttgttcagaaatatacagcaatgctatacctaatactaaatacattatcatgctcgcaatggctctaacaacaacgaaccaaaatgaatttggtcgtagcttttgttcacaaaaatacataaagaaatgtctacataaatctatggcgccattggctacttgaaatagcgccagtcctcctacagattttaatatagctgtataacatgacatttattcatcatcaaaagagacagagtcaccatctgtcatatttagattttttttcatgtgttcaaagtatcctctactcatttcattataatagtttatcatacttagaattttaggacggatcaatgagtaagacttgactagatcgtcagtagtaatttgtgcatcgtctattctgcatccgcttcgtcgaataatgtatagcatcgctttgagattctccatagctatcaagtctttatacaatgacatggaaatatctgtgaatactttatacttctccaacatcgatgccttaacatcatcgcctactttagcattgaaaatacgttctattgtgtagatggatgtagcaagatttttaaacaacaatgccatcttacacgatgattgcctcaagtctccaatcgtttgtttagaacgattagctacagagtccaatgcttggctgactagcatattattatctttagaaattgtattcttcaatgaggcgtttatcatatctgtgatttcgttagtcatattacagtctgactgggttgtaatgttatccaacatatcacctatggatacggtacacgtaccagcatttgtaataatcctatctaagatgttgtatggcattgcgcagaaaatatcttctcctgtaatatctccactctcgataaatctactcagattattcttaaatgccttattctctggagaaaagatatcagtgtccatcatttcattaatagtatacgcagaaaagataccacgagtatcaattctatccaagatacttatcggttccgagtcacagataatggtttcctctccttcgggagatcctgcatagaaatatctaggacaatagtttctatactgtctgtaactctgataatctctaaagtcactaactgataccatgaaattgagaagatcaaacgctgaagtaattaatttttctgcctcgtttttactacaactagttttcatcaatgtagtgacgatgtattgtttagttacttttggtctaatactgatgatagagatattattgcttcccataatggatcttctagtagtcaccttaaagcccattgatgcgaatagcagatagataaagtcttggtatgactcctttctaatatagtacggactacctttgtcacccaactttatacccacataagccataacaacctctttaatagccgtttcatgaggtttatcagccatgagcctgagtagttggaagaatctcatgaatcccgtctcagaaagtcctatatgcatgatagatttatctttcctgggaaactctcgtatagtcatagatgaaatactctttaaagtttctgaaataagattagtaacagtcttacctccgactactctaggtaacaaacaaactctaataggtgttttctctgcggagataatatcagaaaggatagagcaataagtagtattattgtgattataaagaccgaatacataacaggtagaatttataaacatcatgtcctgaaggtttttagacttgtattcctcgtaatccataccgtcccaaaacatggatttggtaactttgatagccgtagatctttgttccttcgccaacaggttaaagaaattaataaagaatttgttgtttctatttatgtccacaaattgcacgtttggaagcgccacggttacattcactgcagcattttgaggatcgcgagtatgaagtacgatgttattgtttactggtatatctggaaagaaatctaccagtctaggaataagagattgatatcgcatagaaatagtaaagtttataatctcatcatcgaagagcattttgttaccattgtaataaatatccactctgtcatatgtataaatgaagtactgttcaaacatgatgagatgtttatatgttggcatagtagtgagatcgacgtttggtaatggcaatgtattaagattaactccataatgtctagcagcatctgcgatgttataagcgtcgtcaaagcggggtcgatcttgtattgttatatattgtctaacacctataagattatcaaaatcttgtctgcttaatacaccgttaacaatttttgccttgaattcttttattggtgcattaataacatccttatagaggatgttaaacaaataagtgttatcaaagttaagatctggatatttcttttctgctagaacatccattgagtcggagccatctggtttaatataaccaccgataaatctagctctgtattctgtatccgtcaatctaatattaagaaggtgttgagtgaaaggtggaagatcgtaaaagctgtgagtattaatgataggattagtttccgaactaatgttaattggggtattaataatatctatatttccagcgttaagtgtaacattaaacagttttaattcacgtgacgtggtatcaattaaataattaatgcccaatttggatatagcagcctgaagctcatcttgtttagttacggatcctaatgagttattaagcaatatatcgaacggatgaacgaaggttgttttaagttggtcacatactttgtaatctagacatagatgcggaagaacggtagaaactatacgaaataaatattcagagtcctctaattgatcaagagtaactattgacttaataggcatcatttatttagtattaaatgacgaccgtaccagtgacggatatacaaaacgatttaattacagagttttcagaagataattatccatctaacaaaaattatgaaataactcttcgtcaaatgtctattctaactcacgttaacaacgtggtagatagagaacataatgccgccgtagtgtcatctccagaggaaatatcctcacaacttaatgaagatctatttccagatgatgattcaccggccactattatcgaacgagtacaacctcatactactattattgacgatactccacctcctacgtttcgtagagagttattgatatcggaacaacgtcaacaacgagaaaaaagatttaatattacagtatcgaaaaatgctgaagcaataatggaatctagatctatgataacttctatgccaacacaaacaccatccttgggagtagtttatgataaagataaaagaattcagatgttagaggatgaagtggttaatcttagaaatcaacgatctaatacaaaatcatctgataatttagataattttaccaaaatactatttggtaagactccgtataaatcaacagaagttaataagcgtatagccatcgttaattatgcaaatttgaacgggtctcccttatcagtcgaggacttggatgtttgttcggaggatgaaatagatagaatctataaaacgattaaacaatatcacgaaagtagaaaacgaaaaattatcgtcactaacgtgattattattgtcataaacattatcgagcaggcattgctaaaactcggatttgaagaaatcaaaggactgagtaccgatatcacttcagaaattatcgatgtggagatcggagatgactgcgatgctgtagcatcaaaactaggaatcggtaacagtccggttcttaatattgtattgtttatactcaagatattcgttaaacgaattaaaattatttaatttaatacattcccatatccagacaacaatcgtctggattaatctgttcctgtcgtctcataccggacgacatattaatctttttattagtgggcatctttttagatggtttctttttcccagcattaactgattcgatacctagaagatcgtgattgatctctccgaccattccacgaacttctaattggccgtctctgacggtaccataaactattttaccagcattagtaacagcttggacaatctgaccatccatcgcattgtacgatgtagtagtaactgttgttctacgtctaggagcaccagaagtatttttggagcccttggaggctgatgtagaagaagacgaggattttgattttggtttacatgtaatacattttgaactctttgattttgtatcacatgcgccggcagtcacatctgtttgagaattaagattattgttgcctcctttgacggctgcatctccaccgatttgcgctagtagatttttaagctgtggtgtaatcttattaactgtttcgatataatcatcgtaactgcttctaacggctaaattttttttatccgccatttagaagctaaaaatatttttatttatgcagaagatttaactagattatacaatgaactaatatgatccttttccagattatttacaaacttggtattttttggttctggaggaggcgaatttaaattcggacttggattcggattttgtaagttcttgatcttattatacatcgagtataggatggcgacagtaactgctacacaaataccgatcaaaagaagaataccaatcatttattgacaataacttcactattgatcaagtatgcaatatatcatcttttcactaaataagtagtaataatgattcaacaatgtcgagatatatggacgataataatttagttcatggaaatatcgctatgattggtgtgaatgactccgctaactctgtggggtgcgcagtgctttccccacatagaataaattagcattccgactgtgataataataccaagtataaacgccataatactcaatactttccatgtacgagtgggactggtagacttactaaagtcaataaaggcgaagatacacgaaagaatcaaaagaatgattccagcgattagcacgccggaaaaataatttccaatcataagcatcatgtccatttaactaataaaaattttaaatcgccgaatgaacaaagtggaatataaaccatataaaaacaatagtttgtactgcaaaaataatatctatttttgttttcgaagatatggtaaaattaaatagtagtacacagcatgttataactaacagcagcaacggctcgtaattacttatcatttactagacgaaaaggtggtgggatattttcttgctcaaataatacgaatatatcacccatccattttatgcgatgtttatatactctaatctttaatagatctatagacgacgggtttaccaacaatatagattttatcgattcatctaatttaaacccttccttaaacgtgaatgatctattatctggcataacgatgaccctacctgatgaatcggacaatgtactgggccatgtagaataaattatcaacgaattatcgtctacgaacatttatatcatttgttttaattttaggacgcgaataaatggatataaaatagaaaataacagatattacaaccagtgttatggccgcgcccaaccaggtaggcagttttattttatcttttactacaggttctcctggatgtacgtcaccaacggcggacgtagttctagtacaattagacgtaagttccgcttgggaattttttaacgctaaagagttaacgttaatcgtgcacccaacgtatttacatctagttcgttgaacatcttgattataatataaccattttctatctctagattcgtcagtgcactcatgtaaccaacataccctaggtcctaaatatttatctccggaattagattttggataattcgcgcaccaacaatttctatttcctttatgatcgttacaaaagacgtataatgccgtatccccaaaagtaaaataatcaggacgaataattctaataaactcagaacaatatctcgcatccatatgtttggagcaaatatcggaataagtagacatagccggtttccgttttgcacgtaaccattctaaacaattggggtttccaggatcgtttctacaaaatccagtcatgaaatcgtcacaatgttctgtcttgtaattattattaaatatttttggacagtgtttggtatttgtcttagaacaacattttgccacgctatcactatcgcccaggagataatccttttttataaaatgacatcgttgcccggatgctatataatcagtagcgtgttttaaatccttaatatattcaggagttacctcgttctgataatagattaatgatccaggacgaaatttgaaagaactacatggttctccatgaattaatacatattgtttagcaaattcaggaactataaaactactacaatgatctatcgacataccatctatcaaacaaaacttgggtttaatttctcccggagatgtttcataatagtacgtataactttcttctgcaaacttaacagctctattatattcaggataattaaaacctaattccatatatttgtctcgtatatctgctattcctggtgctattttgattctattaagagtaacagctgcccccattcttaataatcgtcagtatttaaactgttaaatgttggtatatcaacatctaccttatttcccgcagtataaggtttgttgcaggtatactgttcaggaatggttacatttatacttcttctatagtcctgtctttcgatgttcatcacatatgcaaagaacagaataaacaaaataatgtaagaaataatattaaatatctgtgaattcgtaaatacattgattgccataataattacagcagctacaatacacacaatagacattcccacagtgttgccattacctccacgatacatttgagttactaagcaataggtaataactaagctagtaagaggcaatagaaaagatgagataaatatcatcaatatagagattagaggagggctatatagagccaagacgaacaaaatcaaaccgagtaacgttctaacatcattatttttgaagattcccaaataatcattcattcctccataatcgttttgcatcatacctccatctttaggcataaacgattgctgctgttcctctgtaaataaatctttatcaagcactccagcacccgcagagaagtcgtcaagcatattgtaatatcttaaataactcatttatatattaaaaaatgtcactattaaagatggagtataatctttatgccgaactaaaaaaaatgacttgtggtcaacccctaagtctttttaacgaagacggggatttcgtagaagttgaaccgggatcatcctttaagtttctgatacctaagggattttacgcctctccttccgtaaagacgagtctagtattcgagacattaacaacgaccgataataaaatcactagtatcaatccaacaaatgcgccaaagttatatcctcttcaacgcaaagtcgtatctgaagtagtttctaatatgaggaaaatgatcgaatcaaaacgtcctctatacattactcttcacttggcgtgtggatttggtaagactattaccacgtgttatcttatggctacacacggtagaaaaaccgtcatttgcgtacccaataaaatgttaatacatcaatggaagacacaggtagaggcagtcggattggaacataagatatccatagatggagtaagtagtctattaaaggaactaaagactcaaagtccggatgtattaatagtagtcagtagacatctgacaaacgatgccttttgtaaatatatcaataagcattatgatttgttcatcttggatgaatcacatacgtataatctgatgaacaatacagcagttacaagatttttagcgtattatcctccgatgatgtgttattttttaactgctacacctagaccatctaaccgaatttattgtaacagtattattaatattgccaagttatccaatctaaaaaaaactatctatgcagtagatagtttttttgagccatattccacagataatattagacatatggtaaaacgactagatggaccatctaataaatatcatatatataccgagaagttattatctgtagacgagcctagaaatcaacttattcttgataccctggtagaagaattcaagtcaggaactattaatcgcattttagttattactaaactacgtgaacatatggtattattctacaaacgattattagattttttcggaccagaggttgtatttataggagacgcccaaaatagacgtactccagatatggtcaaatcaatcaaggaactaaatagatttatattcgtatccaccttattttattccggtactggtttagatattcctagtttggattcgttgttcatttgctcggcagtaatcaacaatatgcaaatagagcaattactagggagggtatgtcgagaaacagaactattagataggacggtatatgtatttcctaacacatccatcaaagaaataaagtacatgataggaaatttcatgcaacgaattattagtctgtctgtagataaactaggatttaaacaaaaaagttatcggaaacatcaagaatccgatcccacttctgcatgtacaacatcatccagagaagaacgtgtattaaatagaatatttaactcgcaaaatcgttaagaagtttaagcgacgatccgcatgctgcgcaggccagtgtattacccctcatagtattaatataatccaatgatacttttgtgatgtcggaaatcttaaccaatttagactgacaggcagaacacgtcatgcaatcatcatcgtcatcgataactgtagtcttgggcttctttttgcgactcttcattccggaacgcacattggtgctatccatttaggtagtaaaaaataagtcagaatatgccctataacacgatcgtgcaaaacctggtatatcgtctctatctttatcacaatatagtgtatcgacatttttattattattgacctcgtttatcttggaacatggaatgggaacatttttgttatcaacggccatctttgccttaattccagatgttgtaaaattataactaaacagtctatcatcgacacaaatgaaattcttgtttagacgtttgtagtttacgtatgcggctcgttcgcgtctcattttttcagatattgcaggtactataatattaaaaataagaatgaaataacataggattaaaaataaagttatcatgacttctagcgctgatttaactaacttaaaagaattacttagtctgtacaaaagtttgagattttcagattctgcggctatagaaaagtataattctttggtagaatggggaacatctacttactggaaaataggcgtgcaaaaggtagctaatgtcgagacgtcaatatctgattattatgatgaggtaaaaaataaaccgtttaatattgatccgggctattacattttcttaccggtatattttgggagcgtctttatttattcgaagggtaaaaatatggtagaacttggatctggaaactcttttcaaataccagatgatatgcgaagtgcgtgtaacaaagtattagacagcgataacggaatagactttctgagatttgttttgttaaacaatagatggataatggaagatgctatatcaaaatatcagtctccagttaatatatttaaactagctagtgagtacggattaaacatacccaaatatttagaaattgaaatagaggaagacacattatttgacgacgagttatactctattatagaacgctctttcgatgataaatttccaaaaatatccatatcgtatattaagttgggagaacttagacggcaagttgtagactttttcaaattctcattcatgtatattgagtccatcaaggtagatcgtataggagataatatttttattcctagcgttataacaaaatcaggaaaaaagatattagtaaaagatgtagaccatttaatacgatccaaggttagagaacatacatttgtaaaagtaaaaaagaaaaacacattttccattttatacgactatgatggaaacggaacagaaactagaggagaagtaataaaacgaattatagacactataggacgagactattatgttaacggaaagtatttctctaaggttggtagtgcaggcttaaagcaattgactaataaattagatattaatgagtgcgcaactgtcgatgagttagttgatgagattaataaatccggaactgtaaaacgaaaaataaaaaaccaatcagcatttgatttaagcagagaatgtttgggatatccagaagcggattttataacgttagttaataacatgcggttcaaaatagaaaattgtaaggttgtaaatttcaatattgaaaatactaattgtttaaataacccgagtattgaaactatatatggaaactttaaccagttcgtctcaatctttaatgtcgtcaccgatgtcaaaaaaagattattcgagtgaaataatatgcgcctttgatataggtgcaaaaaatcctgccagaactgttttagaagtcaaggataactccgttagggtattggatatatcaaaattagactggagttctgattgggaaaggcgcatagctaaagatttgtcacaatatgaatacactacagttcttctagaacgtcagcctagaaggtcgccgtatgttaaatttatctattttattaaaggctttttatatcatacatcggctgccaaagttatttgcgtctcgcctgtcatgtctggtaattcatatagagatcgaaaaaagagatcggtcgaagcatttcttgattggatggacacattcggattgcgagactccgttccggatagacgcaaattagacgatgtagcggatagtttcaatttggctatgagatacgtattagataaatggaatactaattatacaccttataataggtgtaaatctagaaattacataaaaaaaatgtaataacgttagtaacgccattatggataatctatttacctttctacatgaaatagaagatagatatgccagaactatttttaactttcatctaataagttgcgatgaaataggagatatatatggtcttatgaaagaacgcatttcctcagaggatatgtttgataatatagtgtataataaagatatacatcctgccattaagaaactagtgtattgcgacatccaacttactaaacacattattaatcagaatacgtatccggtatttaacgattcttcacaagtgaaatgttgtcattatttcgacataaactcagataatagcaatattagctctcgtacagtagagatatttgagagggaaaagtcatctcttgtatcatatattaaaactaccaataagaagagaaaggtcaattacggcgaaataaagaaaactgttcatggaggcactaatgcaaattacttttccggtaaaaagtctgacgagtatctgagtactacagttagatccaacattaatcaaccttggatcaaaaccatctctaagaggatgagagttgatatcattaatcactctatagtaacgcgtggaaaaagctctatattacaaactatagaaattatttttactaatagaacatgtgtgaaaatattcaaggattctactatgcacattattctatccaaggacaaggatgaaaaggggtgtatacacatgattgacaaattattctatgtctattataatttatttctgttgttcgaagatatcatccaaaacgagtactttaaagaagtagctaatgttgtaaaccacgtactcacggctacggcattagatgagaaattattcctaattaagaaaatggctgaacacgatgtttatggagttagcaatttcaaaatagggatgtttaacctgacatttattaagtcgttggatcataccgttttcccctctctgttagatgaggatagcaaaataaagttttttaaggggaaaaagctcaatattgtagcattacgatctctggaggattgtataaattacgtgactaaatccgagaatatgatagaaatgatgaaggaaagatcgactattttaaatagcatagatatagaaacggaatcggtagatcgtctaaaagaattgcttctaaaatgaaaaaaaacactaattcagaaatggatcaacgactagggtataagtttttggtgcctgatcctaaagccggagttttttatagaccgttacatttccaatatgtatcgtattctaattttatattgcatcgattgcatgaaatcttgaccgtcaagcggccaatcttatcgtttaagaataatacagaacgaattatgatagaaattagcaatgttaaagtgactcctccagattactcacctataatcgcgagtattaaaggtaagagttatgacgcattagccacgttcactgtaaatatctttaaagaggtaatgaccaaagagggtatatccatcactaaaataagtagttatgagggaaaagattctcatttgataaaaattccgctactaataggatacgggaataaaaatccacttgatacagccaagtatcttgttcctaatgtcataggtggagtctttatcaataaacaatctgtcgaaaaagtaggaattaatctagtagaaaagattacaacatggccaaaatttagggttgttaagccaaactcattcactttctcgttttcctccgtatcccctcctaatgtattaccgacaagatatcgccattacaagatatctctggatatatcacaattggaagcgttgaatatatcatcgacaaagacatttataacggtcaatattgttttgctgtctcaatatttatctagagtgagtctagaattcattagacgtagtttatcatacgatatgcctccagaagttgtctatctagtaaacgcgataatagatagtgctaaacgaattactgaatctattactgactttaatattgatacatacattaatgacctggtggaagctgaacacattaaacaaaaatctcagttaacgattaacgagttcaaatatgaaatgctgcataactttttacctcatatgaactatacacccgatcaactaaagggattttatatgatatctttactaagaaagtttctctactgtatcttccacacttctagatatccagatagagattcgatggtttgtcatcgcatcctaacgtacggcaaatattttgagacgttggcacatgatgaattagagaattacataggcaacatccgaaacgatatcatgaacaatcacaagaacagaggcacttacgcggtaaacattcatgtactaacaactcccggacttaatcacgcgttttctagcttattgagtggaaagttcaaaaagtcagacggtagttatcgaacacatcctcactattcatggatgcagaatatttctattcctaggagtgttggattttatccggatcaagtaaagatttcaaagatgttttctgtcagaaaataccatccaagtcaatatctttacttttgttcatcagacgttccggaaagaggtcctcaggtaggtttagtatctcaattgtctgtcttgagttccattacaaatatactaacgtctgagtatttggatttggaaaagaaaatttgtgagtatatcagatcatattataaagatgatataagttactttgaaacaggatttccaatcactatagaaaatgctctagtcgcatctcttaatccaaatatgatatgtgattttgtaactgactttagacgtagaaaacggatgggattcttcggtaacttggaggtaggtattactttagttagggatcacatgaatgaaattcgcattaatattggagcgggaagattagtcagaccattcttggttgtggataacggagagctcatgatggatgtgtgtccggagttagaaagcagattagacgacatgacattctctgacattcagaaagagtttccgcatgtcatcgaaatggtagatatagaacaatttacttttagtaacgtatgtgaatcggttcaaaaatttagaatgatgtcaaaggatgaaagaaagcaatacgatttatgtgactttcctgccgaatttagagatggatatgtagcatcttcactagtgggaatcaatcacaattctggacccagagctattcttggatgtgctcaagctaaacaagctatctcttgtctgagttcggatatacgaaataaaatagacaatggaattcatttgatgtatccagagaggccaatcgtgattagtaaggctttagaaacttcaaagattgcggctaattgcttcggccaacatgttactatagcattaatgtcgtacaaaggtatcaatcaagaggatggaattatcatcaaaaaacaatttattcagagaggcggtctcgatattgttacagccaagaaacatcaagtagaaattccattggaaaactttaataacaaagaaagagataggtctaacgcctattcaaaattagaaagtaatggattagttagactgaatgctttcttggaatccggagacgctatggcacgaaatatctcatcaagaactcttgaagatgattttgctagagataatcagattagcttcgatgtttccgagaaatataccgatatgtacaaatctcgcgttgaacgagtacaagtagaacttactgacaaagttaaggtacgagtattaaccatgaaagaaagaagacccattctaggagacaaatttaccactagaacgagtcaaaagggaacagtcgcgtatgtcgcggatgaaacggaacttccatacgacgaaaatggtatcacaccagatgtcattattaattctacatccatcttctctagaaaaactatatctatgttgatagaagttattttaacagccgcatattctgctaagccgtacaacaataagggagaaaaccgacctgtctgttttcctagtagtaacgaaacatccatcgatacatatatgcaattcgctaaacaatgttatgagcattcaaatccgaaattgtccgatgaagaattatcggataaaatcttttgtgaaaagattctctatgatcctgaaacggataagccttatgcatccaaagtattttttggaccaatttattacttgcgtctgaggcatttaactcaggacaaggcaaccgttagatgtagaggtaaaaagacgaagctcattagacaggcgaatgagggacgaaaacgtggaggaggtatcaagttcggagaaatggagagagactgtttaatagcgcatggtgcagccaatactattacagaagttttgaaagattcggaagaagattatcaagatgtgtatgtttgtgaaaattgtggagacatagcagcacaaatcaagggtattaatacatgtcttagatgttcaaaacttaatctctctcctctcttaacaaaaattgataccacgcacgtatctaaagtatttcttactcaaatgaacgccagaggcgtaaaagtcaaattagatttcgaacgaaggcctccttcgttttataaaccattagataaagttgatctcaagccgtcttttctggtgtaatattctagtttggtagtagatacatatcaatatcatcaaattcgagatccgaattataaaatgggcgtggattgttaactatagaatcggacgtctgatattcgaaaatctgtggagtttcaggttttggtgaaggtgtaactgctacttgggatactgaagtctgatattcagaaagctgtggatgttctggttcgacatccaccgatggtgtcacatcactaatcggttcggtaacgtctgtggatggaggtgctacttctacagaacctgtagcctcagttgtcaacggagatacatttttaatgcgagaaaatgtataatttggtaatggtttcttatgtggatctgaagaagaggtaagatatctactagaaagataccgatcacgttctagttctcttttgtagaacttaactttttctttctccgcatctagttgatattccaacctcttcacgttactacgttcagattccaattcacgttcgcatgggttacctccgcagtttttacgagcgatttcacgttcagccttcatgcgtctctccctctctctatcgagtttatcagagcagtctttctgaaggcgatcgaactccataaatttctccaacgctttgattgtttccatagatttccgaagttcagcttttaggactgtgattctttttctttcgaattcacagctggatgtacaaccgtttccattaccgccatctctaagtttcttttctagatcggcaacatttcatccccatgccttttacattcctcgagtctactgtcgtcgaaatatcgttccagctccttttcgacatcaataactttagcacgttgtctctcaagctctcttttgtagttatctgattccctggcacgtttaagatcttcatgcaattgagtcagctcttaacttcctctcttgcttcttcgtcatagtacgcgcaatcactgtgagatccattgttaccacgtctacactcggcgagctcgcgtttaagagattcaatttcccgtttgtattggtccatgtttccattgctaccaccattagatttacaggctgctagttgtcgttcgagatcagaaatacgggttttcttggaattgatttcgtcgatgtacttggcatcgaaacacttattaagttctttttccaattctacgattttatttctttcgcgagtcaattccctcctgtagtaactatctgttttgtcagattcacgctctctacgtagactttcttgcaagttactaatttgttccctagcacgtccgagtttagttttatatgctgaatagagttctgattcatcctttgagcagatctctagcgatcgtttaagattcctaattctagtctttagcctatttacctcctcagaagatgttccgttaccgttgcgtttacactcgttaagctgtctatcaagatccatgattctatctctaagacgttgcatctctctttccatatcagcattgctttcattattacgtctgcagtcactcaactgtctttcaatatctgagattctatctctaagacgtcgcatctctctctgtttcggcattggtttcattattacgtttacagtcgttcaactgtctttcaagatctgatattctagattggagtctgctaatctctgtagcattttcacggcattcactcagttgtctttcaagatctgaaattttagattggagtctgctaatctctgtaagatttcctcctccgctctcgatgcagtcggtcaacttattctctagttctctaatacgcgaacgcagtgcatcaacttcttgcgtgtcttcctggttgcgtgtacattcatcgagatctctaacgcgtcgtcgttcttcctcaagttctctgcgtactacagaaagcgtgtccttatcttgttgatatttagcaatttctgattctagagtactgattttgcttacgtagttactaatatttgtcttggccttatcaagatcctccttgtatttgtcgcattccttgatatccctacgaagtctggacagttcccattcgacattacgacgtttatcgatttcagctcggagatcgtcatcgcgttgttttagccacatacgactgagttcaagttctcgttgacaagatccatctacttttccattcctaatagtatccagttccttttctagttctgaacgcatttctcgttccctatcaagcgattctctcaattctcggatagtcttcttatcaatttctaataaatctgaaccatcatctgtcccattttgaatatccctgtgttctttgatctcttttgtaagtcggtcgattctttcggttttataaacagaatccctttccaaagtcctaatcttactgagtttatcactaagttctgcattcaattcggtgagttttctcttggcttcttccaactctgttttaaactctccactatttccgcattcttcctcgcatttatctaaccattcaattagtttattaataactagttggtaatcagcgattcctatagccgttcttgtaattgtgggaacataattaggatcttctaatggattgtatggcttgatagcatcatctttatcattattagggggatggacaaccttaattggttggtcctcatctcctccagtagcgtgtggttcttcaataccagtgttagtaataggcttaggcaaatgcttgtcgtacgcgggcacttcctcatccatcaagtatttataatcgggttctacttcagaatattcttttctaagagacgcgacttcgggagttagtagaagaactctgtttctgtatctatcaacgctggaatcaatactcaagttaaggatagcgaatacctcatcgtcatcatccgtatcttctgaaacaccatcatatgacatttcatgaagtctaacgtattgataaatagaatcagatttagtattaaacagatccttaacctttttagtaaacgcatatgtatattttagatctccagatttcataatatgatcacatgccttaaatgtcagtgcttccatgatataatctggaacactaatgggtgacgaaaaagatacagcaccatatgctacgttgataaataaatctgaaccactaagtagataatgattaatgttaagaaagaggaaatattcagtgtataggtatgtcttggcgtcatatcttgtactaaacacgctaaacagtttgttaatgtgatcaatttccaatagattaattagagcagcgggaataccaacaaacatattaccacatccgtattttctatgaatatcacatatcatgttaaaaaatcttgatagaagagcgaatatctcgtctgacttaatgagtcgtagttcagcagcaacataagtcataactgtaaatagaacatactttcctgtagtgttgattctagactccacatcaacaccattattaaaaatagttttatatacatctttaatctgctctccgttaatcgtcgaacgttctagtatacggaaacactttgatttcttatctgtagttaatgacttagtgatatcacgaagaatattacgaattacatttcttgtttttcttgagagacctgattcagaactcaactcatcgttccatagtttttctacctcagtggcgaaatctttggagtgcttggtacatttttcaataaggttcgtgacctccatttattataaaaaatttattcaaaacttaactacaatcgggtaattataaaatcgtagatctcccatgtggcggaatactaccatctatcgcatgtggatggacagtaggtaatggccatgggaacagtaatgtttgcatatttatctttcttgccagtattactgcatattgtcccaatgtttcgatgtgatgttctaacctatcaactgccgctgtatcacaacaatagtgtccgatgaaattaagattatgatccaatgtgtttaatatatgattatcaagtcttatacgatccgcgtcttttttgacaggatcaggttcttctacaggaagaagtttcggcctcttatgatattcatgtctgggaaacggtggtctagggtgaggctccggtatcggagtgggttttggattataatcatcatcgtctatgacatcatcttcgacttcgatatttattttgctatcttgatgatgtcctgtatcagttgcattttcagcactcgactgaatattagcgcattcattgtctattattaccatatttctaaacccaaaatgtatgtgttgaacatcagtactatcgttgatgagtcttatagcatgaattcgcttatcgttatcgggtttatcttctgtcaccttagcaattccttttttattaaactctacataatcatatccatttctattgtttgttctaatataaacgagtatagcatcattgctaaatttttcaatagtatcaaaaacagaatatcctaaaccatataatatatattcaggaacactcaaactaaatgtccaggattctcctaaatacgtaaactttaatagtgcgaaatcattcaaaaatctaccacttatagatagatagtacataaatgcgtatagtagtctacctatctctttattatgaaaaccggcattacgatcatatatgtcgtgatatacctgtgatccgtttacgttaaaccataaatacatgggtgatcctataaacatgaatttatttctaattctcagagctatagttaattgaccgtgtaatatttgcttacatgcatacttgatacgcttattaataagatttttatcattgctcgttatttcagaatcgtatatataaggagtaccatcgtgattcttaccagatattatacaaaatactatatataaaatatattgacccacgttagtaatcatataaatgtttaacgttttaaattttgtattcaatgatccattatcatacgctatcatggtcttgtaatattcattctttaaaatataatattgtgttagccattgcattggagctcctaatggagattttctattctcatccattttaggataggctttcataaagtccctaataacttcgtgaataatgtttctatgttttctactgatgcatgtatttgcttcgatttttttatcccatgtttcatctatcatagatttaaacgcagtaatgctcgcaacattaacatcttgaaccgttggtacaattccgttccataaatttataatgttcgccatttatataactcattttttgaatatacttttaattaacaaaagagttaagttactcatatggacgccgtccagtctgaacatcaatctttttagccagagatatcatagccgctcttagagtttcagcgtgattttccaacctaaatagaacttcatcgttgcgtttacaacacttttctatttgttcaaactttgttgttacattagtaatctttttttccaaattagttagccgttgtttgagagtttcctcattgtcgtcttcatcggctttaacaattgcttcgcgtttagcctctggctttttagcagcctttgtagaaaaaaattcagttgctggaattgcaagatcgtcatctccggggaaaagagttccgtccatttaaagtacagattttagaaactgacactctgcgttatttatatttggtacaacacatggattataaatattgatgttaataacatcagaaaatgtaaagtctatacattgttgcatcgtgttaaattttctaatggatctagtattattgggtccaacttctgcctgaaatccaaatatggaagcggatacaaaaccgtttcctggataaaccacacatctccacttttgctttacatcagaaattgtgtcgttgacatcttgaactctcctatctaatgccggtgttccacctatagattttgaatattcgaatgctgcatgagtagcattaaattccttaatattgccataattttcatatattgagtaaccctggataaaaagtaaacacaccgcagccgtcgctaccacaataaaaaaaattgatagagagttcatttataatctattagaagctgacaaaatttttttacacgcatcagacaatgctttaataaatagttcaacatctacttttgtcatatcgaaccgatggtatgattctaacctagaattacatccgaaaaagttgactatgttcatagtcattaagtcattaacaaacaacattccagactctggattataagacgatactgtttcgtcacaattacctaccttaatcatgtgattatgaatattggctattagagcaccttctaagaaatctataatatctttgaaacacgatttaaaatcaaaccacgaatatacttctacgaagaaagttagtttacccataggagaaataactataaatggagatctaaatacaaaatccggatctatgatagttttaacattattatattctctattaaatacctccacatctaaaaatgttaattttgaaactatgtcttcgtttattaccgtacctgaactaaacgctataagctctattgtttgagaactctttaaacgatattcttgaaatacatgtaacaaagtttcctttaactcggtcggtttatctaccatagttacagaatttgtatccttatctataatataataatcaaaatcgtataaagttatataattatcgcgttcagattgggatcttttcaaatagactaaaaaccccatttctctagtaagtatcttatgtatatgtttgtaaaatatcttcatggtgggaatatgctctaccacagttagccattcctcattgacagcggtagatgtattagacaaaactattccaatgtttaacaagggccattttacgagattattaaatccttgtttgataaatgtagccaatgagggttcgagttcaacgacgattgaattctcttcccgcggatgctgcatgatgaacgacgggatgttgttcgattgatttggaattctttttcgactttttgtttatattaaatattttaaaatttatagcggatagcaattcatgtaccacggataatgtagacgcgtattgcgcatcgatatctttattattagataaatttatcaataaatgtgagaagtttgcctcgttaaggtcttccatttaaatattatataaacatttgtgtttgtaacttattcgtcttttatggaatagttttttactagtaaagctgcaattacacactttgtccgtaaaacataaatataaacaccagcttttatcaatcgttccaaaaagtcgacggcggacatttttaacatggcatctattttaaatacacttaggtttttggaaaaaacatcattttataattgtaacgattcaataactaaagaaaagattaagattaaacataagggaatgtcatttgtattttataagccaaagcattctaccgttgttaaatacttgtctggaggaggtatatatcatgatgatttggttgtattggggaaggtaacaattaataatctaaagatgatgctattttacatggatttatcatatcatggagtgacaagtagtggagcaatttacaaattgggatcgtctatcgatagactttctctaaataggactattgttacaaaagttaataattatgatgatacattttttgacgacgatgattgatcgctattgcacaattttgtttttgtactttctaatatagtgtttaggttctttttcatatgagaatattgatttactaaaatatctatgtttaacttttgttctatgacgtccttatcggcggtatcggtacatatacgtaattcaccttcacaaaatacggagtcttcgataataatagccaatcgattattggatctagctgtctgtatcatattcaacatgtttaatatatcctttcgtttcccctttacaggcatcgatcgtagcatattttccgcgtctgatatggaaatgttaaaactacaaaaatgcgtaatgttagcccgtcctaatattggtacgtgtctataagtttggcatagtagaataatagacgtgtttaaatgccttccaaagtttaagaattctattagagtattgcattttgatagtttatcgcctacatcatcaaaaataagtaaaaagtgtgctgattttttatgattttgtgcgacagcaatacatttttctatgttacttttagttcgtatcagattatattctagagattcctgactactaacgaaattaatatgatttggccaaatgtatccatcataatctgggttataaacgggtgtaaacaagaatatatgtttatattttttaactagtgtagaaaacagagatagtaaatagatagtttttccagatccagatcctcccgttaaaaccattctaaacggcatttttaataaattttctcttgaaaattgtttttcttggaaacaattcataattatatttacagttactaaattaatttgataataaatcaaaatatggaaaactaaggttgttagtagggaggagaacaaagaaggcacatcgtgatataaataacatttattatcatgatgacaccagaaaacgacgaagagcagacatctgtgttctccgctactgtttacggagacaaaattcagggaaagaataaacgcaaacgcgtgattggtctatgtattagaatatctatggttatttcactactatctatgattaccatgtccgcgtttctcatagtgcgcctaaatcaatgcatgtctgctaacgaggctgctattactgacgccgctgttgccgttgctgctgcatcatctactcatagaaaggttgcgtctagcactacacaatatgatcacaaagaaagctgtaatggtttatattaccagggttcttgttatatattacattcagactaccagttattctcggatgctaaagcaaattgcactgcggaatcatcaacactacccaataaatccgatgtcttgactacctggctcattgattatgttgaggatacatggggatctgatggtaatccaattacaaaaactacatccgattatcaagattctgatgtatcacaagaagttagaaagtatttttgtgttaaaacaatgaactaatatttatttttgtacattaataaatgaaatcgcttaatagacaaactgtaagtaggtttaagaagttgtcggtgccggccgctataatgatgatactctcaaccattattagtggcataggaacatttctgcattacaaagaagaactgatgcctagtgcttgcgccaatggatggatacaatacgataaacattgttatttagatactaacattaaaatgtctacagataatgcggtttatcagtgtcgtaaattacgagctagattgcctagacctgatactagacatctgagagtattgtttagtattttttataaagattattgggtaagtttaaaaaagaccaatgataaatggttagatattaataatgataaagatatagatattagtaaattaacaaattttaaacaactaaacagtacgacggatgctgaagcgtgttatatatacaagtctggaaaactggttaaaacagtatgtaaaagtactcaatctgtactatgtgttaaaaaattctacaagtgacaacaaaaaatgaattaataataagtcgttaacgtacgccgccatggacgccgcgtttgttattactccaatgggtgtgttgactataacagatacattgtatgatgatctcgatatctcaatcatggactttataggaccatacattataggtaacataaaaactgtccaaatagatgtacgggatataaaatattccgacatgcaaaaatgctactttagctataagggtaaaatagttcctcaggattctaatgatttggctagattcaacatttatagcatttgtgccgcatacagatcaaaaaataccatcatcatagcatgcgactatgatatcatgttagatatagaagataaacatcagccattttatctattcccatctattgatgtttttaacgctacaatcatagaagcgtataacctgtatacagctggagattatcatctaatcatcaatccttcagataatctgaaaatgaaattgtcgtttaattcttcattctgcatatcagacggcaatggatggatcataattgatgggaaatgcaatagtaattttttatcataaaagttgtaaagtaaataataaaacaataaatattgaactagtagtacgtatattgagcaatcagaaatgatgctggtacctcttatcacggtgaccgtagttgcgggaacaatattagtatgttatatattatatatttgtaggaaaaagatacgtactgtctataatgacaataaaattatcatgacaaaattaaaaaagataaagagttctaattccagcaaatctagtaaatcaactgatagcgaatcagactgggaggatcactgtagtgctatggaacaaaacaatgacgtagataatatttctaggaatgagatattggacgatgatagcttcgctggtagtttaatatgggataacgaatccaatgttatggcgcctagcacagaacacatttacgatagtgttgctggaagcacgctgctaataaataatgatcgtaatgaacagactatttatcagaacactacagtagtaattaatgaaacggagactgttgaagtacttaatgaagataccaaacagaatcctaactattcatccaatcctttcgtaaattataataaaaccagtatttgtagcaagtcaaatccgtttattacagaacttaacaataaatttagtgagaataatccgtttagacgagcacatagcgatgattatcttaataagcaagaacaagatcatgaacacgatgatatagaatcatcggtcgtatcattggtgtgattagtttcctttttataaaattgaagtaatatttagtattattgctgccgtcacgttgtacaaatggagatattccctgtattcggcatttctaaaattagcaattttattgctaataatgactgtagatattatatagatacagaacatcaaaaaattatatctgatgagatcaatagacagatggatgaaacggtacttcttaccaacatcttaagcgtagaagttgtaaatgacaatgagatgtaccatcttattcctcatagattatcgacgattatactctgtattagttctgtcggaggatgtgttatctctatagataatgacatcaatggcaaaaatattctaacctttcccattgatcatgctgtaatcatatccccactgagtaaatgtgtcgtagttagcaagggtcctacaaccatattggttgttaaagcggatatacctagcaaacgattggtaacatcgtttacaaacgacatactatatgtaaacaatctgtcactgattaattatttgccgttgtctgtattcattattagacgagtcaccgactatttggatagacacatatgcgatcagatatttgctaataataagtggtattcccttataaccatcgacgataagcaatatcctattccatcaaactgtataggtatgtcctctgccaagtacataaattctagcatcgagcaagatactttaatccatgtttgtaacctcgagcatccgttcgactcagtatacaaaaaaatgcagtcgtacaattctctacctatcaaggaacaaatattgtacggtagaattgataatataaatatgagcattagtatttctgtggattaatagatttctagtatggggatcattaatcatctctaatctctaaatacctcataaaacgaaaaaaaagctattatcaaatactgtacggaatggattcattctcttctctttttatgaaactctgttgtatatctactgataaaactggaagcaaaaaatctgatagaaagaataagaataagatcaaggattatatggaacacgattattataaaataacaatagttcctggttcctcttccacgtctactagctcgtggtattatacacatgcctagtaatagtctctttgcgttgacggaaagcagactagaaataacaggctaaaatgttcagacaccataatagttcccaacccagataataacagagttccatcaacacattcctttaaactcaatcccaaacccaaaaccgttaaaatgtatccggccaattgatagtagataatgaggtgtacagcgcatgataatttacacagtaaccaaaatgaaaatactttagtaattataagaaatatagacggtaatgtcatcatcaacaatccgataatatgcctgagagtaaacattgacggataaaacaaaaatgctccgcataactctatcatggcaataacacaaccaaatacttgtaagattcctaaattagtagaaaatacaacgaatatcgatgtataagtgatctcgagaaataataagaataaagtaatgcccgtaaagataaacatcaacattgtttggtaatcattaaaccaattagtatgaagttgaactaatttcacagtagattttattccagtgttatcctcgcatgtataagtacctggtaagatatctttatattccataatcaatgagacatcactatctgataacgaatgaagtctagcactagtatgccatttacttaatatggtcgtcttggaagttttattataagttaaaatatcatggttatccaatttccatctaatatactttgtcggattatctatagtacacggaataatgatggtatcattacatgctgtatactctatggtctttgtagttgttataacaaccaacgtatagaggtatatcaacgatattctaactcttgacattttttatttatttaaaatgatacctttgttatttattttattctattttgctaacggtattgaatggcataagtttgaaacgagtgaagaaataatttctacttacttattagacgacgtattatacacgggtgttaatggggcggtatacacattttcaaataataaactaaacaaaactggtttaactaataataattatataacaacatctataaaagtagaggatgcggataaggatacattagtatgcggaaccaataacggaaatcccaaatgttggaaaatagacggttcagacgacccaaaacatagaggtagaggatacgctccttatcaaaatagcaaagtaacgataatcagtcacaacggatgtgtactatctgacataaacatatcaaaagaaggaattaaacgatggagaagatttgacggaccatgtggttatgatttatacacggcggataacgtaattccaaaagatggtttacgaggagcattcgtcgataaagacggtacttatgacaaagtttacattcttttcactgatactatcggctcaaagagaattgtcaaaattccgtatatagcacaaatgtgcctaaacgacgaaggtggtccatcatcattgtctagtcatagatggtcgacgtttctcaaagtcgaattagaatgtgatatcgacggaagaagttatagacaaattattcattctagaactataaaaacagataatgatacgatactatatgtattcttcgatagtccttattccaagtccgcattatgtacctattctatgaataccattaaacaatctttttctacgtcaaaattggaaggatatacaaagcaattgccgtctccagctcctggtatatgtttaccagctggaaaagttgttccacataccacgtttgaagtcatagaacaatataatgtactagatgatattataaagcctttatctaaccaacctatcttcgaaggaccgtctggtgttaaatggttcgatataaaggagaaggaaaatgaacatcgggaatatagaatatacttcataaaagaaaattctatatattcgttcgatacaaaatctaaacaaactcgtagctcgcaagtcgatgcgcgactattttcagtaatggtaactgcgaaaccgttatttatagcagatatagggataggagtaggaatgccacaaatgaaaaaaatacttaaaatgtaatcttaatcgagtacaccacacgacaatgaacaaacataagacagattatgctggttatgcttgctgcgtaatatgcggtctaattgtcggaattatttttacagcgacactattaaaagttgtagaacgtaaattagttcatacaccattaatagataaaacgataaaagatgcatatattagagaagattgtcctactgactggataagctataataataaatgtatccatttatctactgatcgaaaaacctgggaggaaggacgtaatgcatgcaaagctctaaattcaaattcggatctaattaagatagagactccaaacgagttaagttttttaagaagccttagacgaggctattgggtaggagaatccgaaatattaaaccagacaaccccatataattttatagctaagaatgccacgaagaatggaactaaaaaacggaaatatatttgtagcacaacgaatactcccaaactgcattcgtgttacactatataacaattacactacatttttatcataccactacttcggttagatgttttagaaaaaaataaatatcgccgtaccgttcttgtttttataaaaataacaattaacaattatcaaattttttctttaatattttacgtggttgaccattcttggtggtaaaataatctcttagtgttggaatggaatgctgtttaatgtttccacactcatcgtatattttgacgtatgtagtcacatcgtttacgcaatagtcagactgtagttctatcatgcttcctacatcagaaggaggaacagttttaaagtctcttggttttaatctattaccgttagttttcatgaaatcctttgttttatccacttcacattttaaataaatgtccactatacattcttttgttaattttactagatcgtcatgggtcatagaatttataggttccgtagtccatggatccaaactagcaaacttcgcgtatacggtatcgcgattagtgtatacaccaactgtatgaaaattaagaaaacagtttaataaatcaacagaaatatttaatcctccgtttgatacagatgcgccatatttatggatttcggattcacacgttgtttgtctgaggtgttcgtctagtgttgcttctacgtaaacttcgattcccatatattctttattgtcagaatcgcataccgatttatcatcatacactgtttgaaaactaaatggtatacacatcaaaataataaataataacgagtacattctgcaatattgttatcgtaattggaaaaatagtgttcgagtgagttggattatgtgagtattggattgtatattttattttatattttgtaataagaataaaatgctaatgtcaagtttattccaatagatgtcttattaaaaacatatataataaataacaatggctgaatggcataaaattatcgaggatatctcaaaaaataataagttcgaggatgccgccatcgttgattacaagactacaaagaatgttctagctgctattcctaacagaacatttgccaagattaatccgggtgaaattattcctctcatcactaatcgtaatattctaaaacctcttattggtcagaaatattgtattgtatatactaactctctaatggatgagaacacgtatgctatggagttgcttactgggtacgcccctgtatctccgatcgttatagcgagaactcataccgcacttatatttttgatgggtaagccaacaacatccagacgtgacgtgtatagaacgtgtagagatcacgctacccgtgtacgtgcaactggtaattaaaataaaaagtaatattcatatgtagtgtcaattttaaatgatgatgatgaaatggataatatccatattgacgatgtcaataatgccggtattggcatacagttcatcgatttttagatttcattcagaggatgtggaattatgttatgggcatttgtattttgataggatctataatgtagtaaatataaaatataatccgcatattccatatagatataattttattaatcgcacgttaaccgtagatgaactagacgataatgtcttttttacacatggttattttttaaaacacaaatatggttcacttaatcctagtttgattgtctcattatcaggaaacttaaaatataatgatatacaatgctcagtaaatgtatcgtgtctcattaaaaatttggcaacgagtacatctactatattaacatctaaacataagacttattctctacatcggtccacgtgtattactataataggatacgattctattatatggtataaagatataaatgacaagtataatgacatctatgattttactgcaatatgtatgctaatagcgtctacattgatagtgaccatatacgtgtttaaaaaaataaaaatgaactcttaattatgctatgctattagaaatggataaaatcaaaattacggttgattcaaaaattggtaatgttgttaccatatcgtataacttggaaaagataactattgatgtcacacctaaaaagaaaaaagaaaaggatgtattattagcgcaatcagttgctgtcgaagaggcaaaagatgtcaaggtagaagaaaaaaatattatcgatattgaagatgacgatgatatggatgtagaaagcgcgtaatactatctataaaaataagtatataataaatactttttatttacggtactcttgtagtggtgataccctactcgattatttttttaaaaaaatacttattctgattcttctaaccatttccgtgttcgtttgaatgccacatcgacgtcaaagataggggagtagttgaaatctagttctgcattgttggtacgcacctcaaatgtagtgttggatatcttcaacgtatagttgttgagtagtgatggttttctaaatagaattctcttcatatcattcttgcacgcgtacatttttagcatccatcttggaattctagatccttgttctattcccaatggtttcatcaatagaagattaaacatatcgtacgaacacgatggagagtaatcgtagcaaaagtaagcatttcctttaatctcagatcccggatactggatatattttgcagccaacacgtgcatccatgcaacatttcctacatatacccggctatgcaccgcgtcatcatcgactgtacgatacataatgttaccgtgttgcttacattgctcgtaaaagactttcgtcaatttgtctccttctccgtaaattctagtgggtcttaggcaacaagtatacaattttgctccattcatgattacggaattattggctttcataaccagttgctcggccatacgtttactttttgcgtatacatgtcctggtgatatatcataaagggtatgctcatggccgatgaatggatcaccgtgtttattgggtcctattgcttccatgctactagtatagatcaaatacttgattcctaggtccacacaagctgccaaaatagtctgtgttccataatagtttactttcatgatttcattatcggtgtattttccaaatacatccactagagcagccgtatgaataatcagatttaccccatctagcgcttctctcaccttatcaaagtcgtttatatcacattgtatatagtttataaccttaactttcgaggttattggttgtggatcttctacaatatctatgactctgatttcttgaacatcatctgcactaattaacagttttactatatacctgcctagaaatccggcaccaccagtaaccgcgtacacggccattgctgccactcataatatcagactacttattctattttactaaataatggctgtttgtataatagaccacgataatatcagaggagttatttactttgaaccagtccatggaaaagataaagttttaggatcagttattggattaaaatccggaacgtatagtttgataattcatcgttacggagatattagtcaaggatgtgattccataggcagtccagaaatatttatcggtaacatctttgtaaacagatatggtgtagcatatgtttatttagatacagatgtaaatatatctacaattattggaaaggcgttatctatttcaaaaaatgatcagagattagcgtgtggagttattggtatttcttacataaatgaaaagataatacattttcttacaattaacgagaatggcgtttgatatatcagttaatgcgtctaaaacaataaatgcattagtttacttttctactcagcaaaataaattagtcatacgtaatgaagttaatgatacacactacactgtcgaatttgatagggacaaagtagttgacacgtttatttcatataatagacataatgacaccatagaaataagaggggtgcttccagaggaaactaatattggttgcgcggttaatacgccggttagtatgacttacttgtataataagtatagttttaaactgattttagcagaatatataagacacagaaatactatatccggcaatatttattcggcattgatgacactagatgatttggctattaaacagtatggagacattgatctattatttaatgagaaacttaaagtagactccgattcgggactatttgactttgtcaactttgtaaaggatatgatatgttgtgattctagaatagtagtagctctatctagtctagtatctaaacattgggaattgacaaataaaaagtataggtgtatggcattagccgaacatatatctgatagtattccaatatctgagctatctagactacgatacaatctatgtaagtatctacgcggacacactgagagcatagaggatgaatttgattattttgaagacgatgattcgtctacatgttctgccgtaaccgacagggaaacggatgtataattttttttatagcgtgaaggatatgataaaaaatataattgttgtatttatcccattctaatcaccttatatgattctgtaacacaataaaggagtctcatagatgtatagaggtcagatactggtttgataaactgtttattccacataagtatgtttgactttatggttagacccgcatactttaacaaatcactgaaaattggagttaggtattgacctctcagaatcagttgccgttctggaacattaaatgtattttttatgatatactccaacgcatttatgtgggcatacaacaagtcattactaatggagtattccaagagttttagttgtctagtatttaacaagagaagagatttcaacagactgtttatgaactcgaatgccgcctcattgtcgcttatattgatgatgtcgaattctcccaatatcatcaccgatgagtagctcatcttgttatcgggatccaagttttctaaagatgtcattaaaccctcgatcatgaatggatttatcatcatcgtttttatgttggacatgagcttagtccgtttgtccacatctatagacgacgatttctgaattatttcatatatccctctctttaactccaggaacttgtcaggatggtctactttaatatgttctcgtctaagagatgaaaatctttggatggtcgcacgcgacttttctctaaaggatgatgttgcccaagatcctctcttaaatgaatccatcttatccttggacaagatggacagtctattttccttagatggtttaatatttttgttacccatgatctataaaggtagacctaatcgtctcggatgacctatatatttattttcagttttattatacgcataaattgtaaaaaatatgttaggtttacaaaaatgtctcgtggggcattaatcgtttttgaaggattggacaaatctggaaaaacaacacaatgtatgaacatcatggaatctataccggcaaacacgataaaatatcttaactttcctcagagatccactgtcactggaaagatgatagatgactatctaactcgtaaaaaaacctataatgatcatatagttaatctattattttgtgcaaatagatgggagtttgcatcttttatacaagaacaactagaacagggaattactttaatagttgatagatacgcattttctggagtagcgtatgccgccgctaaaggcgcgtcaatgactctcagtaagagttatgaatctggattgcctaaacccgacttagttatattcttggaatctggtagcaaagaaattaatagaaacgtcggcgaggaaatttatgaagatgttacattccaacaaaaggtattacaagaatataaaaaaatgattgaagaaggagatattcattggcaaattatttcttctgaattcgaggaagatgtaaagaaggagttgattaagaatatagttatagaggctatacacacggttactggaccagtggggcaactgtggatgtaatagtgaaattacattttttataaatagatgttagtacagtgttataaatggatgaagcatattactctggcaacttggaatcagtactcggatacgtgtccgatatgcataccgaactcgcatcaatatctcaattagttattgccaagatagaaactatagataatgatatattaaacaaggacattgtaaattttatcatgtgtagatcaaacttggataatccatttatctctttcctagatactgtatatactattatagatcaagagaactatcagactgagttgattaattcattagacgacaatgaaattatcgattgtatagttaataagtttatgagcttttataaggataacctagaaaatatagtagatgctatcattactctaaaatatataatgaataatccagattttaaaactacgtatgcagaagtactcggttccagaatagccgatatagatattaaacaagtgatacgtaagaatatactacaattgtctaatgatatccgcgaacgatatttgtgaaaaatattaaaaaaaaatactttttttattaaatgacgtcgcttcgcgaatttagaaaattatgctgtgatatatatcacgcatcaggatataaagaaaaatctaaattaattagagactttataacagatagggatgataaatatttgatcattaagctattgcttcccggattagacgatagaatttataacatgaacgataaacaaattataaaattatatagtataatatttaaacaatctcaggaagatatgctacaagatttaggatacggatatataggagacactattaggactttcttcaaagagaacacagaaatccgtccacgagataaaagcattttaactttagaagacgtggatagtttcttaactacgttatcatccgtaactaaagaatcgcatcaaataaaattattgactgatattgcatccgtttgtacatgtaatgatttaaaatgtgtagtcatgcttattgataaagatctaaaaattaaagcgggtcctcggtacgtacttaacgctattagtcctcatgcctatgatgtgtttagaaaatctaataacttgaaagagataatagaaaattcatctaaacaaaatctagactctatatctatttctgttatgactccaattaatcccatgttagcggaatcgtgtgattctgtcaataaggcgtttaaaaaatttccatcaggaatgtttgcggaagtcaaatacgatggtgaaagagtacaagttcataaaaataataacgagtttgccttctttagtagaaacatgaaaccagtactctctcataaagtggattatctcaaagaatacataccgaaagcatttaaaaaagctacgtctatcgtattggattctgaaattgttcttgtagacgaacataatgtaccgctcccgtttggaagtttaggtatacacaaaaagaaagaatataaaaactctaacatgtgtttgttcgtgtttgactgtttgtactttgatggattcgatatgacggacattccattgtacgaacgaagatcttttctcaaagatgttatggttgaaatacccaatagaatagtattctcagagttgacgaatattagtaacgagtctcagttaactgacgtattggatgatgcactaacgagaaaattagaaggattggtcttaaaagatattaatggagtatacgaaccgggaaagagaagatggttaaaaataaagcgagactatttgaacgagggttccatggcagattctgccgatttagtagtactaggtgcctactatggtaaaggagcaaagggtggtatcatggcagtctttctaatgggttgttacgacgatgaatccggtaaatggaagacggttaccaagtgttcaggacacgatgataatacgttaagggagttgcaagaccaattaaagatgattaaaattaacaaggatcccaaaaaaattccagagtggttagtagttaataaaatctatattcccgattttgtagtagaggatccgaaacaatctcagatatgggaaatttcaggagcagagtttacatcttccaagtcccataccgcaaatggaatatccattagatttcctagatttactaggataagagaggataaaacgtggaaagaatctactcatctaaacgatttagtaaacttgactaaatcttaatagttacatacaaactgaaaattaaaataacactatttagttggtggtcgccatggatggtgttattgtatactgtctaaacgcgctagtaaaacatggcgaggaaataaatcatataaaaaatgatttcatgattaaaccatgttgtgaaagagtttgtgaaaaagtcaagaacgttcacatcggcggacaatctaaaaacaatacagtgattgcagatttgccatatctggataatgctgtatcggatgtatgcaattcactgtataaaaagaatgtatcaagaatatccagatttgctaatttgataaagatagatgacgatgacaagactcctactggtgtatataattattttaaacctaaagatgccattcctgttatcatatctataggaaaggataaagatgtctgtgaactattaatctcatcagacatatcgtgtgcatgcgtggagttaaattcatatcacgtagccattcttcccatggatgtttccttttttaccaaaggaaatgcatcattgattattctcctgtttgatttctctatcgatgcggcacctctcttaagaagtgtaaccgataataatgttattatatctagacaccagcgtctacatgacgagcttccgagttccaattggttcaagttttacataagtataaagtccgactattgttctatattatatatggttgttgatggatctgtgatgcatgcgatagctgataatagaactcacgcaattattagcaaaaatatattagacaatactacgattaacgatgagtgtagatgctgttattttgaaccacagattaggattcttgatagagatgagatgctcaatggatcatcgtgtgatatgaacagacattgtattatgatgaatttacctgatgtaggcgaatttggatctagtatgttggggaaatatgaacctgacatgattaagattgctctttcggtggctggtaatttaataagaaatcgagactacattcccgggagacgaggatatagctactacgtttacggtatagcctctagataatttttttaagcacgaaataaaaaacataattttaaaccaatctatttcatactattttgtgtgatcaccatggacataaagatagatattagtatttctggtgataaatttacggtgactactaggagggaaaatgaagaaagaaaaaaatatctacctctccaaaaagaaaaaactactgatgttatcaaacctgattatcttgagtacgatgacttgttagatagagatgagatgtttactattctagaggaatattttatgtacagaggtctattaggcctcagaataaaatatggacgactctttaacgaaattaaaaaattcgacaatgatgcggaagaacaattcggtactatagaagaactcaagcagaaacttagattaaattctgaagagggagcagataactttatagattatataaaggtacaaaaacaggatatcgtcaaacttactgtatacgattgcatatctatgataggattgtgtgcatgcgtggtagatgtttggagaaatgagaaactgttttctagatggaaatattgtttacgagcgattaaactgtttattaatgatcacatgcttgataagataaaatctatactgcagaatagactagtatatgtggaaatgtcatagaaagttaaaagttaatgagagcaaaaatatataaggttgtattccatatttgttatttttttctgtaatagttagaaaaatacattcgatggtctatctatcagattattatgtgttataaggtactttttctcataataaactagagtatgagtaagatagtgtttttcaaaacatataaatctaaaattgatggatgagatatacagctattaatttcgaaaatatattttaatctgataactttaaacatggatttttaatggtggtttaacgttttaaaaaaagattttgttattgtagtatatgataatattaaaagatggatataaagaatttgctgactgcatgtactattttttacattactacattggctacggcagatatacctacttcgtcactgccacacgctccggtaaacggggcatgtgacgagggagaatatcttgataagaggcataatcaatgttgtaatcagtgtccacctggagaatttgccaaggtcagatgtaatggtaacgataacacaaaatgtgaacgctgcccacctcatacatataccgcaatccccaattactctaatggatgtcatcaatgtagaaaatgcccaacaggatcatttgataaggtaaagtgtaccggaacacagaacagtaaatgttcgtgtcttcctggttggtattgcgctactgattcttcacagactgaagattgtcgagattgtataccaaaaaggagatgtccatgcggatactttggtggaatagatgaacaaggaaatcctatttgtaaatcgtgttgtgttggtgaatattgcgactacctacgtaattatagacttgatccatttcctccatgcaaactatctaaatgtaattaattatgattttgatgataatgttaccatacattatatcgctacttggttagtgtattattcagtatgaagacctattaataattacttatcttttgacgatcttgttataattataatataaaaatacttatggcatagtaactcataattgctgacgcgataaattcgtaataatctgttttgttcaaatttttataaggaatctacaggcataaaaataaaaatataatttataatatactcttacagcgcgccatcatgaataacagcagtgaattgattgctgttattaatggatttagaaatagtggacgattttgtgatattaatatagttattaatgatgaaaggataaacgctcataaactcatcctatctggagcctccgaatatttttccattctgttttccaataattttatcgattctaatgaatacgaagttaatctaagtcatttagattatcaaagcgtaaacgatttgatcgattacatttatgggatacctttgagcctaactaacgataacgtgaaatatattctttcaaccgctgattttttacaaattggatctgctattacggagtgtgaaaattacatacttaaaaatctttgttctagaaactgtatcgatttctacatatacgctgataaatataataacaagaaaatagaatcagcgtcgtttaacacaatattacaaaatattttgagactcatcaacgatgaaaactttaaatacttaacagaggaatcaatgataaaaattttaagcgatgatatgttaaatataaaaaatgaggatttcgccccactaattctcattaaatggttagagagtactcaacaaccatgcaccgtcgagttacttaaatgcctcagaatatcattgctttccccacaagttataaaatcactttatagtcatcgactggttagttcaatctacgaatgtataacattcttaaacaatatagcattcttggatgaatcatttcctagataccatagcatcgagttgatatctatcggtataagtaattcgcatgataagatttccataaactgctacaatcataaaaaaaatacatgggaaatgatatcttcacgtagatataggtgtagtttcgcagtggccgtcctggataatattatttatatgatgggtggatatgatcagtccccgtatagaagttcaaaggttatagcgtacaatacatgtacaaattcttggatatatgatataccagagctaaaatatcctcgttctaattgtgggggactggctgatgacgaatacatttattgtataggcggcatacgcgatcaggattcatcgttgacatctagtattgatagatggaagccatcaaaaccatattggcagaagtatgctaaaatgcgcgaaccaaaatgtgatatgggggttgcgatgttaaacggattaatatatgttataggtggaatcgttaaaggtgacacgtgtaccgacgcactagagagtttatcagaagatggatggatgaagcatcaacgtcttccaataaaaatgtccaatatgtcgacgattgttcatgatggcaagatttatatatctggaggttacaacaatagtagtgtagttaatgtaatatcgaatttagtccttagctataattcgatatatgatgaatggaccaaattatcatcattaaacattcctagaattaatcccgctctatggtcagcgcataataaattatatgtaggaggaggaatatctgatgatgttcgaactaatacatctgaaacatacgacaaagaaaaagattgttggacattggataatggtcacgtgttaccacgcaattatataatgtataaatgcgaaccgattaaacataaatatccattggaaaaaacacagtacacgaatgattttctaaagtatttggaaagttttataggtagttgatagaacaaaatacataattttgtaaaaataaatcactttttatactaatatgacacgattaccaatacttttgttactaatatcattagtatacgctacaccttttcctcagacatctaaaaaaataggtgatgatgcaactctatcatgtaatcgaaataatacaaatgactacgttgttatgagtgcttggtataaggagcccaattccattattcttttagctgctaaaagcgacgtcttgtattttgataattataccaaggataaaatatcttacgactctccatacgatgatctagttacaactatcacaattaaatcattgactgctagagatgccggtacttatgtatgtgcattctttatgacatcgcctacaaatgacactgataaagtagattatgaagaatactccacagagttgattgtaaatacagatagtgaatcgactatagacataatactatctggatctacacattcaccggaaactagttctgagaaacctgattatatagataattctaattgctcgtcggtattcgaaatcgcgactccggaaccaattactgataatgtagaagatcatacagacaccgtcacatacactagtgatagcattaatacagtaagtgcatcatctggagaatccacaacagacgagactccggaaccaattactgataaagaagatcatacagtcacagacactgtctcatacactacagtaagtacatcatctggaattgtcactactaaatcaaccaccgatgatacgtacaatgataatgatacagtaccaccaactactgtaggcggtagtacaacctctattagcaattataaaaccaaggactttgtagaaatatttggtattaccgcattaattatattgtcggccgtggcaatattctgtattacgtattatatatgtaataaacgttcacgtaaatacaaaacagagaacaaagtctagatttttgacttacataaatgtctgggatagtaaaatctatcatattgagcgggccatctggtttaggaaagacagccatagccaaaagactatgggaatatatttggatttgtggtgtcccataccactagatttcctcgtcctatggaacgagaaggtgtcgattaccattacgttaacagagaggccatctggaagggaatagccgccggaaactttctagaacatactgagtttttaggaaatatttacggaacttctaaaactgctgtgaatacagcggctattaataatcgtatttgtgtgatggatctaaacatcgatggcgttagaagtcttaaaaatacgtacctaatgccttactcggtgtatataagacctacctctcttaaaatggttgagaccaagcttcgttgtagaaacactgaagcggatgatgagattcatcgtcgtgtgatgttggcaaaaactgacatggatgaggcaggtgaagccggtctattcgacactattatcattgaagatgatgtgaatttagcatatagtaagttaattcagatactacaggaccgtattagaatgtattttaacactaattagagacttaagacttaaaacttgataattaataatataactcgtttttatatgtggctatttcaacgtctaatgtattagttaaatattaaaacttaccacgtaaaacttaaaatttaaaatgatatttcattgacagatagatcacacattatgaactttcaaggacttgtgttaactgacaattgcaaaaatcaatgggtcgttggaccattaataggaaaaggtggatttggtagtatttatactactaatgacaataattatgtagtaaaaatagagcccaaagctaacggatcattatttaccgaacaggcattttatactagagtacttaaaccatccgttatcgaagaatggaaaaaatctcacaatataaagcacgtaggtcttatcacgtgcaaggcatttggtctatacaaatccattaatgtggaatatcgattcttggtaattaatagattaggtgcagatctagatgcggtgatcagagccaataataatagactaccaaaaaggtcggtgatgttgatcggaatcgaaatcttaaataccatacaatttatgcacgagcaaggatattctcacggagatattaaagcgagtaatatagtcttagatcaaatagataagaataaattatatctagtggattacggattggtttctaaattcatgtctaatggcgaacatgttccatttataagaaatccaaataaaatggataacggtactctagaatttacacctatagattcgcataaaggatacgttgtatctagacgtggagatctagaaacacttggatattgtatgattagatggttgggaggtatcttaccatggactaagatatctgaaacaaagaattgtgcattagtaagtgccacaaaacagaaatatgttaacaatactgcgactttgttaatgaccagtttgcaatatgcacctagagaattgctgcaatatattaccatggtaaactctttgacatattttgaggaacccaattacgacaagtttcggcacatattaatgcagggtgtatattattaagtgtggtgtttggtcgataaaaattaaaaaataacttaatttattattgatctcgtgtgtacaaccgaaatcatggcgatgttttacgcacacgctctcggtgggtacgacgagaatcttcatgcctttcctggaatatcatcgactgttgccaatgatgtcaggaaatattctgttgtgtcagtttataataacaagtatgacattgtaaaagacaaatatatgtggtgttacagtcaggtgaacaagagatatattggagcactgctgcctatgtttgagtgcaatgaatatctacaaattggagatccgatccatgatcaagaaggaaatcaaatctctatcatcacatatcgccacaaaaactactatgctctaagcggaatcgggtacgagagtctagacttgtgtttggaaggagtagggattcatcatcacgtacttgaaacaggaaacgctgtatatggaaaagttcaacatgattattctactatcaaagagaaggccaaagaaatgagtacacttagtccaggacctatcatcgattaccacgtctggataggagattgtatctgtcaagttactgctgtggacgtacatggaaaggaaattatgagaatgagattcaaaaagggtgcggtgcttccgatcccaaatctggtaaaagttaaacttggggagaatgatacagaaaatctttcttctactatatcggcggcaccatcgaggtaaccacctctctggaagacagcgtgaataatgtactcatgaaacgtttggaaactatacgccatatgtggtctgttgtatatgatcattttgatattgtgaatggtaaagaatgctgttatgtgcatacgcatttgtctaatcaaaatcctataccgagtactgtaaaaacaaatttgtacatgaagactatgggatcatgcattccatggaagctctagagtatcttagcgaactgaaggaatcaggtggatggagtcccagaccagaaatgcaggaatttgaatatccagatggagtggaagacactgaatcaattgagagattggtagaggagttcttcaatagatcagaacttcaggctggtaattctattaattgttaaacatacatctgtttcagctaagcaactaagaacacgtatacggcagcagcttccttctatactctcatcttttaccaacacaaagggtggatatttgttcattggagttgataataatacacacaaagtatttggattcacggtgggttacgactacctcagactgatagagaatgatatagaaaagcatatcaaaagactttgtgttgtgtatttctgtgagaagaaagaggacatcaagtacgcgtgtcgattcatcaaggtatataaacctggggatgaggctacctcgacatacgtgtgcgctatcaaagtggaaagatgctgttgtgctgtgtttgcagattggccagaatcatggtatatggatactaatggtatcaagaagtattctccagatgaatgggtgtcacatataaaattttaattaatgtaactatagagaacaaataataaggttgtaatatcatatagacaataactaacaattaattagtaactgttatctcttttttaattaaccaactaactatatacctattaatacatcgtaattatagttcttaacatctattaatcattaattcgcttctttaattttttataaactaacattgttaattgaaaagggataacatgttacagaatataaattatatatggatttttttaaaaaggaaatacttgactggagtatatatttatctcttcattatatagcacgcgtgttttccaatttttccacatcccatataatacaggattataatctcgttcgaacatacgagaaagtggataaaacaatagttgattttttatctaggttgccaaatttattccatattttagaatatggggaaaatattctacatatttattctatggatgatgctaatacgaatattataattttttttctagatagagtattaaatattaataagaacgggtcatttatacacaatctcgggttatcatcatccattaatataaaagaatatgtatatcaattagttaataatgatcatccagataataggataagactaatgcttgaaaatggacgtagaacaagacattttttgtcctatatatcagatacagttaatatctatatatgtattttaataaatcatggattttatatagatgccgaagacagttacggttgtacattattacatagatgtatatatcactataagaaatcagaatcagaatcatacaatgaattaattaagatattgttaaataatggatcagatgtagataaaaaagatacgtacggaaacacaccttttatcctattatgtaaacacgatatcaacaacgtggaattgtttgagatatgtttagagaatgctaatatagactctgtagactttaatagatatacacctcttcattatgtctcatgtcgtaataaatatgattttgtaaagttattaatttctaaaggagcaaatgttaatgcgcgtaataaattcggaactactccattttattgtggaattatacacggtatctcgcttataaaactatatttggaatcagacacagagttagaaatagataatgaacatatagttcgtcatttaataatttttgatgctgttgaatctttagattatctattatccagaggagttattgatattaactatcgtactatatacaacgaaacatctatttacgacgctgtcagttataatgcgtataatacgttggtctatctattaaacaaaaatggtgattttgagacgattactactagtggatgtacatgtatttcggaagcagtcgcaaacaacaacaaaataataatggaagtactattgtctaaacgaccatctttgaaaattatgatacagtctatgatagcaattactaaacataaacagcataatgcagatttattgaaaatgtgtataaaatatactgcgtgtatgaccgattatgatactcttatagatgtacagtcgctacagcaatataaatggtatattttaagatgtttcgatgaaatagatatcatgaagagatgttatataaaaaataaaactgtattccaattagttttttgtatcaaagacattaatactttaatgagatacggtaaacatccttctttcgtgaaatgcactagtctcgacgtatacggaagtcgtgtacgtaatatcatagcatctattagatatcgtcagagattaattagtctattatccaagaagctggatcctggagataaatggtcgtgttttcctaacgaaataaaatataaaatattggaaaactttaacgataacgaactatccacatatctaaaaatcttataaacattattaaaatataaaatctaagtaggataaaatcacactacatcattgtttccttttagtgctcgacagtgtatactatttttaacgctcataaataaaaatgaaaacgatttccgttgttacgttgttatgcgtactacctgctgttgtttattcaacatgtactgtacccactatgaataacgctaaattaacgtctaccgaaacatcgtttaatgataaccagaaagttacgtttacatgtgatcagggatatcattctttggatccaaatgctgtctgtgaaacagataaatggaaatacgaaaatccatgcaaaaaaatgtgcacagtttctgattatgtctctgaactatataataaaccgctatacgaagtgaattccaccatgacactaagttgcaacggcgaaacaaaatattttcgttgcgaagaaaaaaatggaaatacttcttggaatgatactgttacgtgtcctaatgcggaatgtcaacctcttcaattagaacacggatcgtgtcaaccagttaaagaaaaatactcatttggggaatatatgactatcaactgtgatgttggatatgaggttattggtgcttcgtacataagttgtacagctaattcttggaatgttattccatcatgtcaacaaaaatgtgatatgccgtctctatctaacggattaatttccggatctacattttctatcggtggcgttatacatcttagttgtaaaagtggttttacactaacggggtctccatcatccacatgtatcgacggtaaatggaatcccatactcccaatatgtgtacgaactaacgaaaaatttgatccagtggatgatggtcccgacgatgagacagatttgagcaaactctcgaaagacgttgtacaatatgaacaagaaatagaatcgttagaagcaacttatcatataatcatagtggcgttgacaattatgggcgtcatatttttaatctccgttatagtattagtttgttcctgtgacaaaaataatgaccaatataagttccataaattgctaccgtaaatataaatccgttaaaataattaataatttaataacaaacaagtatcaaaagattaaagacttatagctagaatcaattgagatgtcttcttcagtggatgttgatatctacgatgccgttagagcatttttactcaggcactattataacaagagatttattgtgtatggaagaagtaacgccatattacataatatatacaggctatttacaagatgcgccgttataccgttcgatgatatagtacgtactatgccaaatgaatcacgtgttaaacaatgggtgatggatacacttaatggtataatgatgaatgaacgcgatgtttctgtaagcgttggcaccggaatactattcatggaaatgtttttcgattacaataaaaatagtatcaacaatcaactaatgtatgatataattaatagcgtatctataattctagctaatgagagatatagaagcgcttttaacgacgatggtatatacatccgtagaaatatgattaacaagttgtacggatacgcatctctaactactattggcacgatcgctggaggtgtttgttattatctgttgatgcatctagttagtttgtataaataattatttcaatatactagttaaaattttaagattttaaatgtataaaaaactaataacgtttttatttgtaataggtgcattagcatcctattcgaataatgagtacactccgtttaataaactgagtgtaaaactctatatagatggagtagataatatagaaaattcatatactgatgataataatgaattggtgttaaattttaaagagtacacaatttctattattacagagtcatgcgacgtcggatttgattccatagatatagatgttataaacgactataaaattattgatatgtataccattgactcgtctactattcaacgcagaggtcacacgtgtagaatatctaccaaattatcatgccattatgataagtacccttatattcacaaatatgatggtgatgagcgacaatattctattactgcagagggaaaatgctataaaggaataaaatatgaaataagtatgatcaacgatgatactctattgagaaaacatactcttaaaattggatctacttatatatttgatcgtcatggacatagtaatacatattattcaaaatatgatttttaaaaatttaaaatatattatcacttcagtgacagtagtcaaataacaaacaacaccatgagatatattataattctcgcagttttgttcattaatagtatacatgctaaaataactagttataagtttgaatccgtcaattttgattccaaaattgaatggactggggatggtctatacaatatatcccttaaaaattatggcatcaagacgtggcaaacaatgtatacaaatgtaccagaaggaacatacgacatatccgcatttccaaagaatgatttcgtatctttctgggttaaatttgaacaaggcgattataaagtggaagagtattgtacgggactatgcgtcgaagtaaaaattggaccaccgactgtaacattgactgaatacgacgaccatatcaatttgtacatcgagcatccgtatgctactagaggtagcaaaaagattcctatttacaaacgcggtgacatgtgtgatatctacttgttgtatacggctaacttcacattcggagattctaaagaaccagtaccatatgatatcgatgactacgattgcacgtctacaggttgcagcatagactttgtcacaacagaaaaagtgtgcgtgacagcacagggagccacagaagggtttctcgaaaaaattactccatggagttcgaaagtatgtctgacacctaaaaagagtgtatatacatgcgcaattagatccaaagaagatgttcccaatttcaaggacaaaatggccagagttatcaagagaaaatttaatacacagtctcaatcttatttaactaaatttctcggtagcacatcaaatgatgttaccacttttcttagcatgcttaacttgactaaatattcataactaatttttattaatgatacaaaaacgaaataaaactgcatattatacactggttaacgcccttataggctctaaccattttcaagatgaggtccctgattatagtccttctgttcccctctatcatctactccatgtctattagacgatgtgagaagactgaagaggaaacatggggattgaaaatagggttgtgtataattgccaaagatttctatcccgaaagaactgattgcagtgttcatctcccaactgcaagtgaaggattgataactgaaggcaatggattcagggatatacgaaacaccgataaattataaaaaaagcaatgtgtccgctgtttccgttaataatactattttcgtaactggcggattattcataaataactctaatagcacgatcgtggttaacaatatggaaaaacttgacatttataaagacaaacaatggtcgattatagaaatgcctatggctagggtatatcacggcattgactcgacatttggaatgttatattttgccggaggtctatccgttaccgaacaatatggtaatttagagaaaaacaacgagatatcttgttacaatcctagaacgaataagtggtttgatatttcatatactatttataagatatccatatcatcattgtgtaaactaaataacgtcttctatgtatttagtaaggacattggatatgtggaaaagtatgatggtgcatggaagttagtacatgatcgtctccccgctataaaggcattatcaacttctccttattgattgaaaatgaaaatataaatagtttttatgtatagcagtattaccctatagttttattgcttactactaacatggatacagatgttacaaatgtagaagatatcataaatgaaatagatagagagaaagaagaaatactaaaaaatgtagaaattgaaaataataaaaacattaacaagaatcatccaagtggatatattagagaagcactcgttattaataccagtagtaatagtgattccattgataaagaagttatagaatgtatcagtcacgatgtaggaatatagatcatatctactaatttttataatcgatacaaaacataaaaaacaactcgttattacatagcaggcatggaatccttcaagtattgttttgataacgatggcaagaaatggattatcggaaatactttatattctggtaattcaatactatataaggtcagaaaaaatttcactagttcgttctacaattacgtaatgaagatagatcacaaatcacacaagccattgttgtctgaaatacgattctatatatctgtattggatcctttgactatcgacaactggacacgggaacgtggtataaagtatttggctattccagatctgtatggaattggagaaaccgatgattatatgttcttcgttataaaaaattcgggaagagtattcgccccaaaggatactgaatcagtcttcgaagcatgcgtcactatgataaacacgttagagtttatacactctcgaggatttacccatggaaaaatagaaccgaggaatatactgattagaaataaacgtctttcactaattgactattctagaactaacaaactatacaagagtggaaactcacatatagattacaacgaggacatgataacttcaggaaatatcaattatatgtgtgtagacaatcatcttggagcaacagtttcaagacgaggagatttagaaatgttgggatattgcatgatagaatggttcggtggcaaacttccatggaaaaacgaaagtagtataaaagtaataaaacaaaaaaaagaatataaaaaatttatagctactttctttgaggactgttttcctgaaggaaatgaacctctggaattagttagatatatagaattagtatacacgttagattattctcaaactcctaattatgacagactacgtaaactgtttatacaagattgaaattatattcttttttttatagagtgtggtagtgttacggatatctaatattaatattagactatctctatcgcgctacacgaccaatatcgattactatggatatcttctatgaaaggagagaatgtatttatttctccagcgtcaatctcgtcagtattgacaatactgtattatggagctaatggatccactgctgaacagctatcaaaatatgtagaaacggaggagaacacggataaggttagcgctcagaatatctcattcaaatccatgaataaagtatatgggcgatattctgccgtgtttaaagattcctttttgagaaaaattggcgataagtttcaaactgttgacttcactgattgtcgcactatagatgcaatcaacaagtgtgtagatatctttactgaggggaaaatcaatccactattggatgaaccattgtctcctagcaattagtgccgtatactttaaagcaaaatggttgacgccattcgaaaaggaatttaccagtgattatcccttttacgtatctccgacggaaatggtagacgtaagtatgatgtctatgtacggcaaggcatttaatcacgcatctgtaaaagaatcattcggcaacttttcaatcatagaactgccatatgttggagatactagtatgatggtcattcttccagacaagattgatggattagaatccatagaacaaaatctaacagatacaaattttaagaaatggtgtgactttatggatgctatgtttatagatgttcacattcccaagtttaaggtaacaggctcgtataatctggtggatactctagtaaagtcaggactgacagaggtgttcggttcaactggagattatagcaatatgtgtaatttagatgtgagtgtcgacgctatgatccacaaaacgtatatagatgtcaatgaagagtatacagaagcagctgcagcaacttctgtactagtggcagactgtgcatcaacaattacaaatgagttctgtgcagatcatccgttcatctatgtgattaggcatgttgatggaaaaattcttttcgttggtagatattgctctccgacaactaattgttaaccattttttttaaaaaaaatagaaaaaacatgtggtattagtgcaggtcgttgttcttccaattgcaattggtaagatgacggccaactttagtacccacgtcttttcaccacagcactgtggatgtgacagactgaccagtattgatgacgtcaaacaatgtttgactgaatatatttattggtcgtcctatgcataccgcaacaggcaatgcgctggacaattgtattccacactcctctcttttagagatgatgcggaattagtgttcatcgacattcgcgagctggtaaaaaatatgccgtgggatgatgtcaaagattgtacagaaatcatccgttgttatataccggatgagcaaaaaaccatcagagagatttcggccatcatcggactttgtgcatatgctgctacttactggggaggtgaagaccatcccactagtaacagtctgaacgcattgtttgtgatgcttgagatgctaaattacgtggattataacatcatattccggcgtatgaattgatgagttgtacatcttgacattttcttctttcttccagaaacaaactttttttacccactataaaataaaatgagtatactacctgttatatttttttattcttcattcgttcagacttttaacgcgcctgaatgtatcgacaaagggcaatattttgcatcattcatggagttagaaaacgagccagtaatcttaccatgtccttaaataaatacgctatcatccggatataatatattagatattttatgggaaaaacgaggagcggataatggtagcaatatgctaattctgaacccgacacaatcagactctggtatttatatatgcattaccacgaacgaaacctactgtgacatgatgtcgttaaatttgacaatcgtgtctgtctcagaatcaaatatagattttatctcgtatccacaaatagtaaatgagagatctactggcgaaatggtatgtcccaatattaatgcatttattgctagtaacgtaaacgcagatattatatggagcggacatcgacgccttagaaataagagacttaaacaacggacacctggaattattaccatagaagatgttagaaaaaatgatgctggttattatacatgtgttttagaatatatatacggtggcaaaacatataacgtaaccagaattgtaaaattagaggtacgggataaaataataccttctactatgcaattaccagatggcattgtaacttcaataggtagtaatttgactattgcatgcagagtatcgttgagacctcccacaacggatgcagacgtcttttggataagtaatggtatgtattacgaagaagatgatggggacggaaacggtagaataagtgtagcaaataaaatctatatgaccgataagagacgtgttattacatcccggttaaacattaatcctgtcaaggaagaagatgctacaacgtttacgtgtatggcgtttactattcctagcatcagcaaaacagttactgttagtataacgtgaatgtatgttgttacatttccatgtcaattgagtttataagaatttttatacattatcttccaacaaacaattgacgaacgtattgctatgattaactcccacgatactatgcatattattaatcattaacttgcagactatacctagtgctattttgacatactcatgttcttgtgtaattgcggtatctatattattaaagtacgtaaatctagctatagttttattatttaattttagataatataccgtctccttatttttaaaaattgccacatcctttattaaatcatgaatgggaatttctatgtcatcgttagtatattgtgaacaacaagagcagatatctataggaaagggtggaatgcgatacattgatctatgtagttttaaaacacacgcgaactttgaagaatttatataaatcattccatcgatacatccttctatgttgagatgtatatatccaggaattcgtttattaatatcgggaaatgtataaactaaaacattgcccgaaagcggtgcctctatctgcgttatatccgttcttaacttacaaaatgtaaccaatacctttgcatgacttgttttgttcggcaacgttagtttaaacttgacgaatggattaattacaatagcatgatccgcgcatctattaagtttttttactttaacgcccttgtatgtttttacagagactttatctaaatttctagtgcttgtatgtgttataaatataacgggatatagaaccgaatcacctaccttagatacccaattacattttatcagatccagataataaacaaattttgtcgccctaactaattctatattgttatatattttacaattggttatgatatcatgtaataacttggagtctaacgcgcatcgtcgtacgtttatacaattgtgatttagtgtagtatatctacacatgtatttttccgcactatagtattctggactagtgataaaactatcgttatatctatcttcaatgaactcatcgagatattgctctctgtcatattcatacacctgcataaactttctagacatcttacaatccgtgttattttaggatcatatttacatatttacgggtatatcaaagatgttagattagttaatgggaatcgtctataataatgaatattaaacaattatatgaggacttttaccacaaagcatcataaaaatgagtcgtcgtctgatttatgttttaaatatcaaccgcaaatcaactcataaaatacaagagaatgaaatatatacatattttagtcattgcaatatagaccatacttctacagaacttgattttgtagttaaaaactatgatctaaacagacgacaacctgtaactgggtatactgcactacactgctatttgtataataattactttacaaacgatgtactgaagatattattaaatcatggagtggatgtaacgatgaaaaccagtagcggacgtatgcctgtttatatattgcttactagatgttgtaatatttcacatgatgtagtgatagatatgatagacaaagataaaaaccacttattacatagagactattccaacctattactagagtatataaaatctcgttacatgttattaaaggaagaggatatcgatgagaacatagtatccactttattagataagggaatcgatcctaactttaaacaagacggatatacagcgttacattattattatttgtgtctcgcacacgtttataaaccaggtgagtgtagaaaaccgataacgataaaaaaggccaagcgaattatttctttgtttatacaacatggagctaatctaaacgcgttagataattgtggtaatacaccattccatttgtatcttagtattgaaatgtgtaataatattcatatgactaaaatgctgttgacttttaatccgaatttcgaaatatgtaataatcatggattaacgcctatactatgttatataacttccgactacatacaacacgatattcttgttatgttaatacatcactatgaaacaaatgttggagaaatgccgatagatgagcgtcgtatgatcgtattcgagtttatcaaaacatattctacacgtccggcagattcgataacttatttgatgaataggtttaaaaatataaatatttatacccgctatgaaggaaagacattattacacgtagcatgtgaatataataatacacacgtaatagattatcttatacgtatcaacggagatataaatgcgttaaccgacaataacaaacacgctacacaactcattatagataacaaagaaaattccccatataccattaattgtttactgtatatacttagatatattgtagataagaatgtgataagatcgttggtggatcaacttccatctctacctatctttcgtcgcttatcatactagtcatatcctaaatgttgatcatattccaccaaatgattgtgaaagagattgagattaaatcgtctaacaaacaattagtttttatgacattaacatataataaataaattaatcattattgacttaacgatgacgaaagttatcatcatcttaggattcttaattattaatacaaattcattgtctatgaaatgtgaacaaggtgtctcatattataattcacaagaattaaagtgttgtaaactatgtaagccaggaacatattcagatcatcgatgtgataaatacagcgataccatttgtggacattgtccgagtgacacattcacgtcaatatataatcgttctccttggtgtcatagttgtagaggtccatgtggtactaatcgagtagaggtcacaccttgtacacctaccacaaatagaatctgtcattgtgactcgaatagttattgtctccttaaagcttctgatggtaactgtgttacatgtgctcctaaaacaaaatgtggtcgtgggtatggaaagaaaggagaagatgaaatgggtaataccatttgtaagaaatgtcggaagggtacttattcagatattgtatctgactctgatcaatgtaaaccaatgacaagataagacttactcgcatctactggatagacataaaatatcctcctcgtaataatgaaatataatatacactaattattaatatcaataacaatcgagtattaatatataggtcatttttaaatcccttttgggttccgtcccaaacggcgtttcggtctgcgtcgccgccatggccatgccgagcctctccgcgtgctcctccatcgaggacgacttcaactatggcagctcggtggcgtctgccagcgtgcacatacgaatggcatttctaagaaaagtctacggtatcctttgtctacaatttcttttaacaacggcaacaactgcagtatttttatactttgactgcatgcggacatttatacaagggagtcctgttctaatattggcatcaatgttcggatctataggcttgattttcgcattgactttacacagacataaacatcccctgaatctgtacctgctttgtggatttacactgtcggaatctctaacgctggcctctgttgttactttctatgatgtgcatgtcgttatgcaagctttcatgctgactactgcagcgtttcttgctctgactacatatactctacaatcaaagagagatttcagtaaacttggagcaggattgtttgctgctttgtggattttaattttgtcaggactcttggggatatttgtgcaaaatgagacagtgaagctggtcctgtctgcttttggggcccttgtattctgtggattcattatctatgacacgcactcactaatacataagctctcgcctgaagagtatgtgttagcctctatcaatctctacttggatatcatcaatctgttcttgcatctgttgcagcttttggaagtatctaataagaaataaagtttaaaatagaattaataaaaacatataggtcattttttaaacatggattggaaaccaaggtagttagttaatacacacaagatatatttttttcacatcatccacccatgggtaacaccaaggttgttagttaataatatacaagatattttttctcactctgatccatgtaaaccaaggacgagataagacactctcattcctcatctacaacccattaaaaaaatggaaattaaagccctctattagcatagacggctacaggtctaccttcacaatggcctttccttgtgccaagttcagtccctgtcattgccacgctactaaggactccctgaataccgtggccgacgtcagacattgtctgactgaatacatcctgtgggtttctcatagatggacccatagagaaactgcagggtctctctacaggcttctcatctctttcagaactgatgcaacggagctctttggtggtgagttgaaggattcacttccgtgggacaattgcgtggagatcattaaatgtttcatcagaaatgactccatgaaaaccgccgaagaacttcgtgcaatcattggactttgtactcaatcagctatcgtctctggaagagtcttcaacgataagtatatcgacatactacttatgctgcgaaagattctgaacgagaacgactatctcaccctcttggatcatatccgcactgctaaatactaaatctccactacactttttatcatcttatgaggaatgattgccttcgtgaaataggaataattagcaccagaatagctatggattattgtggtagagagtgcactattctatgtcgtctactggatgaagatgtgacgtacaaaaaaataaaactagaaattgaaacgtgtcacaacttatcaaaacatatagatagacgaggaaacaatgcgctacattgttacgtctccaataaatgcgatacagacattaagattgttctctcgcggagtcgagagactttgtagaaacaacgaaggattaactccgctaggagtatacagtaagcatagatacgtaaaatctcagattgtgcatctactgatatccagctattcaaattcctctaacgaactcaagtcgaatataaatgatttcgatctgtattcggataatatcgacttacgtctgctaaaatacctaattgtggataaacggatacgtccgtccaagaatacgaattatgcaatcaatggtctcggattggtggatatatacgtaacgagagaccagaagtattgctatggcttcttaaatcagaatgttacagcaccggttacgtatttcgtacctgtatgtacgacagtgatatgtgtaagaactctcttcattactatatatcgtctcatagagaatctcaatctctatccaaggatgtaattaaatgtttgatcgataacaatgtttccatccatggcagagacgaaggaggatctttacccatccaatactactggtctttctcaaccatagatatagagattgttaaattattattaataaaggatgtggacacgtgtagagtatacgacgtcagccctatattagaggcgtattatctaaacaagcgatttagagtaaccccatataatgtagacatggaaatcgttaatcttcttattgagagacgtcatactcttgtcgacgtaatgcgtagtattacttcgtacgattccagagaatataaccactacatcatcgataacattctaaagagatttagacaacaggatgtacaagccatgttgataaactacttacattacggcgatatggtcgttcgatgcatgttagataacggacaacaactatcctctgcacgactactttgttaataataatctcgtcgatgtaaacgtcgtaaggtttatcgtggaaaatatggacacgcggctgtaaatcacgtatcgaacaatggccgtctatgtatgtacggtctgatattatcgagatttaataattgcgggtatcactgttatgaaaccatactgatagatgtatttgatatactaagcaagtacatggatgatatagatatgatcgataactctactatattacgcggtcgatgtcaataatatacaatttgcaaagcggttattggaatatggagcgagtgtcacgctcgataatcaatacggccatccagaaaagcagttaccaaagagaaaacaaaacgaagctagttgatttattactgagttaccatcccactctagagactatgattgacgcatttaatagagatatacgctatctatatcctgaaccattattcgcctgtatcagatacgccttaatcctagatgatgattttccttctaaagtaaagtatgatatcgccggtcgtcataaggaactaaagcgctatagagtagacattaatagaatgaagaatgtctacatatcaggcgtctccatgtttgatatattatttaaacgaagcaaacgccacaaattgagatacgcaaagaatccgacatcaaatggtacaaaaaagaactaacgtccatcattacagaaactgtaaagaacaatgagaggatcgactccatagtggacaacattaatacagacgataacttgatttcgaaattacccatggagatactttattactccattaaataatttatcatggagcgataatgtcctgtttcatttgtttccatgacatattacaaaatcgattccgtccaagatgataaaaacatttaccggcatcataaacacggagtttattttatatgtctcgcataaacattactaaaaaaatatattgttcggttttctttcacatctttaattatgaaaaagtaaatcattatgagatggacgagattgtacgcatcgttcgcgacagtatgtggtacatacctaacgtatttatggacgacggtaagaatgaaggtcacgtttctgtcaacaatgtctgtcatatgtattttacgttctttgatgtggatacatcgtctcatctgtttaagctagttattaaacactgcgatctgaataaacgaggtaactctccattacattgctatacgatgaatacacgatttaatccatctgtattaaagatattgttacaccacggcatgcgtaactttgatagcaaggatgaccactatcaatcgataacaagatctttgatatactaacggacaccattgatgactttagtaaatcatccgatctattgctgtgttatcttagatataaattcaatgggagcttaaactattacgttctgtacaaaggatccgaccctaattgcgccgacgaggatgaactcacttctcttcattactactgtaaacacatatccacgttctacgaaagcaattattacaagttaagtcacactaagatgcgagccgagaagcgattcatctacgcgataatagattatggagcaaacattaacgcggttacacacttaccttcaacagtataccaaacatagtcctcgtgtggtgtatgctcttttatctcgaggagccgatacgaggatacgtaataatcttgattgtacacccatcatggaacgattgtgcaacaggtcatattctcataatgttactcaattggcacgaacaaaaggaagaaggacaacatctactttatctattcataaaacataatcaaggatacactctcaatatactacggtatctattagataggttcgacattcagaaagacgaatactataataccgcctttcaaaattgtaacaacaatgttgcctcatacatcggatacgacatcaaccttccgactaaagacggtattcgacttggtgtttgaaaacagaaacatcatatacaaggcggatgttgtgaatgacatcatccaccacagactgaaagtatctctacctatgattaaatcgttgttctacaagatgtctctccctacgacgattactacgtaaaaaagatactagcctactgcctattaagggacgagtcattcgcggaactacatagtaaattctgtttaaacgaggactataaaagtgtatttatgaaaaatatatcattcgataagatagattccatcatcgtgacataagtcgcctcaaagagattcgaatctccgacaccgacctgtatacggtatcacagctatcttaaagccatacattcagacagtcacatttcatttcccatgtacgacgatctcatagaacagtgccatctatcgatggagcgtaaaagtaaactcgtcgacaaagcactcaataaattagagtctaccatcggtcaatctagactatcgtatttgcctccggaaattatgcgcaatatcatctaaacagtatgttgtacggaaagaaccattacaaatattatccatgatagaaagaaaatatctatatgattggagaagtaggaaacaggaacaagacaacgattactacattattaaatcatgaagtccgtattatactcgtatatattgtttctctcatgtataataataaacggaagagatatagcaccgcatgcaccatccgatggaaagtgtaaagacaacgaatacaaacgccataatttgtgtccgggaacatacgcttccagattatgcgatagcaagactaacacacgatgtacgccgtgtggttcgggtaccttcacatctcgcaataatcatttacccgcttgtctaagttgtaacggaagacgcgatcgtgtaacacgactcacaatagaatctgtgaatgctctcccggatattattgtcttctcaaaggatcatccggatgcaaggcatgtgtttcccaaacaaaatgtggaataggatacggagtatccggagacgtcatctgttctccgtgtggtctcggaacatattctcacaccgtctcttccgcagataaatgcgaacccgtacccagtaatacgtttaactatatcgatgtggaaattaatctgtatcccgtcaacgacacgtcgtgtactcggacgaccactaccggtctcagcgaatccatctcaacgtcggaactaactattactatgaatcataaagactgtaatcccgtatttcgtgatggatacttctccgttcttaataaggtagcaacttcaggattctttacaggagaaaggtgtgcactctgaatttcgagattaaatgcaataacaaagattcttcctccaaacagttaacgaaagcaaagaatgatactatcatgccgcattcggagacagtaactctagtgggcgacatctatatactatatagtaataccaatactcaagactacgaaactgatacaatctcttatcatgtgggtaatgttctcgatgtcgatagccatatgcccggtagttgcgatatacataaactgatcactaattccaaacccacccactttttatagtaagtttttcacccataaataataaatacaataattaatttctcgtaaaagtagaaaatatattctaatttattgcgcggtaaggaagtagaatcataaagaacagtactcaatcaatagcaattatgaaacaatatatcgtcctggcatgcatgtgcctggcggcagctgctatgcctgccagtcttcagcaatcatcctcatcctcctcctcgtgtacggaagaagaaaacaaacatcatatgggaatcgatgttattatcaaagtcacaaagcaagaccaaacaccgaccaatgataagatttgccaatccgtaacggaaattacagagtccgagtcagatccagatcccgaggtggaatcagaagatgattccacatcagtcgaggatgtagatcctcctaccacttattactccatcatcggtggaggtctgagaatgaactttggattcaccaaatgtcctcagattaaatccatctcagaatccgctgatggaaacacagtgaatgctagattgtccagcgtgtccccaggacaaggtaaggactctcccgcgatcactcgtgaagaagctcttgctatgatcaaagactgtgaggtgtctatcgacatcagatgtagcgaagaagagaaagacagcgacatcaagacccatccagtactcgggtctaacatctctcataagaaagtgagttacgaagatatcatcggttcaacgatcgtcgatacaaaatgtgtcaagaatctagagtttagcgttcgtatcggagacatgtgcaaggaatcatctgaacttgaggtcaaggatggattcaagtatgtcgacggatcggcatctgaaggtgcaaccgatgatacttcactcatcgattcaacaaaactcaaagcgtgtgtctgaatcgataactctattcatctgaaattggatgagtagggttaatcgaacgattcaggcacaccacgaattaaaaaagtgtaccggacactatattccggtttgcaaaacaaaaatgttcttaactacattcacaaaaagttacctctcgcgacttcttctttttctgtctcaatagtgtgatacgattatgacactattcctattcctattcctattcctatttcctttcagggtatcacaaaaatattaaacctctttctgatggtctcataaaaaaagttttacaaaaatatttttattctctttctctctttgatggtctcataaaaaaagttttacaaaaatatttttattctctttctctctttgatggtctcataaaaaaagttttacaaaaatatttttattctctttctctctttgatggtctcataaaaaaagttttacaaaaatatttttattctctttctctctttgatggtctcataaaaaaagttttacaaaaatatttttattctctttctctctttgatggtctcataaaaaaagttttacaaaaatatttttattctctttctctctttgatggtctcataaaaaaagttttacaaaaatatttttattctctttctctctttgatggtctcataaaaaaagttttacaaaaatatttttattctctttctctctttgatggtctcataaaaaaagttttacaaaaatatttttattctctttctctctttgatggtctcataaaaaaagttttacaaaaatatttttattctctttctctctttgatggtctcataaaaaaagttttacaaaaatatttttattctctttctctctttgatggtctcataaaaaaagttttacaaaaatatttttattctctttctctctttgatggtctcataaaaaaagttttacaaaaatatttttattctctttctctctttgatggtctcataaaaaaagttttacaaaaat

(The sequence listing continues in the following parts.)
